United States Patent Application Publication US 2005/0196754 A1 - sequence listing, part 3

SEQ ID NO: 4742 - DNA, 1194 bp, Homo sapiens
  SIMILAR (370)..(1191): 861254mologous to Homo sapiens p40,accession number U93564,Smith-Waterman Score=1195.
atgagaacaccaaagagcagcatcaaacccagtctaggggaggaaaaggaaaattatagaggttctttgaaagagacagcaccttccttgcaaaaagaatgggcagagcagtcaagcaaaagccaagagacagtgggagtgaagggaataaccagacacttccaggtctcaacactgttggaaagaagagaggataggaagagcaaagagccaccgctgctgatacccaggcaaacagtgtctggagtggacctccagcaaactccaacagacctgcagctgagtgtcctgactgttagaaggaaaactaacaaacagaaaggacatccacaccaaaaacccatctgtacgtcaccatcatcaaacaccaaagttaaaaaccttgaaaaacaattagacgaatggctaactagaataaccaatgcagagaagtcctcaaaggaccggatggagctgaaaaccaaggcacgagaactacatgacgaatgcacaagcctcagtagccgatgcgatcaactggaagaaagggtatcagtgacagaagatgaaatgaatgaaatgaagcgaggagagaagtttagagaaaaaagaataaaaagaaacgaacaaagcctccaagaaatatgggactatgtgaaaagaccaaatctatgtctgattggtgtacctgaaagtgatggggagaatggaaccaagttggaaaacactttgcaggatattatccaggagaacttccccaatctagcaaggcaggccaacattcagattcaggaaatacagagaatgccacaaagatactcctcgagaagagcaactccaagacacataattgtcagattcaccaaagttgaaatgaaggaaaaaatgttaagggcagccagagagaaaggtcaggttacccacaaagggaagcccatcagactaacagctgatctctcggcagaaaccccacaagccagaagagagtggggaccaatattcaacattcttaaaggaaagaattttcaacccagaatttcatatccagccaaactaagcttcataagtgaaggagaaataaaatattttacagacaagcaaatgctgagagattttgtcaccaccaggtctgccctaaaagagctcctgaaggaagcactaaacacggaaaggcacaaccggtaccagtcactgcaaaaacatgccaaattgtaa

SEQ ID NO: 4743 - DNA, 672 bp, Homo sapiens
  SIMILAR (672)..(175): 781254mologous to Homo sapiens p40,accession number U93564,Smith-Waterman Score=675.
tcagccttctttacaaaaactctttgctgctgcagcccgcctgtcctttgcatcactgaattcatacttctggaagtacccaatatgcacgtgttggtcatcagtgggtcctttttggttcttcgtgttgagtttacatggtgtggtctcgtggtagatagggaagttggggcccgtttcaggtacaccaatcagacgtagatttggtcttttcacatagtcccatatttcttggaggcttttttcatttctttttattctttttcctctaaacttctcttctcgcttcatttcattcatttgatcttccatcactgataccctttcttccagttgatcaaatcggctactgaggcttgtgcattcgtcacgtagttctcgtgccgtggttttcagctccatcaggtcctttaaggacttctctgcattggttattctagttagccattcgtctaatctttttgcaatgtttttaacttctttgctgtgggttcgaacttcctcttttagctcggagaagtttgattgtctgaagccttcttctctcaactcatcaaagtcattctccgtccagctttgttccgttgctggtgaggagctgcattcctttggaggaggagaggcgctctgatttttagaattttcagtttttctgctctgttttttccccat

SEQ ID NO: 4744 - DNA, 1509 bp, Homo sapiens
  SIMILAR (613)..(1503): 921254mologous to Homo sapiens putative p150,accession number U93572,Smith-Waterman Score=1471.
atggggaaaaaacagagcagaaaaaccggaaactctaaaaatcagagcacctctcctcctccaaagcaacgcagctcctcaccagcaacggaacaaagctggatggagaatgactttgacgagttgagagaagaaggcttcagaacatcaaactactccgagctaaaggaggaagttcgaacccatggtaaaaaagttaaaaactttgaaaaaaaattagatgaatggctaaccagaataagcaatgcagagaagtccttaaatgacctgatggagctgaaaaccacggcacgagaactatgtgacgaatgcacaagcctcagtagccgatgcaatcaactggaagaaagggtatcagcaatggaagacgaagtgaatgaaatgaatgtatctgaaagtgatggggagaatggaaccaagttggaaaacactctgcaggatattatccaggagaacttccccaatctagcaaggcaggccaacattcaaattcaggaaatacagacaacgacagaaagatactcctcaagaagagcaactccaagacacataattgtcagattcaccaaaattgaaatgaaggaaaatatgttaagggcagccagagagaaagccccaaatctcattaagctgataagcaacttcagcaaagtctcaggatacaaaatcaatgtgcaaatatcacaagcattcgtatacaccaataacagacaaacagagagccaaatcatgagtgaactcccattcacaatggcttcaaagagaataaaatacctaggaatccaacttagaagggatgtgaaggacctcttcaaggagaactacaaaccactgctcaatgaaataaaagaggatacaaacaaatgcaaaaacattccatgctcatgggtaggaagaatcaatatcgtgaaaatggccatactgcccaaggtaatttatagattcaatgccatccccatcaagctaccaatgactttcttcacagaattggaaaaaactactttaaagctcatatggaaccaaaaaggagcccgcattgccaagtcaatcctaagccaaaagaacaaagctggaggcatcacgctacctgacttcaaactataccacaaggctacagtaaccaaaacagcatggtactggtaccaacacagagatatcgaccaatggaacagaacagagccctcagaaataatgccgcatatctacaagtatctgatctttgacagacctgagaaaaacaagcaatggggaaaggattccctatttaataaatggtgctgggaaaactggctagccacatgtggaaagctgaaactggatcccttccttacaccttatacaaaaattaattcaagatggattaaagacttaaatgttagacctaaaaccataaaaacgctagaagaaaacctaggcaataccattcaggacataggcatgagcaagtacttcatatctaaaacaccaaaagcaatggcaacaaaagccaaaattgacaaatgggtctaa

SEQ ID NO: 4745 - DNA, 930 bp, Homo sapiens
  SIMILAR (268)..(585): 571254mologous to Homo sapiens p40,accession number U93564,Smith-Waterman Score=289.
aggagcgacaccacccccccccccaagcagggccccaccccccccgaagaagaaaggaaagaaacacacacagacaaccgacaccacaaccgcacggggcaggaagatctccgtcccccaaacaaccaacaaaggaatcagcagcagcatcaccagcacacaaagaaaccagccgcaggcaacaaccgtggaaaaagcacacaacgagagcacgaggacccccgaagaaccaaaaggggcggtaagggggacccggtagaagaagaagaaaaccagcagggacacccccccacagaccccctgagaaaagagctcctcagcaacgaggaacaaagcaggaggaaaagacagcgacaaaagagagaggaaggctacagaagatcaaactactccgagcaaaaggaggaagttacacccaatggcaaagaagttaaaaactttgaaaaaaaattagatgaatggataactagaataaccaatgcagagaagtccttaaaggacctgatggagctgaaaaccacggcacgagaactacgtgatgaatgcacaagcctcagtaaccgatgcgatcaactggaagaaagggccccccccgcgccccacaaccaacgacgccaaaatagtcactcgacccacacaccctacctgcagccaccaccgccccccaagaaaaccgccacgcacacacccaacgccaacgcccacgcaaaacaaaatatcacagtaaaacggatacactccaccaaggggaaagagagtacgagaggacagatgcaagcccccacaggccccgacaagcgccccccgagccgcgaagcaacggcaatcctagaagatgaaaagaaccaaagcagtaaaaaagcaacaaagagtcctatcaatagaaggtgcctagtgacaaaccactgcgaccatcaagaagggaattga

SEQ ID NO: 4746 - DNA, 4673 bp, Homo sapiens
  SIMILAR (2445)..(4667): 931254mologous to Homo sapiens putative p150,accession number U93567,Smith-Waterman Score=3560.
ggggctgcagaggtctttcccagtcgtgcagtaaaaaatttcaaggaacaattctgagctgtttcagccaaatgtctatacctgcattagtcactgttctgcagatagagtgtgatgattaaccagaagtggagcaaggtgctgtgattgggaactgcaccagaatcacaagatctcaatagaggagagcaattccccaaatcatacttgagagatcactggaagattctaacaggcatttggcagataaaaataacatgcctactgtgcttttctatttagatttatattttctatagtttattcttaacctactagtactgctaactaaaaatcgagtgtttcttgtgttaaaaaacatgcttttacaaaaaaaaattaaattttaatacctttgcaactgaaaggagatataaatgaggatattcagaatttcagcattaatgtttaagtttcagaatacacaaacttgtttttattggttaaagaatgtttttcacttcattgcaaacttaaccaaaaagaagagtagttgttttactttagatgttcatcatatattgttcaaacagcttctttttcaaaagaaagtctatgtcaggtaaaattctatttgttgctttgcaagctgtacctctagatgatagatttcatgtatcttagaattagatttctgtgttcttagattcctgtgttcctagcaacttgtagggaataccttaaaaagtatctacttgggggtggagccaagatggccgaataggaacatctccagtctacagctcccagcgtgagcgacacagaagacgggcgatttctgcatttccaactgaggtaccggattcatctcactggggagtgccggacagtgggtgcaggacagtgggtgcaacgcaccatgcgtgagccgaagcagggtgaggcatcgcctcacctgggaagcgcaaggggtcagggaattccctttcctagtcaaagaaaggggtgacagacggcacctggaaaatcgggtcactcccaccctaaaactgcacttttccaacgggcttaatggcacaccaggagattatatcctgcacctggcttggaggatcctacgcccatggagcctcactcattgctagcccagcagtctgagatcaaactgcaaggcagcagcgaggctgggggaggggcgcccaccattgcccaggcttgagtaggtaaacaaagcagcccggaaactcgaactgggtggagcccaccgcagctcaaggaggcctgcctgcctctgtaggctccacctctgggggcagggcacagacaaacaaaaggcagcagaaacccctgcagacttaaatgtccctgtctgacagctttgaagagagtagtggttctcccagcacgcagcttgagatccgagaacgggcagactgcctcctcaagtgggtccctgacccccgagtagcctaactgggaggcaccccccagtaggggcgcactgacacttcacacggctgggtactcctctgagacaaaacctccagaagaacgattagacagcagcatttgcggttcaccaatatccgctgttctgcagccactgctgcctgatacccagacaaacagggtctggagtggacctccagcaaactccaacaggcctgcagctgagggtcctgactgttagaaggaaaactaacaaacagaaaggacatccacaccaaaaacccatctgtacgtcaccatcatcaaagaccaaagagaagtccttcaaggacctgatggagctgaaaaccacagcacaagaactacatgatgaatgcacaagcctcagtaaccgatgcaatcaactggaagaaattgtatcagcaatggaagacgaaatgaatgaaatgaagcgtgaagaaaagtttagagaaaaaagaatgaaaaggaacaaacaaagcctccaagaaatatgggactatgtgaaaagaccaaatctacgtctgattggtgtacctgaaagtgatggggagaatgaaaccaacttggaaaacactctgcaggatattatccaggagaacttccccaatctagcaaggcaggccaacattcaaattcaggaaatacagagaatgccacaaagatactcctcgagaagagcaactccaagacacataattgtcagattcaccaaagttgaaatgaaggaaaaaatattaagggcagacagagagaaaggtcaggttacccacaaagggaagcccatcagactaccagcggatctctcagcagaaactctacaagccagaagagagtgggggccaatattcaacattcttaaagaaaagaattttcaacccagaatttcatatccagccaaattaagcttcataagtgaaggagaaataaaatactttacagacaagcaaatgctgagagattttgtcaccaccaggcctgccctacgagagctcctgaagcacagactggcaaattggataaagagtcaagacccatcagtgtgctgtattcaggaaacccatctcacgtgcagagacacacataggctcaaaataaagggatggaggaagatctaccaagcaaatggaaaacataaaaaggcaggggttgcaatcctagtctcggataaaacagactttaaaccaacaaagatcaaaagagacaaagaaggccattacataatggtaaagggatcaattcaacaagaagaactaactatcctaaatatatatgcacccaatacaggagcacgcagattcgtaaagcaagtccttagtgacctacaaagagacttagactcccacacaataataatgggagactttaataccccactgtcaacattacacagatcaacgagacagaacgttaacaaggatatccaggaattgaactcggctctgcaccaagcagacctaatagacatttacagaactgtccaccccaaatcaacagaatctacattcttttcagcaccacaccacacctattccaaaattgaccacataattggaagtaaagcactcctcagcaaatgtaaaagaacagaaattataacaaactgtctctcagaccacagtgcaatcaaactagaactcaggattaagaaactcactcaaaaccgctcaactacatggaaactgaacaacctgctcctgaatgactactgggtacctaacgaaatgaaggcagaaataaagatgttctttgaaaccaacgagaacaaagacacaacataccagaatctctgggacacaatcaaagcagcgtgtagagggaaatttatagcactaagtgcccacaagagaaagcaggaaagatctaaaattgacatcctaacatcacaattaaaagaactagagaagcaagagcaaacacattcaaaagctagcagaaggcaagaaataactaagatcagagcagaactgaaggagacagagacacaaaaaacctttcaaaaaatcaatgaatccaggagctggttttttgaaaagatcatcaaaattgatagactgctagcaagactaataaagaagaaaagagagaagaatcaaatagatgcaataaaaaatgacaaaggggatatcaccaccgatcccacagaaatacaaactaccatcagagaatactataaacatctctacgcaaataaactagaaaatctagaagaaatggataaattccttgacacatacaccctcccaagactaaacaaggaagaaactgaatctctgaatagaccaataacaggctctgaaattgaggcaataattaatagcttagcaaccaaaaaaagtccaggaccagatggattcacagccgaattctaccagaggtacaaggaggaactggtaccattccttctgaaactattccaatcaatagaaaaacagggaatcctccctaactcattttatgaggccagcatcatcctgataccaaagcctggcagagacacgacaaaaaaagagaattttagaccaatatctttgatgaacattgatgcaaaaatcctcaataaaatattggcaagccgaatccagcaacccatcaaaaagcttatccaccatgatcaagtgggcttcatccctgggatgcatggctggttcaacatacgcaaatcaataaacgtaatccagcctataaacagaaccaaagacaaaaaccacatgattatctcaatagatgcagaaaaggcctttaacaaaattcaacaacacttcatgctaaaaactctcaataaattaggtattgatgggacgtatctcaaaataataagagctatctatgacaaacccacagccaatatcatactgaatggacaaaaactggaagcattccctttgaaaactggcacaagacagggatgccctctctcaccactcctattcaacatagtgttggaagttctggccagggcaatcaggcaggagaaggaaataaagggcattcaattagaaaaagaggaagtcaaattgtccctgtttgcagatgacatgattgtatatctagaaaaccccattgtctcagcccaaaatctccttaagctgataagcaacttcagcaaagtctcaggatacaaaatcaatgtacaaaaatcacaagcattcttatacaccaataacagacaaacagagagccaaatcatgagggaactcccattcacaattgcttcaaaggaataa

SEQ ID NO: 4747 - DNA, 2148 bp, Homo sapiens
  SIMILAR (601)..(1314): 831254mologous to Homo sapiens p40,accession number U93570,Smith-Waterman Score=1019.
atgaagctggagcatcaggaagcacagcggaggagtgggcaggggagggagaagcggaggtggccagaaggaaaggcggggccaggttgtgaaggggcctggatactctgtcctgagagccaggatgattccaaacaggagggtgacaacaatatgattgtggttagcagaaatgctgtcaggagtgtgaaggctgaattccaaggtgacaacctggagaactgggaaagctgttcagaggctataatagtccaagggagagataatggggtaccccacaaggcccatggccttgggactgaagaagagggaacagttttgaaaatcagtgagaggcagaactggttggatttggtggattttattttgttaggtggtgatctttttcatgaaaataagccctcaaggaaaacattacatacctgcctcgagttattaagaaaatattgtatgggtgatcggcctgtccagtttgaaattctcagtgatcagtcagtcaactttggttttagaaaactaacaaacagaaaggacatccacaccaaaaacccatctgtacgtcaccatcatcaaagaccaaaggtagatgaaaccataaagatggggaaaacacagagcagaaaaaccagaaactctaaaaatcagagcacctctcctcctccaaaggaacgcagctcctcaccagcaatagaacaaagctggatggagaatgactttgatgagttgaaagaagaaggcttcagaagatcaaactactccgagctaaaggaggaagttcgaaccaatggcaaagaagttaaaaaccttgaaaaaaaattagacaaatggataactagaataaccaatgcagagaagtccttaaaggacctgatggagctgaaaaccatagcacaagaactacgtgacgaatgcacaagcctcagtaaccaatgtgatcaactggaagaaagggtatcagtgatggaagatcaaatgaatgaaatgaagcgtgaagagaagtttagagaaaaaagaataaaaagaaatgaacaaagcctccaagaaatatgggactatgtgaaaagaccaaatctatgtctcattggtgtacctgaaagtgacggggagaatggaaccaagttggaaaacactctgcaggatattatccaggtgaacttccccaatctagcaaggcaggccaacattcaaattcaggaaatacagagaatgccacaaagatactccttgagaagagaaactccaagacacataattgtcagattcaccaaagttgaaatgaaggaaaaaatgttaaggacagccagagagaaagggctggagtgcagcggcgcgggcttggctcattgcaagctctggcttctgggccccagtgatcctcctgactgctcttccgtatcgcccgtattacgggtgcacctcgtgctgccctcctcccttccccactctgttggcacaccgttcctcggttccgtatccatccccccttctgtccctcgttttcccgatcgcgtgttccacccctatccctacacgcattattgtgacaatctaaaaacttgtcacacttcacatggatctgtcatggcggaaacagcggttatcaatcacaagaaacgtaaaaatagcccgcgaatcgtccagtcaaacgacctcactgaggcggcatatagtctctcccgggatcaaaaacgtatgctgtatctgttcgttgaccagatcagaaaatctgatggcaccctacaggaacatgacggtatctgcgagatccatgttgctaaatatgctgaaatattcggattgacctctgcggaagccagtaaggatatacggcaggcattgaagagtttcgcggggaaggaagtggttttttatcgccctgaagaggatgccggcgatgaaaaaggctatgaatcttttccttggtttatcaaacgtgcgcacagtccatccagagggctttacagtgtacatatcaacccatatctcattcccttctttatcgggttacagaaccggtttacgcagtttcggcttagtgaaacaaaagaaatcaccaatccgtatgccatgcgtttatacgaatccctgtgtcagtatcgtaagccggatggctcaggcatcgtctctctgaaatcgactggatcatag

SEQ ID NO: 4748 - DNA, 3676 bp, Homo sapiens
  SIMILAR (895)..(1851): 901254mologous to Homo sapiens putative p150,accession number U93572,Smith-Waterman Score=1494.
ggataccttcctaatattctctcctaccatgaagcaccactgtgtccagaagtttcagcagcagagactaagctaagaataaaggaaatcatggagaaactagaccagctgatcccacccagacctttcacccacatgaacacaaccaccagtgctgcacacagcacagccaccatcctcaaccctcgagacacgcactacaggaggcaccagctggacatcctgctggaggcttatcctctgctgcattccacaatatgctcaccccattggcctattgaagaagtccatgatgactttgctcatgacgggaattatcaggaacgcagctcctcaccagcaacagaacaaagctggacggagaatgactttgacgagttgagagaggaaggcttcagaagatcaaactactctgagctaaaggaggaagttcgaatcaatggcaaagaagttaaaaactttgaaaaaaaattagatgaatggataactagaataatcaatgcagagaagtccttaaaggacctgatggagctgaaaaccacagcacgagagctacgtgacaaatgcacaagcttcagtaaccgatgtgatcaactggaagaaagggtatcagtgatggaagacgaaatgaatgaaatgaagcatgaagagaagtttggagaaaaaagaataaaaagaaacgaacaaagcctccaagaaatatgggactatgtgaaaagaccaaatctacgtctcattggtgtacctgaaagtgatggggagaatggaaccaagttggaaaacactctgcaggatattatccaggagaacttccccaatctagcaaggaaggccaacattcaaattcaggaaatacagagaacgccacaaagatactcctcgagaagagcaactaactccaagacacactttaaaccaacaaagatcaaaagagacaaagaaggccattacataatggtaaagggatcaattcaacaagaagagctaactatcctaaatatatatgcacccaatagaggagcacccagattcataaagcaagtcctgagtgacctacaaagagacttagactcccacacaataataatgggagactttaacaccccactgtcaacattagacagatcaatgagacagaaagttaacaaggatatccaggaattgaactcagctctgcaccaagcagacctaatagacatctacagaattccccaccccaaatcaacagaatatacattcttttcagcaccacaccacacctattccaaaattgaccacatagttggaagtaaagcactcctcagcaaatgtaaaagaacagaaattataacaaactgtctcttagaccacagtgcaatccaactagaactcaggattaagaaactcactcaaaaccactcaactacatggaaactgaacaaccttctcctgaatgactactgggtacataacgaaatgaaggcagacataaagctgtactttgaaaccaatgagaaaaaagacacaacataccagaatctctgggacacattcaaagcagtgtgtagagggaaatttatagcactaaatgcccacaagagaaagcaggaaagatctaaaattgacaccctaacatcacaattaaaagaactagagaagcaagagcaaacacattcaaaagctggcagaaggcaagaaataactaagatcagagcagaattgaaggagatagagacacaaaaaacccttcaaaaaatcaatgaatccaggagctggttttttgaaaggatcaacaaaattgatagactgctagcaagacaaacaaagaagaaaagagagaagaatcaaatagacgcaataaaaaatgttaaaagaggatatcactactgaccccacagaaataaaaacaatcatcagagaatactataaacacctctatgcacataacctagaaaatctagaagaaatggataaattcctggacacatacaccctcccaagactgaaccaggaggaagctgaatccctgaatagaccaataacaaattctgaaattgagacagtaataaatagtctaaaagaaaaagcccaggaccagaaggatttacagctgaattctactagagcactattcacaatagcaaaggcctggaatcaaccaaaatgcccatcaatgacagacgagataaagaaaatgtggaacatatacaccatggaatactatgcagccatcaaaaggaatgagatcatgtcctttgcaggaatgtggatgaagctggaagccattatcctcagcaaactcatacaagaacagaaaaccaaacactgcatgttctcacttaaaagcaataggtcgaccatagtagaagaattaagcaaggccagaaaggagacaaataaactgggaataaatgagtgggtcattgataagccttatcatttgtgtggagaaatgacacaagagatagaaggatatgaagctgtagtcaaagggaatgtagtttcacaaagcagcttaaccccattgatggtgaacgggattctgggggagtcagtaactcttcccctggagtttcctgcaggagagaaggtcaacttcatcacttggcttttcaatgaaacatctcttgccttcatagtaccccatgaaaccaaaagtccagaaatccacgtgactaatccgaaacagggaaagcgactgaacttcacccagtcctactccctgcaactcagcaacctgaagatggaagacacaggctcttacagagcccagatatccacaaagacctctgcaaagctgtccagttacactctgaggatattaaattccctatctttgtctactcagcgaacacagggccccgcagagtccgcaaggaacctagagtatgtttcagtgtctccaacgaacaacactgtgtatgcttcagtcactcattcaaacagggaaacagaaatctggacacctagagaaaatgatactatcacaatttactccacaattaatcattccaaagagagtaaacccactttttccagggcaactgcccttgacaatgtcgtaataaccaatgcagagaagtccttaaaggacctgatggagctgaaaaccatggcacgagaactatgtaacgaatgcacaagcctcagtagccgatgcgatcaactggaagaaagggtgtcagcgatggaagatgaaatgaataaaatgaagcaagaagagaagtttagagaaaaaagaatagaaagaaatgaacaaagcctccaagaaatatgggactatgtgaaaagaccaaatctacgtctcattggtgtacctgaaagtgatggggagaatggaaccaagttggaaaaggctctgcaggatattatccaggagaacttccccaacctagtaagggaggctaacattcaaattcaggaaatacagagaatgccacaaagatactcctcaagaaaagcaactccaagacacgtaattgtcagattcaccaaagttgaaatgaaggaaaaaatgttaagggcagccaaagagaaaggtcgggttacccacaaagggaagcccatcagactaacagctgatctctcggcagaaactctacaagccagagagagtggagaccaatattcaacattcttaaagaaaagaattacaacccagaatttcatatccagccaaactaagcttcataagtga

SEQ ID NO: 4749 - DNA, 2261 bp, Homo sapiens
  SIMILAR (674)..(1501): 1001254mologous to Homo sapiens erbb2-interacting protein ERBIN,accession number AF263744,Smith-Waterman Score=1415.
aaccaaagacaaaaaccacatgattatctcaatagatggaggaaaggccttcgacaaaattcaacagcccttcatgctaaaaactctcaataaactgggtattgatggaacatatctcaaaagaataagagctatttttgacaaacccacagccaatatcatactgaatgggcaaaaactggaagcattccctttgaaaactggcacaagacagggatgccctctctcaccactcctattcaacatagtgttggaagttctggccagggtaatcaggcaagagaaagaaataaagggtattcaattcggaaaagaggaagtaaaattgtccctatttgcagatgacatgactgtatatttagaaaaccccatcttctcagcccaaaatctccttaagctgataagcaacttcagcaacgtctcaggatacaaaatcaatgtgcaaaaatcacaagcatttttatacaccaataacagccaaatcatgagtgaactcccattcacaattgctacaaagagaataacatatctaggaatccaacttgcaagggatgtgaaggacctcttcaaggagaactacaaaccactgctcaatgaaataaaagaggatacaaacaaatggaagaacattccatgctcacagataggaagaatcctatggccatactgcccaaggcaagaagatgaaaattttaacagccttttacaaaatggagatattttaaacagttcaacagaggaaaagttcaaagctcatgataaaaaagattttaacttacctgaatatgatttgaatgttgaagagcgattagttctaattgagaaaagtgttgactcaacagccacagctgatgacactcacaaattagatcatatcaatatgaatcttaataaacttataactaatgatacatttcaaccagagatcatggaaagatcaaaaacacaggatattgtgcttggaacaagctttttaagcattaattctaaagaggaaactgagcacttggaaaatggaaacaagtatcctaatttggaatccgtaaataaggtaaatggacattctgaggaaacttcccagtctcctaataggactgaaccacatgacagtgattgttctgttgacttaggtatttccaaaagcactgaagatctctcccctcagaaaagtggtccagttggatctgttgtgaaatctcatagcataactaatatggagattggagggctaaaaatctatgatattcttagtgataatggacctcagcagccaagtacaaccgttaaaatcacatctgctgttgatggaaaaaatatagtcaggagcaagtctgccacactgttgtatgatcaaccattgcaggtatttactggttcttcctcatcttctgatttaatatcaggaacaaaggcaattttcaagtttgattcaaatcataatcccgaagagccaaatataataagaggccccacaagtggcccacaatctgcacctcaaatatagtggtcctccacagtataatatccaatacagtagcagtgctgcagtcaaagacactttgtggcactccaaacaaaatccccaaatagaccatgccagttttcctcctcagctccttcctagatcagagagcacagaaaatcaaagttatgctaaacattctgccaatatgaatttctctaatcataacaatgttcgagctaatactgcataccatttacatcagagacttggcccagcaagacatggggaaatgtgggccatctcaccaaacgaccgacttattcctgcagtaactcgaagtacaatccagcgacaaagtagtgtgtcctccacagcctctgtaaatcttggtgatccaggctctacaaggcgggctcagattcctgaaggagattatttatcatacagagagttccactcagcgggaagaactcctccaatgatgccaggatcacagagacccctttctgcacgaacatacagcatagatggtccaaatgcatcaagacctcagagtgctcgaccctctattaatgaaataccagagagaactatgtcagttagtgatttcaattattcacggactagtccttcaaaaagaccaaatgcaagggttggttctgagcattctttattagatcctccaggaaaaagtaaagttcctcgtgactggagagaacaagtacttcgacatattgaagccaaaaagttagaaaaggaagggtatagggtggttgatcccgtgatggctggttaa

SEQ ID NO: 4750 - DNA, 2910 bp, Homo sapiens
  SIMILAR (1356)..(4): 921254mologous to Homo sapiens putative p150,accession number U93569,Smith-Waterman Score=2083.
ctagtaccatgctgttttggttactgtagccttgcagtatagttggaagtcaggtagtgtgatgcctccagctttgttcttttggcttaggattgacttggcggtgtgggctcttttttggttccatatgaactttaaagtagttttttccaattctgtgaagaaagtcattggtagcttgatggggatggcattgaatctataaattaccttgggcagtatggccattttcacgatattgattcttcctacccatgagcatggaatgtgtttccatttctttgtatcctcttttatttcattgagcagtggtttgtagttctccttgaagaggtccttcacatcctttgtaagttggattcctaggtattttattctctttgaagcaattgtgaatgggagttcactcatgatttggctctctgtttgtctgttgttggtgtgtaagaatgcgtgtgatttttgtacattgattttgtatcctgagactttgctgaagttgcttatcagcttaaggagattttgggctgagacaatggagttttctagatatacaatcatgtcatctgcaaacagggacaatatgacttccttttttcctaattgaatatgctttatttctttctcctgcctgattgccctggccagaacttccaacactatgttgaataggagtggtgagagagggcatccctgtcttgtgcccattttcaaagggaatgcttccagtttttgcccattcagtatgatattggctgtgggtttgtcatagatagctcttattattttgagatacatcctatcaatacctaatttattgagagtttttagcatgaagcgttgttgaattttgtcaaaggccttttctgcatctattgagataatcacgtggtttttgtctttggttctgtttatatgctggattacatttattgattggcatatgttgaaccagccttgcatcccagggatgaagcccacttgatcatggtggataagctttttgatgtgctgctggatttggtttgccagtattttattgaggatttttgcatcaatgttcatcaaggatattggtctaaaattatcttttgtggttgtgtctctgccagcctttggtatcaggatgatgctggcctcatcaaatgaattagggtggattccctctttttcttttgattggaatagtttcagaaggaatggtaccagctcctccttgtacctctggtagaattcagctgtgaatccatctggtcctggactttttttggttggtaagctattgattattgccacaatttcagagcctgttattggtctattcaacttcttccggttgttcctttccatgtttagtgcttcctacaggagctcttatagggcagacctggtggtgacaaaaatctctcagcatttgcttgtctgtaaagtattttatttctccttcacttatgaagcttagtttggctggatatgaaattccggcttgaaaattcttttctttaagaatgttgaatattggccccccactctcttctggcttgtagagtttctgctgagagatcagctgttagtccgatgggcttccctttgtgggtaacccaacctttctctctggctgcccttaacattttttccttcattttaactttggtgaatctgacaattatgtgtcttggaattgctcttctcgaggagtatcgttgtggcgttctctgaatttccctgaatttgagtattggcctgccttgctagattggggaagttctcctggataatatcctgcagagtgttttccatcttggttccattctccccgtcactttcatgtaccgcaatcggatgtagatttggtcttttcagatagtcccatatttcttggaggctttgttcgtttctttttattcttttttctctaaacttctcttctcgcttcatttcattcttttcgtcttccatcgctgataccctttcttccagttgatcgaatcagctactgaggcttgtgtattcgtcacgtggttctcgtgccgtggttttcagctccatcaggtcctttaaggactttctctgcattgggttattctagttatccattcgtcttgattttttttcaaagtttttaacttttttgccattggttcgaacttcctcctttagctcggagtagtttgattttctgaagccttcctctctcaactcgtcaaagtcattctccgtccagctttgttccgttgctggtgaggagctgcgttccgtaatctctattattccttcttgtgtgattgagtccattatctgagcaagaaaacaagcctcagggatgaaagctttcagtaagcaaagaagtttaattgtagaaaaggtctgcaaggcagtccaggctgacacaatatgtgatctttcaaactggataaaaagcttctcttcagtgggctcaacaggctctagtgtgtgttgttcccctccctgtgtccatgtgttctcatcgttcagctcccacttgtaagtgagaacatgcagtgtttggttttctgttcctgtgttagtttgctgacgataatgacttccagctccatctatgtctctgcaaaggacacgatcttgttccttcttgtgactgcatagtattccatggtatatatgtaccacattttctttatccagtctgtcactgatgtgcatttggggtgattccatgcctttgctattgtgaatagtgatcagtttttccttataaaatgtggcacaaagtaatcgaacaatcaggctcctgtctttgctttggttcgcaatgaaatcagtgatcatcagggcctgtttgccatgtgatacgctggctcccccttcaccttccaccatgactggaagcttcctgaggccctcatcagaagcagatgctggtaccat

SEQ ID NO: 4751 - DNA, 1701 bp, Homo sapiens
  SIMILAR (6)..(674): 621254mologous to Homo sapiens putative protein B2,accession number U80082,Smith-Waterman Score=666.
  misc_feature (1)...(1701): n = a,t,c or g
ggaggcggtatgatgagctgcagaattcttctgggcgtgatgggaagcccagggccatggccgtcacccggagcacatcttccacttcctcaggctccaactccaacgtccttgttccagtgagctggaaaaggccccagtattctcagaagagaacnaaagagaagttggtacatgtcctttctctgtgtggccaagaagtaggattgagcaaaaatccatcagtgattttttcatcgtgtggggatctggatctgcttgagcaccagacaagcttggtatcttctgaggacggtgcccgagagcaggagaacatggatgacacaaacagcgagcagcagtttagagtcttcagagacttcgacttcctagatgtggagctggaggatggagaggaacttcagggtgagagtatggacaatttcaactggggagtgcgcagacgttctctggacagcctggataagtgtgatatgcagattctggaggagcgccaactgtcaggaagcactcctagcctgaataaaatgcaccatgaggacttcgatgaatcatccgaggaggaggacctcacagccagccagatcctggagcactcagacctaatcatgactctctccccctctgaagagacgaatcccatggagctgctcaccacagcctgtgactcgacccctncagaacctcattcctttaacaccagaatgtccagctttgatgcttccttgcctgatatgaataatctgcagatttctgagggttcaaaggcctgaagctgttcgtgaggaggaggacaccaccgtgcatgaggatgatctttctagttccatcaatgaactcccagcagcttttgaatgcagcgacagctttagcctggacatgactgagggggaagaaaaaggcaatcgggcactggaccagtttaccctggcgagctttggagaaggtgacaggggagtctctccccctccctcgcccttcttctcagccatccttgccgcctttcagcccgcagcctgtgacgatgccgaggaggcctggcgcagccacatcaaccagcttatgtgtgactcagatggctcctgtgctgtgtatacatttcatgtgttctcctccttgtttaagaatattcagaaaaggttctgcttcctaacctgtgatgcagccagttaccttggagataacctccggggaatcggatccaaatttgtcagctcttcccagatgctcacctcctgctctgctggacaagctcaagttcagtgtgttagaactgcaagaatatttggatacctacaacaacaggaaagaggccacactctcttggcttgcaaattgtaaggcaacatttgcagggggatcaagagatggagtaattacctgtcaaccaggggactccgaagaaaaggtaataaaagcctgttagaatgggtctcttgtgtgctctaacattgtgtattagttttggtctacccaagaagcctggaacttgagaaaagaagaggcggaatgagtcaccccaaacatttacatgaaaccaacagagtaagacagaatgccttccagcatgactgtgtgttgatgggatttgtggggaggtttcttcgttttggaaaagtagaggtataaaataaccttttttgctggatactgtctaactatactaataatttcctaataaatttattcttaattcagaaa

SEQ ID NO: 4752 - DNA, 614 bp, Homo sapiens
  SIMILAR (275)..(415): 951254mologous to Homo sapiens Fragment of human secreted protein encoded by gene 113,accession number Y03013,Smith-Waterman Score=232.
tctgtatttaagattccaaatcaggcttccattctggagcaccagttgagagaagttgcatgcagacagcccctcgcaagctcttcagggcactatgctggtcggtccttccagatattccgggccctcaagcaacctctttgcaccaaaaatggtccagatagactctttttaaggatcttggctgctttttactagaaggttgcttttatgagcatatttatactgctgaaggatgagtgttaattttaattaactttgccgttttgtagagaaaactattcacaagataaattccaagtcttttcacctgtcaggcatgcatattttaatatctgtttggatagtcagaagtagaatcataaaggtaaaatatgagttgttactttgtttcttcgatgtcatattttatgtgtaatatatatgtaaagggccattcttaagttctctccttaaacttaatgctgtcaagtgttagatgtgtgcatgtgaacttgttgcactgcagaaacatattcagagtttatctatgtaacttattcactctgtaaatacatttaaagtttttgtgatgtaagcttaattgatattctgttcagaactttctttagact

SEQ ID NO: 4753 - DNA, 2568 bp, Homo sapiens
  SIMILAR (1)..(2568): 1001254mologous to Homo sapiens putative product from mRNA sequence CG003 from BRCA2 region; match to U50534 (NID:g1685103),accession number AC002483,Smith-Waterman Score=4397.
gatccaatttctccctacacgggctggttgctgactattacagagaccaagcagccgcagcccttaccgatgccttgtactggaggatgctgggcccccctggttgactatctcccggagaccatcactccccgggggccactccacaggtgcaatattgctgtaatttttatgactgaaatggtggtggatcacagtgtacgagaagactgggcgcttcatctaccattattacttcatgctgtcttcttaggtttagaccactaccggcctgaagtctttgaacacagcaaaaaactgcttcttcacctcttgattgccctctcttgcaacagcaatttccattccattgcttccgtgctcctgcagacccgagagatgggtgaagctaagactctaaccgtgcagccagcctaccaacctgaatatctctatacaggtggctttgacttcctgagagaggaccagtcatccccggtgcctgactcagggcttagttcaagctccacctcctctagcatcagtctgggaggcagcagtggaaacctcccacagatgacccaggaggtagaagatgtggacacagctgctgaaacagatgagaaggcaaacaagctcattgagtttctcacgaccagggcatttggtccactttggtgccatgaagacatcacacctaaaaatcaaaattcaaagagtgctgaacagctcactaattttctacgtcacgttgtatctgtatttaaagattccaaatcaggcttccatctggagcaccagttgagtgaagttgcattgcagacagccctcgcaagctcttcaaggcactatgctggtcggtccttccagatattccgggccctcaagcaacctctgtcagcacatgccttatctgaccttctctcaagattggtggaggtgataggagaacatggagatgagattcagggttatgtaatggaagcgctcctaaccttggaggcggctgtggataacttgtctgactgcttgaagaacagtgacctcctaactgtattgtcccggtcttcctcaccagatttaagctccagcagtaaactaacagcaagcagaaagagcacaggacaactaaacatgaacccgggaaccaccagcggcaacaccgcaactgccgaacggagccggcatcaacgaagcttctctgtgcccaagaagtttggtgtcatcgaccgatcctctgacccacctcgaagtgccacactggacagaattcaggcttgtacccaacaaggcctctcctcaaaaaccagaagctcatcctccttgaaggacagtctcacggacccatcccacataaaccatcccaccaacctgctggccaccatattctgggtcacagtggccttgatggagtctgattttgagtttgaatacttaatggccttaaggctgttgagcagactactggcacatatgccactcgataaggctgagaaccgagaaaagcttgagaaactccaggcacagctgaagtgggccgacttctccgggctgcagcagctgctgctgaaaggattcacatccctcaccaccacagacctgaccctgcagctcttcagtctgctgacaccagtgtccaaaatatccatggtggatgcatcccacgctattggttttccactgaatgtcttgtgtctcctgcctcagctgattcagcattttgaaaatcccaatcagttctgtaaggatatagccgaaaggattgctcaggtttgtttagaagagaagaaccccaaactttcaaatcttgcacatgtcatgactctttataaaacgcacagctacacgagggactgtgccacgtgggtcaatgtggtctgtcgataccttcatgaagcatatgctgacattaccttgaatatggttacctacctggcagagctgctggagaagggcctccctagtgtgcagcagcccctgctccaggtgatctacagtcttctcagctacatggacctttctgtcgttcctgtcaaacagttcaatgtggaagttctgaagacaattgaaaaatatgtgcaacacagtgacctctcaaaaatagaaatacatcgagtgtggactagtgcttccaaggaattacctgggaaaaccctggacttccacttcgatatttcggagactccaatcatcgggaggcggtatgatgagctgcagaattcttctgggcgtgatgggaagcccagggccatggccgtcacccggagcacatcttccacttcctcaggctccaactccaacgtccttgttccagtgagctggaaaaggccccagtattctcagaagagaacaaaagagaagttggtacatgtcctttctctgtgtggccaagaagtaggattgagcaaaaatccatcagtgattttttcatcgtgtggggatctggatctgcttgagcaccagacaagcttggtatcttctgaggacggtgcccgagagcaggagaacatggatgacacaaacagcgagcagcagtttagagtcttcagagacttcgacttcctagatgtggagctggaggatggagag

SEQ ID NO: 4754 - DNA, 10700 bp, Homo sapiens
  SIMILAR (2282)..(7432): 961254mologous to Homo sapiens putative product from mRNA sequence CG003 from BRCA2 region; match to U50534 (NID:g1685103),accession number AC002483,Smith-Waterman Score=8441.
agggggcggcgctcccggcccatcccttagccccgcggcggccgtgtgggccggaggctgcctgcaccgcgtcagggaggccggcctagaaaccctccctcccagaagaaagccgatcccagttcaggtggggtcttcctcggttgcgtacctggctggagccgagctggtgggcggccggcagccggcgtttctggtgatgacagccccgaaatgaaagcagcgcggccgccgcctccgagggctgcagggagatcagcgtccagcaaataagaagcaagtcctggacccggaggaggaggagcggccgagcatctctctctgctccgccgtgtcctttagatgagcactcccggccggagccggaggtggatccgcagagctgcctctgggcgcctgaccccgcgctgacatcacaacctgtgacaggcgcatcacgcccggtacctgctcccggccgctgcccgtcctcccagcctctttgtatgccgcagacatggccagccagcaggattcgggcttctttgagatcagtatcaaatatttactgaaatcctggagtaatacttctcccgttggcaacggttacatcaagcctccggttccacctgcttctggcacgcacagggagaaagggccgccaaccatgctacccatcaatgtggacccagacagtaaaccaggagaatatgtcctcaaaagtttatttgtcaacttcaccactcaggctgaacgcaagattcgtatcattatggcagagcccctggaaaagccattgacgaaatctctgcaacgtggagaagacccccaatttgatcaggtcatcagctcaatgagctccctttctgagtactgcctgccttccattctacgtacattatttgactggtataaaaggcaaaatggcattgaggatgaatcacatgaatacagaccaagaacaagcaataaatcaaaaagcgatgaacaacagcgagattatttaatggaaagacgggacctcgccattgattttattttttctttagtattaatagaagttttgaaacagattccacttcatcctgtaatagacagtttaatacatgatgttattaacttggctttcaagcactttaaatacaaagaagggtaccttggtcccaacactggcaatatgcatattgtggcagacctgtatgcagaagtcattggagtgttggcacaagccaaattccctgctgtaaagaagaaatttatggcggagctaaaagaattacggcacaaagagcagaacccatatgtggttcaaagcattatcagcttaataatgggcatgaaattctttcgaattaagatgtatccagtggaggattttgaggcctctcttcagtttatgcaggaatgtgcacattacttcctcgaggtcaaagacaaagatatcaagcatgccttggctgggctttttgttgaaatacttgttccagttgctgctgctgttaaaaatgaagtaaatgttccctgccttagaaattttgtggaaagcctgtatgacaccacgctggaactttcttctcgaaagaagcattccttggccttgtaccccctggtgacctgtttgctctgtgtcagtcagaagcagctgttcctgaacaggtggcacattttcctcaacaactgcttgtccaaccttaaaaacaaagatcccaagatggctcgagttgcactggaatctctctacagattactttgggtttacatgattcgaattaaatgtgaaagcaacacagctactcagagccgacttataaccatcatcacaacacttttccccaaagggtcccgcggtgtggtaccaagggacatgcctctgaacatctttgtgaaaatcatccagttcattgcccaggaacgtttagattttgcaatgaaagaaatcattttcgattttctttgtgtgggaaaaccagcaaaagcattcagtctcaacccagagagaatgaacattggtttacgggcattcttggtcatagctgatagcttgcagcagaaagatggggaacctcccatgccggttacaggagccgttcttccttcaggaaacacgttaagagtaaagaaaacatatttgagtaaaacactaactgaagaggaagccaaaatgataggcatgtccttatattactctcaagtacgaaaagctgtagacaacattttaaggcaccttgataaagaagtaggaaggtgtatgatgctgactaatgtacagatgttaaacaaagaaccggaagacatgatcacgggtgagagaaagccaaaaatagatcttttcaggacctgtgttgctgctattcctcgactgcttcctgatgggatgtcaaaacttgaacttattgacttactggctaggctctctattcatatggatgatgaattgcgacatattgcacaaaattctcttcagggtttacttgttgacttctcagattggagggaagatgtactatttggctttaccaacttcctgctccgggaagtaaatgatatgcatcacacactccttgattcgtccctgaagttgctgctgcagctgctcacccagtggaaactagtcatccagacacaaggaaaagtctatgaacaagccaacaaaatcagaaattcagagctcatcgcaaatggctccagtcacagaattcagtcggaacgaggtccccactgcagtgtactccacgctgtagaaggttttgctctggttttactctgcagtttccaggtggccacacgcaaactgtccgttttaatactcaaggaaattcgagcgttgtttattgccctggggcagcctgaggatgacgacaggccgatgattgatgtcatggatcagctaagttcttccattctagaaagttttattcatgtagcagtttcggattcagcaacattaccactcacccacaatgtggatctgcagtggttggtggaatggaacgcagtcctggtcaatagccattatgatgtgaaaagcccttcccatgtctggatatttgcacagtctgtcaaagacccctgggtcctctgcctcttcagcttcctccggcaggagaacttacccaagcactgccccacagccctcagctatgcctggccttatgccttcactcggctccagtcggtgatgcctctggtggacccaaatagcccaattaatgccaagaaaaccagcactgccggcagcggagacaactatgttactttgtggagaaattacctaattctttgttttggagttgcaaaacccagtattatgagcccaggacacttaagagcttccactccagaaataatggcgaccacacctgatggtacagtgagctacgataacaaggccataggcaccccatcggtgggagttctgttaaagcagttggtgcctttgatgagactagagagcattgagatcacagagtccttagttttaggatttggaagaacaaattcccttgttttcagagaattggtagaagaacttcatccattaatgaaagaagctctggaaagaagaccagagaacaagaaacgccgagaacggcgagacttgttaaggctacaactacttcgaatttttgaacttttggctgatgctggtgtaataagtgacagcacaaatggagccctagagcgggatactttagccctgggagctttgttcttagaatatgtggacttgacccgcatgctcctagaagctgaaaatgacaaagaagttgaaattcttaaagatatccgggcacattttagtgcaatggtggccaacttgattcagtgtgttccagttcaccaccgaagatttctcttcccccagcaaagtctgaggcaccaccttttcatcttattcagccagtgggcaggacccttcagcattatgttcactcctctggatcgttacagtgacagaaatcatcagattacaagatatcagtattgtgcattaaaagcaatgtcagcagtactgtgctgtggccctgtctttgacaatgtgggcctttccccagatggctacctatataaatggcttgacaacattctggcttgtcaagatttacgagttcatcaacttggctgcgaagttgttgtcttgctactggaacttaatcctgaccaaataaatctttttaactgggcaattgaccgatgctacacaggttcctaccaacttgcatctggctgcttcaaagccatagcaactgtgtgtggaagcaggaactatcccttcgacatagtgacattgttaaaccttgttctattcaaggcctctgacaccaacagagagatttatgaaatctccatgcagctcatgcagatccttgaagcaaagctttttgtatactcaaagaaagtcgctgagcaaagaccgggaagtattctctatggaacacacggcccgctgccacccctctacagcgtgtcactcgccctcttgtcatgtgagctggccaggatgtaccctgagctcacactccccctcttctcagaggtaaaccagcgattcgccacaacacaccccaacgggcgccagatcatgcttacctacctgctgccctggctgcacaacatcgagctggtggacagcagactcctcctcccggggtcgagccccagcagcccagaggacgaagtcaaggaccgggaaggtgacgtgactgcttctcacgggctgagaggaaatggctggggctctccagaagccacgtcactggtcctgaacaacctcatgtacatgacggccaagtatggagatgaagttcctgggacagaaatggaaaatgcttggaatgctttagccaacaatgagaaatggagcaacaacctgaggatcaccttgcagttcctgattagcctctgtggggtcagcagcgacacagttctcctaccctatattaaaaaagtggcaatatacttgtgccgtaacaacaccattcaaaccatggaagagcttctctttgagctgcagcagacagagcccgtgaaccccatcgtccagcattgtgacaacccgcccttctaccgcttcacggccagtagcaaggcttccgcagcagcctcaggaaccacctctagcagcaatacagtggttgctggccaggaaaatttcccagatgctgaggagaacaagatattgaaagaatctgatgaaaggtttagtaatgtcatcagagcccacactcgcctcgagtcaagatacagcaatagctctggaggatcctacgatgaagataaaaatgatccaatttctccctacacgggctggttgctgactattacagagaccaagcagccgcagcccttaccgatgccttgtactggaggatgctgggcccccctggttgactatctcccggagaccatcactccccgggggccactccacaggtgcaatattgctgtaatttttatgactgaaatggtggtggatcacagtgtacgagaagactgggcgcttcatctaccattattacttcatgctgtcttcttaggtttagaccactaccggcctgaagtctttgaacacagcaaaaaactgcttcttcacctcttgattgccctctcttgcaacagcaatttccattccattgcttccgtgctcctgcagacccgagagatgggtgaagctaagactctaaccgtgcagccagcctaccaacctgaatatctctatacaggtggctttgacttcctgagagaggaccagtcatccccggtgcctgactcagggcttagttcaagctccacctcctctagcatcagtctgggaggcagcagtggaaacctcccacagatgacccaggaggtagaagatgtggacacagctgctgaaacagatgagaaggcaaacaagctcattgagtttctcacgaccagggcatttggtccactttggtgccatgaagacatcacacctaaaaatcaaaattcaaagagtgctgaacagctcactaattttctacgtcacgttgtatctgtatttaaagattccaaatcaggcttccatctggagcaccagttgagtgaagttgcattgcagacagccctcgcaagctcttcaaggcactatgctggtcggtccttccagatattccgggccctcaagcaacctctgtcagcacatgccttatctgaccttctctcaagattggtggaggtgataggagaacatggagatgagattcagggttatgtaatggaagcgctcctaaccttggaggcggctgtggataacttgtctgactgcttgaagaacagtgacctcctaactgtattgtcccgctcttcctcaccagatttaagctccagcagtaaactaacagcaagcagaaagagcacaggacaactaaacatgaacccgggaaccaccagcggcaacaccgcaactgccgaacggagccggcatcaacgaagcttctctgtgcccaagaagtttggtgtcatcgaccgatcctctgacccacctcgaagtgccacactggacagaattcaggcttgtacccaacaaggcctctcctcaaaaaccagaagctcatcctccttgaaggacagtctcacggacccatcccacataaaccatcccaccaacctgctggccaccatattctgggtcacagtggccttgatggagtctgattttgagtttgaatacttaatggccttaaggctgttgagcagactactggcacatatgccactcgataaggctgagaaccgagaaaagcttgagaaactccaggcacagctgaagtgggccgacttctccgggctgcagcagctgctgctgaaaggattcacatccctcaccaccacagacctgaccctgcagctcttcagtctgctgacaccagtgtccaaaatatccatggtggatgcatcccacgctattgggtttccactgaatgtcttgtgtctcctgcctcagctgattcagcattttgaaaatcccaatcagttctgtaaggatatagccgaaaggattgctcaggtttgtttagaagagaagaaccccaaactttcaaatcttgcacatgtcatgactctttataaaacgcacagctacacgagggactgtgccacgtgggtcaatgtggtctgtcgataccttcatgaagcatatgctgacattaccttgaatatggttacctacctggcagagctgctggagaagggcctccctagtgtgcagcagcccctgctccaggtgatctacagtcttctcagctacatggacctttctgtcgttcctgtcaaccagttcaatgtggaagttctgaagacaattgaaaaatatgtgcaaagtgttcactggagagaagctctgaatatcttgaagctggtagtttctcggtcagccagccttgttttaccttcataccagcacagtgacctctcaaaaatagaaatacatcgagtgtggactagtgcttccaaggaattacctgggaaaaccctggacttccacttcgatatttcggagactccaatcatcgggaggcggtatgatgagctgcagaattcttctgggcgtgatgggaagcccagggccatggccgtcacccggagcacatcttccacttcctcaggctccaactccaacgtccttgttccagtgagctggaaaaggccccagtattctcagaagagaacaaaagagaagttggtacatgtcctttctctgtgtggccaagaagtaggattgaccaaaaatccatcagtgattttttcatcgtgtggggatctggatctgcttgagcaccagacaagcttggtatcttctgaggacggtgcccgagagcaggagaacatggatgacacaaacagcgagcagcagtttagagtcttcagagacttcgacttcctagatgtggagctggaggatggagaggaacttcagggtgagagtatggacaatttcaactggggagtgcgcagacgttctctggacagcctggataagtgtgatatgcagattctggaggagcgccaactgtcaggaagcactcctagcctgaataaaatgcaccatgaggactccgatgaatcatccgaggaggaggacctcacagccagccagatcctggagcactcagacctaatcatgactctctccccctctgaagagacgaatcccatggagctgctcaccacagcctgtgactcgacccctgcagaacctcattcctttaacaccagaatgtccagctttgatgcttccttgcctgatatgaataatctgcagatttctgagggttcaaaggctgaagctgttcgtgaggaggaggacaccaccgtgcatgaggatgatctttctagttccatcaatgaactcccagcagcttttgaatgcagcgacagctttagcctggacatgactgagggggaagaaaaaggcaatcgggcactggaccagtttaccctggcgagctttggagaaggtgacaggggagtctctccccctccctcgcccttcttctcagccatccttgccgcctttcagcccgcagcctgtgacgatgccgaggaggcctggcgcagccacatcaaccagcttatgtgtgactcagatggctcctgtgctgtgtatacatttcatgtgttctcctccttgtttaagaatattcagaaaaggttctgcttcctaacctgtgatgcagccagttaccttggagataacctccggggaatcggatccaaatttgtcagctcttcccagatgctcacctcctgctctgaatgtcctacactttttgtggatgccgagactctcctttcatgtggacttctggacaagctcaagttcagtgtgttagaactgcaagaatatttggatacctacaacaacaggaaagaggccacactctcttggcttgcaaattgtaaggcaacatttgcagggggatcaagagatggagtaattacctgtcaaccaggggactccgaagaaaagcaattggaactgtgtcagagattatataagctacacttccagctgctattgctttttcagtcctactgtaagctcatcggccaggtgcacgaagttagctccatgccagagctgctgaatatgtccagggaactgagtgacctaaagaaacacctgaaggaagccagtgcagtcattgcagctgaccctctctattcagacggcgcgtggtccgagcccaccttcacgtccactgaagcagccatccagtccatgctggagtgcctgaagaacaacgaactcggcaaagctttgcggcagatcagggagtgcagaagtctgtggcccaatgacatctttggaagcagttctgatgatgaggtccagacactactgaatatttatttccgtcaccaaactctgggacagacgggtacttatgccctggtggggtctaaccagagcctgaccgagatctgcaccaagctgatggagctgaacatggagatccgggacatgatccgcagggcccagagttaccgagtcctcactacttttcttccagactccagtgtttctggcactagtctctgacaggagcctcctgtccccactgggttccaaactggcagtgctgccatgctggggcaacgtcattcagtgtcttctcggccttcaaaaggcttggacagactgttctccctcttgttacctgtagggctttttctaaagaggatggcagaacttccaacgtgtagcaatactataagaaccaaggtagcttagaacgtcctggacagactccactcatcatgctgtgtggcacaaatgtgttacatttgaccgagcatatgcaactcgctactgaagaagtgacttccgttgcataccaaagccgactacactgaacagtaccttcctttctagaaacaattttagattggcaaaagtgcaatgttttcttcactcaaaaaattttatattctcaaacatgtatattctttccctgtcttgttccattttcttttcttttttcttttttctttttcctttctttcgtgggctgagaaaggggcaggcaaaatgaagctggccactgaaaactgtaagatggtcaaaagctgacagcctgtgtatgtgaaaagggaattgtaaatggactgcaatgtaatgtacactgtaatttgaatacaattactgtatctaaaaggagctgctatgaagtacctttcttatgttgctaggctactgtttctgaaagccctggatctctttgcaccaaaaatggtccagatagactctttttaaggatcttggctgctttttactagaaggttgcttttatgagcatatttatactgctgaaggatgagtgttaattttaattaactttgccgttttgtagagaaaactattcacaagataaattccaagtcttttcacctgtcaggcatgcatattttaatatctgtttggatagtcagaagtagaatcataaaggtaaaatatgagttgttactttgtttcttcgatgtcatattttatgtgtaatatatatgtaaagggccattcttaagttctctccttaaacttaatgctgtcaagtgttagatgtgtgcatgtgaacttgttgcactgcagaaacatattcagagtttatctatgtaacttattcactctgtaaatacatttaaagtttttgtgatgtaagcttaattgatattctgttcagaactttctttagact

SEQ ID NO: 4755 - DNA, 6107 bp, Homo sapiens
  SIMILAR (2456)..(5407): 941254mologous to Homo sapiens putative product from mRNA sequence CG003 from BRCA2 region; match to U50534 (NID:g1685103),accession number AC002483,Smith-Waterman Score=4735.
gggtgagagaaagccaaaaatagatcttttcaggacctgtgttgctgctattcctcgactgcttcctgatgggatgtcaaaacttgaacttattgacttactggctaggctctctattcatatggatgatgaattgcgacatattgcacaaaattctcttcagggtttacttgttgacttctcagattggagggaagatgtactatttggctttaccaacttcctgctccgggaagtaaatgatatgcatcacacactccttgattcgtccctgaagttgctgctgcagctgctcacccagtggaaactagtcatccagacacaaggaaaagtctatgaacaagccaacaaaatcagaaattcagaggccagggacttagagctggatgtgggtgtggatgtggatgtaggtgtggatgtagatgcagatgtagatgtggatgtggatttgggtgtggatgtggatgtaggtgtggatgtagatgcagatgtagatgtggatgtggatatgggtgtggatgtggatgtagataggatatatggatttggatgtaaatgtggatgtgatagggatgtggatagggttgtggatgtagatgtggatattgatgtggatgtagatgtggatatggatgtgaatattgatgtggatgtgggtttaggtgcaggtgtggatgtagatatggatgtacatattgatatggatatggatgtggatataggtagtgataacattttgcagagcgcattgaggaggagtgttgtcagaggagaaccagggtggtgggaacttggcattggcaatgagcagatggagaaaggggtctggctggagaagagtgtaactgagagtctaaagactgtggaggctcatggcagtatactcatcgcaaatggctccagtcacagaattcagtcggaacgaggtccccactgcagtgtactccacgctgtagaaggttttgctctggttttactctgcagtttccaggtggccacacgcaaactgtccgttttaatactcaaggaaattcgagcgttgtttattgccctggggcagcctgaggatgacgacaggccgatgattgatgtcatggatcagctaagttcttccattctagaaagttttattcatgtagcagtttcggattcagcaacattaccactcacccacaatgtggatctgcagtggttggtggaatggaacgcagtcctggtcaatagccattatgatgtgaaaagcccttcccatgtctggatatttgcacagtctgtcaaagacccctgggtcctctgcctcttcagcttcctccggcaggagaacttacccaagcactgccccacagccctcagctatgcctggccttatgccttcactcggctccagtcggtgatgcctctggtggacccaaaagaattggtagaagaacttcatccattaatgaaagaagctctggaaagaagaccagagaacaagaaacgccgagaacggcgagacttgttaaggctacaactacttcgaatttttgaacttttggctgatgctggtgtaataagtgacagcacaaatggagccctagagcgggatactttagccctgggagctttgttcttagaatatgtggacttgacccgcatgctcctagaagctgaaaatgacaaagaagttgaaattcttaaagatatccgggcacattttagtgcaatggtggccaacttgattcagtgtgttccaggtacggtgatccgttacaagaaattaccattcatgcttggaagcccattcgtgttctttattacggtgctttcgtctttaaccctactggcctttatgcaggcaatgtcagcagtactgtgctgtggccctgtctttgacaatgtgggcctttccccagatggctacctatataaatggcttgacaacattctggcttgtcaagatttacgagttcatcaacttggctgcgaagttgttgtcttgctactggaacttaatcctgaccaaataaatctttttaactgggcaattgaccgatgctacacaggttcctaccaacttgcatctggctgcttcaaagccatagcaactgtgtgtggaagcagtgttgttgcttatgaatttaatagctcattcttcaacaacaaaataaatgctctgattacaaggtcaagtgcatggccctgcctaatccttgaagcaaagctttttgtatactcaaagaaagtcgctgagcaaagaccgggaagtattctctatggaacacacggcccgctgccacccctctacagcgtgtcactcgccctcttgtcatgtgagctggccaggatgtaccctgagctcacactccccctcttctcagtgctatacactttcctgcacagcgcaccagatgtggagcaacaagcttgcagacaagccttggttttatcattctgtggccttggggagctcctaggtaagccagcgattccccacaacacaccccaacgggcgccagatcatgcttacctacctgctgccctggctgcacaacatcgagctggtggacagcaggctcctcctcccgggtcgagccccagcagcccagaggacgaagtcaaggaccgggaaggtgacgtgactgcttctcacgggctgagaggaaatggctggggctctccagaagccacgtcactggtcctgaacaacctcatgtacatgacggccaagtatggagatgaagttcctgggccagaaatggaaaatgcttggaatgctttagccaacaatgagaaatggagcaacaacctgaggatcaccttgcagttcctgattagcctctgtggggtcagcagcgacacagttctcctaccctatattaaaaaagtggcaatatacttgtgccgtaacaacaccattcaaaccatggaagagcttctctttgagctgcagcagacagaacccgtgaaccccatcgtccagcattgtgacaacccgcccttctaccgcttcacggccagtagcaaggcttccgcagcagcctcaggaaccacctctagcagcaatacagtggttgctggccaggaaaatttcccagatgctgaggagaacaagatattgaaagaatctgatgaaaggtttagtaatgtcatcagagcccacactcgcctcgagtcaagatacagcaatagctctggaggatcctacgatgaagataaaaatgatccaatttctccctacacgggctggttgctgactattacagagaccaagcagccgcagcccttaccgatgccttgtactggaggatgctgggcccccctggttgactatctcccggagaccatcactccccgggggccactccacagaagttgcattaatttcattatttcattgattaggtgcaatattgctgtaatttttatgactgaaatggtggtggatcacagtgtacgagaagactgggcgcttcatctaccattattacttcatgctgtcttcttaggtttagaccactaccggcctgaagtctttgaacacagcaaaaaactgcttcttcacctcttgattgccctctcttgcaacagcaatttccattccattgcttccgtgctcctgcagacccgagagatgggtgaagctaagactctaaccgtgcagccagcctaccaacctgaatatctctatacaggtggctttgacttcctgagagaggaccagtcatccccggtgcctgactcagggcttagttcaagctccacctcctctagcatcagtctgggaggcagcagtggaaacctcccacagatgacccaggaggtagaagatgtggacacagctgctgaaacagatgagaaggcaaacaagctcattgagtttctcacgaccagggcatttggtccactttggtgccatgaagacatcacacctaaaaatcaaaattcaaagagtgctgaacagctcactaattttctacgtcacgttgtatctgtatttaaagattccaaatcaggcttccatctggagcaccagttgagtgaagttgcattgcagacagccctcgcaagctcttcaaggcactatgctggtcggtccttccagatattccgggccctcaagcaacctctgtcagcacatgccttatctgaccttctctcaagattggtggaggtgataggagaacatggagatgagattcagggttatgtaatggaagcgctcctaaccttggaggcggctgtggataacttgtctgactgcttgaagaacagtgacctcctaactgtattgtcccgctcttcctcaccagatttaagctccagcagtaaactaacagcaagcagaaagagcacaggacaactaaacatgaacccgggaaccaccagcggcaacaccgcaactgccgaacggagccggcatcaacgaagcttctctgtgcccaagaagtttggtgtcatcgaccgatcctctgacccacctcgaagtgccacactggacagaattcaggcttgtacccaacaaggcctctcctcaaaaaccagaagctcatcctccttgaaggacagtctcacggacccatcccacataaaccatcccaccaacctgctggccaccatattctgggtcacagtggccttgatggagtctgattttgagtttgaatacttaatggccttaaggctgttgagcagactactggcacatatgccactcgataaggctgagaaccgagaaaagcttgagaaactccaggcacagctgaagtgggccgacttctccgggctgcagcagctgctgctgaaaggattcacatccctcaccaccacagacctgaccctgcagctcttcagtctgctgacaccagtgtccaaaatatccatggtggatgcatcccacgctattggtaaagccagcctcgttcaccctgtctcaattctgatgctgattcagcattttgaaaatcccaatcagttctgtaaggatatagccgaaaggattgctcaggtttgtttagaagagaagaaccccaaactttcaaatcttgcacatgtcatgactctttataaaacgcacagctacacgagggactgtgccacgtgggtcaatgtggtctgtcgataccttcatgaagcatatgctgacattaccttgaatatggttacctacctggcagagctgctggagaagggcctccctagtgtgcagcagcccctgctccaggtgatctacagtcttctcagctacatggacctttctgtcgttcctgtcaaacagttcaatgtggaagttctgaagacaattgaaaaatatgtgcaaagtgttcactggagagaagctctgaatatcttgaagctggtagtttctcggtcagccagccttgttttaccttcataccagcacagtgacctctcaaaaatagaaatacatcgagtgtggactagtgcttccaaggaattacctgggaaaaccctggacttccacttcgatatttcggagactccaatcatcgggaggcggtatgatgagctgcagaattcttctgggcgtgatggttaagttcagggccatggccgtcacccggagcacatcttccacttcctcaggctccaactccaacgtccttgttccagtgagctggaaaaggccccagtattctcagaagagaacaaaagagaaggtggcacatgtcctttctctgtgtggccaagaagtaggattgagcaaaaatccatcagtgattttttcatcgtgtggggatctggatctgcttgagcaccagacaagcttggtatcttctgaggacggtgcccgagagcaggagaacatggatgacacaaacagcgagcagcagtttagagtcttcagagactttgacttcctagatgcggagctggaggatggagagaactggaaacaaaatgcaatgcacacaagagagctctttgctctgcttagctcggtggctggtgttctagacactggagcagccaaattcaagtctcagtgggcaaatgcagattcatttattttggatgataatcatggagagaatcatgtcctcggaataaagaaggtgttcttcaccaattctttccctggaaaacaagttgagcagatccggtcc

SEQ ID NO: 4756 - DNA, 867 bp, Homo sapiens
  SIMILAR (212)..(562): 341254mologous to Homo sapiens prepro-alpha-2 chain,accession number Y00724,Smith-Waterman Score=103.
agatgcttcctggtcacttgttctgcttggccaaagcaggcaaagaggagcaggaggagaaaggtcagatcatcaccagaaaaacaataacccctcagaacattccaggacctggtgctcacatcacagccactcacagaggccgatgcaccgttgccaccaagttttctgggggtctgtgcaaagaacctaaccgcctgacctggtatgtccgcccctgaaaggagcgcacggaggccgtgtcccagcagccgcgtcccttcatttcccgcggcggggcagcctccaatcggcggggcgctacatggcgccgggtcccgggggcttgcacggacgcgtgcacagctcggtgggccgcccggcggagagctaaggggcacgcgggaaatggggatggccaggggcctgacggtgattccaggaaatcggggtcacctctgagaccctctcatcttctgaccccgctgccgtggctggtgcacctgtgtctggccacctgcagacacctggccaccatgcaggaagaaggcaacaggcagggccccggggagctgggctcccttagttctgctgccacaggcctgcaggcatctggtcacaaggtatttgcccaggcctttgaacacaactccactgtccagctgcccacaggcataaccagtaagttagcaaagtttcagcacatcatgatggctgtacccgtagaatacagccaggatcccttgactctcaccacctgcatgttgtttctggggcctgctacgccctcgtcttgcctgtggactcttacacaatctccctgcaagtctctctgctcccactctggtccccacagtctctgcacaatataacagctgagagatcctg

SEQ ID NO: 4757 - DNA, 420 bp, Homo sapiens
  SIMILAR (199)..(312): 971254mologous to Homo sapiens Human secreted protein sequence encoded by gene 34 SEQ ID NO:95,accession number B24470,Smith-Waterman Score=197.
atggggaagggagtctgggagactggctccaacccaatcatcacacgacagtccaccacccttgtgttggagcatactaacttgcttaaacaacctgattggctttcaacccatgccttcagccactgccctgagaacatgtccaagcttgttgtagacacatgtggctcagttgtcctggccacctcagccaccagccagcaagctccctactcccgcaacaaggctctggccaacagtgttcgtgcagctgaagtatggatggatgaatttaaagagctctactaccatcgcaacccccgtgcccgcttgggcctggcatgcgacgaatgctccatcaaagctggctggtggttagtgtctgaacgtgtgaaggaggaaatcatggaagctgcagaagaagcagtgttgcaacgataa

SEQ ID NO: 4758 - DNA, 1069 bp, Homo sapiens
  SIMILAR (421)..(666): 691254mologous to Mus musculus polypeptide GalNAc transferase -T4,accession number U73819,Smith-Waterman Score=333.
atgccgcggccgccggtgccggcgaacgcgctgggcgcgcggggcgaggcggtgcggctgcagctgcagggcgaggagctgcggctgcaggagagagagcgtgcgactgcaccagattaacatctacctcagcgaccgcatctcactgcaccgccgcctgcccgtgcgctggaacccgctgtgcaaagagaagaaatatgattatgataatttgcccaggacatctggtaaccaaagcattttataatgaagcctggtcaactctccttcggacagtttacagtgtccttgagacatccccggatatcctgctagaagaagtgatccttgtagatgactacagtgatagagagcacctgaaggagcgcttggccaatgagctttcgggactgcccaaggtgcgcctgatccgcgccaacaagagagagggccctggtgcgagcccggctgctgggggcgtctgcggcgaggggcgatgttctgaccttcctggactgtcactgtgagtgccacgaagggtggctggagccgctgctgcagaggatccatgaagaggagtcggcagtggtgtgcccggtgactgatgtgatcgactggaacaccttcgaatacctggggaactccggggagccccagatcggcggtttcgactggaggctggtgttcacgctggcacacagttcctgagagggagaggatacggatgcaatcccccgtcgatgtcatcaggtctccaacaatggctggtgggctgtttgctgtgagtaagaaatattttgaatatctggggtcttatgatacaggaatggaagtttggggaggagaaaacctcgaattttcctttaggatctggcagtgtggtggggttctggaaacacacccatgttcccatgttggccatgttttccccaagcaagctccctactcccgcaacaaggctctggccaacagtgttcgtgcagctgaagtatggatggatgaatttaaagagctctactaccatcgcaacccccgtgcccgcttgggcctggcatgcgacgaatgctccatcaaagctggctggtggtta

SEQ ID NO: 4759 - DNA, 1152 bp, Homo sapiens
  SIMILAR (445)..(717): 841254mologous to Homo sapiens Human GUS protein fragment,accession number W93828,Smith-Waterman Score=426.
atgcataactctgatggaattgaagtcatgaggcagcagaaagctgaaataggcagagtgggagggttagagggaattcagttgggagtaacagaagtaatagttaacggagccagaatgcttgagtcatataattgcaaagcagagttaggagcaacagggctagtgaattaccagatctccgtcaagtgcagtaaccagttcaagttggaagtgtatcttttgaatgcagaaaacaaggtcgtggacaaccaggctgggacccagggccagctgaaggtgctgggtaccaacctctggtggccgtacctgatgcacgaacaccccgcctacctgtactcgtgggagggcaggccagatggggctcaggctgtcggggcgctcacacctggcactttggctgtcgtaggtgtggctgactgcacagaagtcactggggcctttgacttctacacactccctgtggggctccgcactgtggccgtcaccgagagccagttcctcatcagtgggaaacctttctatttccacggcgtcaacaagcatgaggatgcggacatccaagggaagggcttcaactgtccgctgctggtgaaggacttcaacctgctttgctggcttggcgccaacaccttctgcaccagccactatccctacacggaggagatgctgcagatatgttaccggtatgggattgtggtcatcgatgagtgtcctgctccctcgggccacaccgtgaccctctgtcccttccctcctggcccgctggcaactcttcaacaacgtgtctatgcatcaccatatgtgggtggtggaggaaccggtgctcagagacaagaaccaccccgccatggtgatgtggtccttggccaaagagcctgcgtccttcctggaatctgccggctactccttcaagagcctgacaatggagcaaactgcacgggttctggatctggacactggagaagctgtgttgcagtacagaagcctgccaagaggagcacacaagactcttggaaagaagaggaaaatctcctcttacaatgtcgatctaacatcatgccaactagcaaaggaaaaatgtttaaagggtccaagttcatttttgcagagcagacaggaaaggatgaattcagagctgagagacaataa

SEQ ID NO: 4760 - DNA, 535 bp, Homo sapiens
  SIMILAR (299)..(535): 971254mologous to Homo sapiens SMA4,accession number X83300,Smith-Waterman Score=429.
  misc_feature (1)...(535): n = a,t,c or g
ctgcacctaggcaaagcacgcntgggctccatgagtccggtgggtacttggagaacttactacgtctagctggaggattgtaaatgcaccaatcagcatgctgtgtctagctcaagaactcaagctccatgaggagatgtttcattgtcgagagcagtcatgatggcctgcacgtccacacaatgcaacagagtgaaagagcaggttctgcttctttggtgtagtcctgaagcttcctaagaaacttcacatcaggtgatggataggagcaaccctgtaaaaccagccttagactatttttcaaacaaggctggtgaattaccagatctccgtcaagtgcagtaaccagttcaagttggaagtgtgtcttttgaatgcagaaaacaaagtcgtggacaaccaggctgggacccagggccagctgaaggtgctgggtgccaacctctggtggccgtacctgatgcacgaacaccccgcctacctgtactcgtgggaggatggtgattgctcacaccaaagccttggacccctgcca

SEQ ID NO: 4761 - DNA, 737 bp, Homo sapiens
  SIMILAR (208)..(591): 831254mologous to Homo sapiens beta-glucuronidase precursor (EC 3.2.1.31),accession number M15182,Smith-Waterman Score=539.
agatccctgcggaaccgctccggaatttccgggtcgacgatctcgtctgcggtgtgcggccagccatggagcgctctgggcccagcgaagtgacaggctgggacgcatcgggaccggacccgcagcttgtggtcaccatgggcttcacggggttcgggggtcggtaaaaaagctcacacacttgacttggaagcaatgtttgaacaaactcaaagaacagctgtggaaagaagtcacaaaacactggggctggtgaattaccagatctccatcaagtgcagtaaccagttcaagttggaagtgtgtcttttgaatgcagaaaacaaagtcgtggacaaccaggctgggacccagggccagctgaaggtgctgggtgccaacctctggtggccgtacctgatgcacgaacgccctgcctatctgtattcattggaggtgcagctgactgcacagacgtcactggggcctgtgtctgacttctacacactccctgtggggatccgcactgtggctgtcaccaagagccagttcctcatcaatgggaaacctttctatttccacggtgtcaacaagcatgaggatgcggacgtgtgttggggctcctgggtccttgtcggggctgcttctggtcaccctccactttcgccttccctgtgtcctgcaggtgagggcagctcagggcaatgaggcaaatggctccaaatggagagggggctcatggtgtggctctccagggt

SEQ ID NO: 4762 - DNA, 2187 bp, Homo sapiens
  SIMILAR (1387)..(2184): 851254mologous to Homo sapiens putative p150,accession number U93563,Smith-Waterman Score=1189.
atgcaatatgagaagaacctggctgcctttgctagctctgaagacagaggaaggggtccaggatccaaggaagaaaaagtacagaattcaatacgaaagtgctcaattacctgtggcaaaggaatgcagtcccgtgtaatccaatgcatgcataagatcacaggaagacatggaaatgaatgtttttcctcagaaaaacctgcagcatacaggccatgccatcttcaaccctgcaatgagaaaattaatgtaaataccataacatcacccagactgggttcacagccaacatctggtagtgaatctgacttttctgttggtcaacaggaccaacagttgggaagaaaaaacgggtctggagttcaagagagcaaagtgaagggagacatggatctctctgttttgccaaataacaaccatcctgacaaattcctgcagcttgacgtaaagtctttaacgaggagctcagccctccttcaggccagcctggtgaggtttccgggtggaaattatcctgctgcacaacactggcaaaaccttgtctactcacagggcttaatcagcacaattaatcacttgtattcctttggaagttcttcactcatttgtcaagatacccgtatattgacacaactgaaataccgccctcaaaataggcaagctgtggtttggcatcctggtacacacctgccctctggtgtgaaacaaaacttctttttattgtataaagtaataaccattcttaatatcaaacttctactcaaggttgaagaagaaataaagaagcacggaagtaataacatgggattatcagaaaacctgactgattgtgctgctgctggcaatggtgatgatggactaattccacaaagagcagaaaacctgaaaatcagcaatttcctaggacggagaatgaagagtatcataggtgatgaacatcaaaaaccaaaggtagataaaaccacaaagaggtggagaaaccagtgcagaaaggctgaaaattcccaaaaccagaatgcctcttctccaaaagatcacaactccttgccatcaagggaacaaaactggtcagagaatgagtttgatggcttgattgaagtaggcttcagaaggtgggtaataacaaactcctgtgagctaaaggagtgtgttttaacccaacctcaggtggacatcacggtcctaccgatatgtgatgtcacccccagaggcctagctgtaaaattcctctctttgtactctttctctttatttctcaaccggccgacacttatggaaaatagaacctacgttgaaatattgggggtgggttcccccagtacttatccaccacgatcaagtcagcttcatccgtgggatgcaaggctggttcaacatatgcatatcaataaagcgttggaagttctggccagggcaatcaggaaagagaaagaaataaagggtattcaaataggaagagaggaagtcaacttgtctctgtttgcagatgacatgattgtatatttagaatacctcatcgtctcagcccaaattctccttgaggtgataagcaacttcagcaatgtctcaggatacaaaatcaacatgcaaaaatcacaagcattcctatacaccaataacacacaaatagagacccaaatcatgaatgaattcccattcacaattgctactaagagaataaaatacctagtaatacagcttacaaaggatgtgaaggacctcttcaaggagaactataaaccacttctcaaggaaataagagaggacacaaacaaatgggaaaacattccatgcttttggataggaagaatcaatatcgtgaaaatggccatactgccaaaagtaatttatagactcaatgtgatccccatcaagctaccactgactttcttcacagaattggagaaaactactttaaacttcatatggaaccaaaaaagagcccacatagccaagacaatattaagcaaaaagaacaaagctggaggcatcatgctacctgacttcaaactatattacaaggctacagtaaccaaaacagcatggtactggtaccaaaacagatatgcagaccaatggaacagaacagagccctcagaaataacatcacacatctacaaccatctgatctttgacaaacctgacacaaacaagcaatggggaaaagattccctatttaataaatga

SEQ ID NO: 4763 - DNA, 1790 bp, Homo sapiens
  SIMILAR (596)..(691): 561254mologous to Homo sapiens kruppel-related zinc finger protein,accession number U66561,Smith-Waterman Score=101.
ccggtgtgagaaataaagagaaagagtacaaagagagaaattttacagctaggcctctaggggtgacatcacatatcggcaggttccgtgatgcccctgagccgcaaaaccagcaagtttctattagggattctggaaggggagcagatgtacgaacagggaggtttatcaagtttatcaacgccagctcattaacaggtattgaatgggttctggggatagagtgggtgttgatgggatggtctccggatgccatgagtggcggagttaggaccaggatgatgaaaccacaggcagaatccgggaggagcagcgtggcatcccagcctcaggcctgcccggacggtgttcgggcgatgatgtcttatcatccaggtctctctcttcagaaagaatcccaacaggagtgggaatacctggaccctaatcagagggacttatacagggatgtgatgttggagaactatagaaacctggtatcactggatttggatttacagtgtgagataatcagctacatagaagtacccacttatgaaacagatatatcctctacacaacttcagagcatatataagagagagaaactctatgaatgtttcatgtcattgagagaccctatgaatgcaaagagtgtgggaagaactttcgtagtggctatcaacttactctacatcaaagatttcatactgagaattcataaaggtggaaaaccctatgaatgtaaggagtgtaagaaaacctttactttgtatagaaatcttactcggcatcagaatattcatactggtgagaaactttttgaatgcaagcaatgtgggaagacctatactactggttcaaaactctttcaacatcagaaaactcatactggcgagaaaccctatgaatgcaaggaatgcggaaaggcctttagcttgtatggctaccttaaacaacatcagaaaattcatactggcatgaaacactttgaatgtaaggagtgtaaaaaaacctttactttgtatagaaatcttactcgacatcagaatattcacactggtaagaaactttttgaatgtcaggaatgtgggaaggcctatagtactggctcaaaccttattcaacatcggaaaactcatactggtgagaaaccctataaatgtaaggaatgtggcaagacctttagcttgcatggatatcttaatcaacatcagaaaattcatactggtgtgaaaccctatgaatgtaagaaaattcatactggtggaaaaccttatgaatgtaaagaatgtgggaaggccttcagtcgtgcttcaaaccttgttcaacatgagagaattcatactggtgagaaaccctatgtgtgtaagcagtgtgggaaaaccttcagatatggttcagcccttaaagcccatcagagaattcataggagcataaaagtgaatcagtggctggactcaccgcgtcataaaagcataaactgtgacccgatgagtccgcgcactcggaaaacaagagaacgctcccacgtctccgggcgcagcttgtgccagcgactactaggtcagggggcgcagctgagagaattcaagcaacctccccgcaaccggttccgccgcgtttgtgggctggtagcccggaatacatttcccagaggccttcgcggccgacgtgcttcgcgcaggaacgcagccgcctcccgactggaggacgcggtagcggagctgctcaaagcgaggtgctcagccctgggaggctcagggctgcccgaggggcttagtcccagagccagtgctgtcaggggctga

SEQ ID NO: 4764 - DNA, 492 bp, Homo sapiens
  SIMILAR (88)..(309): 721254mologous to Homo sapiens spinster-like protein,accession number AF212371,Smith-Waterman Score=295.
atgccagggggagggagcaaagtgggaacaagggatgacaggcagacggtgggtagtcggtcccccagcatcctccacccctcctcacagtacttctggctgctggtcctgtcccgggggctggtgggcatcggggaggccagctactccaccatcgcccccactatcattggcgacctcttcaccaagaacacgcgtacgctcatgctgtccgtcttctacttcgccatcccactgggcagtggcctgggctacattactggctccagcgtgaagcaggcagccggagactggcactgcgcattgcgggagagcttcttgcagttggttcggctcttgaaagttactcacctgcttcagcaactgcagctgctgtacccgacaaatggcaaaagacaagacaccaaccacacgagatcccagtgcgcacattacctgcctcatcttgactttcaggtggctttatgtgcctatgcagtgttgcaatgttaa

SEQ ID NO: 4765 - DNA, 486 bp, Homo sapiens
  SIMILAR (158)..(238): 961254mologous to Homo sapiens gamma-glutamyl transpeptidase (EC 2.3.2.2),accession number J05235,Smith-Waterman Score=122.
gaatatgaatgccacacacccagcaccgagaagcaatactttgggagttacagtgcaaagatgaacctagtggctgtttccaccaaatcctcctgtctttcgtggccaacaccccaggcaaggcttggggcccccgtctgctgctggacgcagagccatgaagaagaagttagtggtgctgtgcctgctggccgtggtcctggtgctggtcattgtcggcctctgtctctggctccctcggcctccaaggaacctgacaaccatgtgtacaccagggctaccgtggccgcggatgccaagcagtgctcggagattgggaggaaaagctgaggtcatcaatgcccgcgaggtggcccccagcgtggcctttgccagcatgttcaacagctcggagcagtcccagaaggcactttaggaggccaagtcaggaggagcgcatgagcccaggagacctgcctggacaacatagcaagactccatctctac

SEQ ID NO: 4766 - DNA, 2535 bp, Homo sapiens
  SIMILAR (1866)..(160): 1001254mologous to Homo sapiens gamma- glutamyltranspeptidase,accession number X60069,Smith-Waterman Score =2896.
ggaaaggccaggaggccacctgagcctggcacagtggcctcatttattgtgctgctctgctgctcacaggggaagccggtcccccagagtccccttcctggtcctggtgagtatcttgtccctggattgcttgtcagccttgtcctcctggagcactcagtagccggcaggctccccgcctttcctggagtccgaggcagctgcccagccaccagccgtgcggacgatggcttgcaccacagcgatgaaggtggacgcgatctgggtgtgatggtgccgggtctccagggctgcagtcactgcctggtcaatgtttctctccactgtcgtgacgttgggcagaagctggttgtgcagccggggctcctccacggcccgcttcacgtcatagccgaaccagaggttgtagatgatggccagtgcagtggccgtggtgatctgtgtgcccccagcagctcccaccaccatccggacctggccgtcctggcccaccatgatcgtcgggcacatggacgagagcggctgcttccctggctggatgaaattggcaggtgaggggggtaccccaaactcgttggtgatgctgggagagctgaagtcgtccatttcattattgaacaggatcccgctgaccggggagcggaccttggagccaaagtagaggttgatggtgctggtggcggacacagcactgccgtcctctgcgacgacagacaggtgagcagtgcccccgtcatccggcgtgtagaactcgggcttgtagtaggagatcgggtgagtggtgtcgtcagagatctgggcccggagctgggcagcgaagaactcggaggtcatgttgcggaccacctcagtcacatccacaaacttggggtccccaagcagggtcctcttggcgtaggcaaaccggaaagcctctacgatgcggtggtacgtcaggcccttctgctcggggctctccacgctctcccgggagaagttgtaccctttgaggatgttgaggatgagggccagcacgggcccgctgagcggcgcactgggcatgtacagcaccgcgtctcccaggctgatgttcagcgggtgctcgatcagctcagcacggtagttgttcaggtcctcagctgtcacaatgcccccggccgcctggatgtccttcacaatctgggccgtgaggctgccgttgtagaaggcctgggcaccctcgatggccagcgtctcgtaggtgtcagccagctgcggcagggtcagtctctccccctcccgaagcacctttctatcccggcagaacacctcacacaagacaggctgctgctcgatgacggtccgcttgttttccagggctgccgccaagcccttgcccacggggaagccctggcgggccagctggatgctgggctggaagaggcgagcccagggcagccgcccatgccgctggtgtgccagctcatagcctcggatctccccaggcaccgccaccgacagcccccccttctgggactgctccgagctgttgaacatggtggcaaaggccagcctgggggccacctcgcgggcgttgatgacctcagcttttcgtgtggtgctgttgtagatggtgaggaagaggccacccccgatgcccatgctgtgggcattcatgagccccacacacaacagggctgcaatggctgcatccaccgcagagccaccgtcccgcagtgcatccctcccaatcttcgagcactgcttggcatccgcggccacggcagccctggtgtacacatggttgtcaggttccttggaggctgagggcagccagagacagaggccgacaatgaccagcaccaggaccacggccagcaggcccagcaccactaacttcttcttcatggctctgcgtccagcagcagacgggggccccaagccttgcctggggtgttggccacgaaagacaggaggatttggtggaaatagctgaggaaataaccggggtctccctcacactctgctgaagcctgtagccacagaatcttcttcagggactctctgatcaggcagccttctcgttctcctgctgtggggcctcaggcaaatcactgaactgtccagcctggatgacggcagcacctcacttgccttgctgcccttcagtcttccagaaagcagctagagggctctgtctgtccaactgcagaacaggccctgcctcctccctgccccgttggacagctcacacccttcaccaggcctgacagcgctcttgccactccgacaccccgggtcccagctgggagtccgggtcagggttaagggttcctgatagagacaccgattcctggaggtccaaagagcctcaggagctgggccagcaatatgcagcatctgaggcctggggacagtgggggcccaggagagcacctcttcctcagaagacagttttgggctgcacccgctatgatgtccaccagctcagagagggtgagcggcgcctctgggtcacacagcactggggcacagccaactgctctcacttctgggctcacccgacgcccggtctgc

SEQ ID NO: 4767 - DNA, 2633 bp, Homo sapiens
  SIMILAR (850)..(161): 991254mologous to Homo sapiens gamma- glutamyltranspeptidase,accession number X60069,Smith-Waterman Score =1183.
gacaggccagggaggccacctggagcctggcacagtggcctcatttattgtgctgctctgctgctcacaggggaagccggtcccccagagtccccttcctggtcctggtgagtatcttgtccctggattgcttgtcagccttgtcctcctggagcactcagtagccggcaggctccccgcctttcctggagtccgaggcagctgcccagccaccagccgtgcggacgatggcttgcaccacagcgatgaaggtggacgcgatctgggtgtgatggtgccgggtctccagggctgcagtcactgcctggtcaatgtttctctccactgtcgtgacgttgggcagaagctggttgtgcagccggggctcctccacggcccgcttcacgtcatagccgaaccagaggttgtagatgatggccagtgcagtggccgtggtgatctgtgtgcccccagcagctcccaccaccatccggacctggccgtcctggcccaccatgatcgtcgggcacatggacgagagcggctgcttccctggctggatgaaattggcaggtgaggggggtaccccaaactcgttggtgatgctgggagagctgaagtcgtccatttcattattgaacaggatcccgctgaccggggagcggaccttggagccaaagtagaggttgatggtgctggtggcggacacagcactgccgtcctctgcgacgacagacaggtgagcagtgcccccgtcatccggcgtgtagaactcgggcttgtagtaggagatcgggtgagtggtgtcgtcagagatctgggcccggagctgggcagcgaagaactcggaggtcatgttgcggaccacctgccgagaccccagagctggcctcagtcacatccacaaacttggggtccccaagcagggtcctcttggcgtaggcaaaccggaaagcctctacgatgcggtggtacgtcaggcccttctgctcggggctctccacgctctcccgggagaagttgtaccctttgaggatgttgaggatgagggccagcacgggcccgctgagcggcgcactgggcatgtacagcaccgcgtctcccaggctgatgttcagcgggtgctcgatcagctcagcacggtagttgttcaggtcctcagctgtcacaatgcccccggccgcctggatgtccttcacaatctgggccgtgaggctgccgttgtagaaggcctgggcaccctcgatggccagcgtctcgtaggtgtcagccagctgcggcagggtcagtctctccccctcccgaagcacctttctatcccggcagaacacctcacacaagacaggctgctgctcgatgacggtccgcttgttttccagggctgccgccaagcccttgcccacggggaagccctggcgggccagctggatgctgggctggaagaggcgagcccagggcagccgcccatgccgctggtgtgccagctcatagccctcgatctccccaggcaccgccaccgacagcccccccttctgggactgctccgagctgttgaacatggtggcaaaggccagcctgggggccacctcgcgggcgttgatgacctcagcttttcgtgtggtgctgttgtagatggtgaggaagaggccacccccgatgcccatgctgtgggcattcatgagccccacacacaacagggctgcaatggctgcatccaccgcagagccaccgtcccgcagtgcatccctcccaatcttcgagcactgcttggcatccgcggccacggcagccctggtgtacacatggttgtcaggttccttggaggctgagggcagccagagacagaggccgacaatgaccagcaccaggaccacggccagcaggcccagcaccactaacttcttcttcatggctctgcgtccagcagcagacgggggccccaagccttgcctggggtgttggccacgaaagacaggaggatttggtggaaatagctgaagcacgcgcagcccagacctttctgggggactccgtgttacctccctctgcctctagctggtttctctgtctccagttgaactctgctgtggggcctcaggcaaatcactgaactgtccagcctggatgacggcagcacctcacttgccttgctgctgggagtgttgtgaatagagtaggttagactgtgggcagggcttggtgaatggtagctgtgattatcatcatggctgcactggggacacccccaggaggcctgagtggcacaggtctcttgctcactgtatgtcccctgtggactcccttccaggctgtgcagtgagtggcagcagtgacccttgggaagtctcatggctatggcagcaggtgacaggtgtgacaacagggaagagggatgtggtgacagaggttggggttcccctctcccacagtcagtttcccacaaagggcggtgtctgccagcaagcccctccaatgagccccaagctggatttccctccactccaccctgtcccagtgcagagcgtctgacctcagaggcagacacactgtcccagaggtggtctacgaatggagtccctgtgccctccccacacacagggaacatccaaatgccatcatggaagggtggccacctccccaggcttggtgggccg

SEQ ID NO: 4768 - DNA, 538 bp, Homo sapiens
  SIMILAR (2)..(241): 661254mologous to Homo sapiens Ig-like membrane protein,accession number AF031174,Smith-Waterman Score=240.
cagcaatgccagcgtcatccttgagggcgaggacctgcgcttctcctgcagcgtccgcatggcaggaaggctgcagggtcgcttctctgtcatctggcagcttgtggacaggcagaaccgccgcagcgatatcatgtggctagaccgggaatggcaccgtgcagccaggctcgtcctactgggagcgcagcagctttgggagcgtccagatggagcaggtgcagcccaactcattcagcctgggcatcttcaacagcaggaaggaggacgagggccagtatgaatgccatgtgactgaatgggtgcgggtggtggatggcgagtggcagattgttggggagcgccgggccagcactcccatctccatcatagctcttggtgagtgagcggtgggactggcagtgggtctggcatggagacagcttcagtgtcaaacaccttatcctgacttttgtctgtcagagttctagcaggaaactatggccagtcttttacctatagagtttgaagtactttcctttaaaaaaaaaaaaaaaaa

SEQ ID NO: 4769 - DNA, 6623 bp, Homo sapiens
  SIMILAR (106)..(2751): 1001254mologous to Homo sapiens Ig-like membrane protein,accession number AF031174,Smith-Waterman Score=4634.
ttccaaaactgttctctggagctataagtggattgccagaaatgagagattaggagctgggagaagaggaagcgccttgtgttgtgtctcctggaggctgccgacatgaagtgctttttcccggtgctgagctgtctggctgtgctgggtgtggtgtcagcacagcggcaggtcaccgttcaggaaggacccttgtaccgcacggagggctcccacatcactatctggtgcaatgtgagtggctaccagggaccttctgagcagaatttccagtggtccatttacctgccttcgtcgccagagcgagaggtgcagatcgtcagcaccatggactcttccttcccctatgccatctacacccagcgcgtccgcggagggaagatcttcatagaaagagtccaggggaactcaaccctattgcacatcacagatcttcaggcccgggatgccggggagtatgaatgccacacacccagcactgataagcaatactttgggagttacagtgcaaagatgaacctagtggtgatcccagactccctgcagaccactgccatgccccagactctgcacagagtggagcaggacccgctggagctcacttgtgaggtggcctcagagaccattcagcacagccacctgtctgtggcctggctccggcagaaagttggcgagaagcccgtggaggtcatctccctgagccgagatttcatgcttcactccagcagcgaatatgcccagaggcagagcctgggggaggtgcggctggacaagctggggaggaccaccttccgcctcaccatcttccacctgcagccttctgaccagggcgaattctactgcgaggccgccgagtggatccaggatccggatgggtcgtggtatgctatgacccgaaagcgttccgagggagccgtggtcaacgtccagccaactgacaaagaattcactgttcggctggagacagagaagcggctgcacacggtgggcgagccggtggagttcagatgcatcctggaggctcagaatgttcccgaccgttactttgctgtctcctgggccttcaacagctcgctcatcgccaccatgggtcctaacgctgtgcctgtcctcaacagcgaatttgctcaccgggaagccaggggacagcttaaggtggccaaagagagcgacagtgtctttgtgctgaagatctaccacctccgccaggaagatagcgggaaatacaactgccgggtgactgagcgagagaaaaccgtgaccggggaattcattgataaggagagcaagcgtcccaagaacatccccatcatagtcctccccctcacagataactgggtagttaaagtcccccagcaccaccagctcctgtcccaaggccacttggagagcagcatctccgtggaggtggccagcaatgccagcgtcatccttgagggcgaggacctgcgcttctcctgcagtgtccgcacggcaggcaggccgcagggtcgcttctctgtcatctggcagcttgtggacaggcagaaccgccgcagcaatatcatgtggctagaccgggatggcaccgtgcagccaggctcgtcctactgggagcgcagcagctttgggggcgtccagatggagcaggtgcagcccaactcgttcagcctgggcatcttcaacagcaggaaggaggacgagggccagtatgaatgccatgtgactgaatgggtgcgggcagtggatggcgagtggcagattgttggggagcgccgggccagcactcccatctccatcacagctcttgaaatgggcttcgcagtcacagccatctcccggacaccgggggtgacctacagcgactcctttgacttgcagtgtatcatcaaaccccactaccctgcctgggtccccgtgtcggtgacatggcggttccagccggtgggcacggtggagttccatgacttggtgaccttcacccgggacggaggggtccagtggggggacaggtcctccagcttccgaacccgaactgccatcgagaaggctgagtccagcaacaacgtccgcctaagcatcagccgagccagtgacacggaagcaggcaagtaccagtgtgtggcagagctgtggcggaagaactacaacaacacctggacgcgactggcggagaggacctccaacctgctggagatcagggtgctgcagccagtgacaaagctgcaggtgagcaaatcgaagaggaccctcaccctggtggaaaacaagcccattcagttgaactgctcagtcaagtcccagactagccagaactcccactttgcggtgctctggtatgtccacaagccctcggatgccgatggcaagcttatcctgaagaccacccacaactccgcctttgaatacggtacttacgccgaggaggagggcctgagagccaggctccagtttgagaggcatgtgtcggggggcctgttcagcctcaccgtccagagagccgaggtcagcgacagcggcagctactactgccacgtggaggagtggctgctgagccccaactacgcctggtacaagctggcagaggaggtttctgggcgcacagaagtcactgtgaaacagccagacagccgcctgaggctcagccaagcccaggggaacctgtcggtttctggagacccggcaggtacagctggagtgtgtggttctcaaccgcaccagcataacctcccagctcatggtggaatggtttgtatggaagcccaaccaccctgagcgggagactgtggcccgcttgagccgtgacgccaccttccactatggagagcaggcagccaagaacaatctgaaggggcggctgcatttggagagtccttcccccggcgtgtaccgtctcttcatccagaacgtggctgtgcaggacagcgggacctacagctgccatgtggaggagtggctgcccagccccagtggcatgtggtataagcgggcagaggacaccgctgggcagacagctctgacagtcatgcgaccagatgcttccctgcaggtggacacagtggtccccaatgccacggtctctgagaaggcagctttccagctggactgtagcatcgtgtcccgctccagccaggactcccgcttcgctgtggcctggtattccctgaggactaaagctggggggaaaaggagcagccctggcctggaagaacaggaagaggaaagggaggaggaggaggaggaggaggaggacgacgacgacgacgacccaacagagcggacggccctgctgagcgtgggcccagatgctgtctttggcccagagggcagtccttgggagggcaggcttcgcttccagaggctctccccggtgctctaccggctcacagtgctgcaggcaagcccccaagatacaggcaattactcctgccatgtggaggagtggctgcccagccctcagaaggaatggtaccggctgacggaggaggagtcagcccccatcggcatccgtgttctagatacaagtcccaccctccagtccatcatctgctccaacgacgcactcttctacttcgtcttcttctaccctttccccatctttggcattcttatcatcaccatccttctggtgcgtttcaagagccggaactccagcaagaactctgatgggaagaatggggtgcctctgctgtggatcaaagagccacacctcaactactcccctacttgcctggagccccctgttctcagtatccatccaggggccatagactaagcgggtgatgccccagcggatgttggccacggaggagctgaggctctccctttctctgtgattggacagttgacagcacccaaactctggggtgcatgtgtgtggaaagttgtcagacttgaaaagtgttccaagttcccagtcagtcacagagacagactgcctctcggtggcagtcttggttggttagctatttgcgcgcaaatgttgtgatcctgccattatagatttcttgtttctgtttttagtaatgtagtgagtagctccaggtgccacatctactcacagatttatctagtattctcagatagatgttacagggcttcttattctttgtaatgtactctttttaaatccctttagtttaccctttttggattccttaatgtggacgaatttctcttacgtacaactgacagcaaaaggaagggcgaactttctagtgacaaggaatctcttccaagactttgtttttgcacatttgaaaatgccacccatggatcaaaatatacccaaacgttttttactttcttaacaagacttaagaattgtgtgtagtgtgggcaaaatttgtatgttgtcttttccctcagctggagttattggaaccactttgtagtcaagacgaaagcactgaattttgcttcaaagaactgtgtatgtacaagagaaatcctgcataaccccattaggagtagatggtgcccggcctatctgtcagggaggcaaaaaaggcttcatcccatccttgccaaaaaataagaaaactgtcttggagaatgggtcagaagccccaaacggcacacactttccaaattaaagtgggcaggggctgcttttagcagctgctgacctgcagatttgtcaaagccagtgactagagaaggaagggagaaaggctggctgttggcttgctctgagctgcaaggatggtctctaactgattaactgtgagcaggtgggcctgtgtcttcaggtgctttgccaaactcttaaaagaaagtgtccagtgaacttggaagtgggcccctgagctgagcacagggccaaagcagccatggcagacacctgacggagggcacggggctggctgacactaagtttggtgggacagtgaggggtgggaggggggtttccagggcctggtgttggagagtgcagagaaatatctacctccctggaggtgtgaagactaggtttttcttcttccttccaattagattttccttaattatagtgatgtcttccttattcatttttctctccctgcctctcactgccataagaatatcagcctgggggcagtccagacgcagccctttgtcatcctttctgtttgcctagtctcagcagactgtgatcacaaggcattgtctgtgggatttttcctttccctttcttgatctctcttgtggttctaggttgtttggttgttcattgttatggtggctttttattttaacgccccttgagccccatgatggctggtgtcaccctgttcttttacactgttgggccaggtgctgcttgtccttcttagggcatcatcaattgcaaatatttccttttgctccctttatgaagatgttcttatacccttgctttcccatatttttctggccaagcatgccatctcctttactctgggaacttacatcctgaatcccaagagggggtcacagtttggaaaaagtcatcagggattctggaactaagtctgataaaagattccagtgaagccctgttctgagaacgagcagactgcaggggaggccatgggattccccaggccagtgtctgtgctgatccttcaagggtctgcaggtatgcaggtggcctgggctgctcggcagatactttgctgattcccagctgaggggagcatggtggcgattgctcagccattttctgacagacacacagacctgccttttctcccccaagtataccgtaccctcctgtgagacagtgtgtgcaggcaccaccaccttaatcctgctgttgcctgacatgctgattctcatttattatgctgcatcaacacattagaggtacaggagcggctcagtcatgaaaaaagaaggtcttttgccccatttctttatttcagagatgtgggctttcagtgggaatttgctgactcctactttataggctgagtcaatgagggaagatgactggcgtttcctctgtctaaatgggaggttgccagagcgctggctgggactaggatgtgtaactaagatttcagtttgaaatcttagatttcagttcacggcgataaagaagtaggtgctgcacacaaatatataaagcaattgtaggaaatttgaaaggaaaaaaagaaaccgaagccagtattttaataattgctttttctgtgtattttgtattgggctgggggatagcatcaaaggttgaactttttgagctttctatgaaaaaccccaggaccttctttctttggccatttctatggaaatgcgatgtcagatggatggtaatggtgccctccagtggctgtgagacctcattgcgcattgtctactggagctttagtcttctgagacggaggaaaactgctgaatactctggattcatctatgtctacaatgttgcatttatgaaaaactacactgtgctaggcgcattctaggacatgaatatgaccacaccctctttcaccgggtgtttctgtagcaagttttcatattcttttcaaacaatggtttctctgcgttaattattgaggaaaaaaaaagatggggtaagaaaactacccatgcatgatgtagagagctgttgatttgtttctgtttttttaaaggaaaactatttgtaagatgttgcactaaaacattttatatac

SEQ ID NO: 4770 - DNA, 3730 bp, Homo sapiens
  SIMILAR (1)..(1395): 891254mologous to Homo sapiens Ig-like membrane protein,accession number AF031174,Smith-Waterman Score=2153.
atgaagtgctttttcccggtgctgagctgtctggctgtgctgggtgtggtgtcagcacagcggcaggtcaccgttcaggaaggacccttgtaccgcacggagggctcccacatcactatctggtgcaatgtgagtggctaccagggaccttctgagcagaatttccagtggtccatttacctgccttcgtcgccagagcgagaggtgcagatcgtcagcaccatggactcttccttcccctatgccatctacacccagcgcgtccgcggagggaagatcttcatagaaagagtccaggggaactcaaccctattgcacatcacagatcttcaggcccgggatgccggggagtatgaatgccacacacccagcactgataagcaatactttgggagttacagtgcaaagatgaacctagtggtgatcccagactccctgcagaccactgccatgccccagactctgcacagagtggagcaggacccgctggagctcacttgtgaggtggcctcagagaccattcagcacagccacctgtctgtggcctggctccggcagaaagttggcgagaagcccgtggaggtcatctccctgagccgagatttcatgcttcactccagcagcgaatatgcccagaggcagagcctgggggaggtgcggctggacaagctggggaggaccaccttccgcctcaccatcttccacctgcagccttctgaccagggcgaattctactgcgaggccgccgagtggatccaggatccggatgggtcgtggtatgctatgacccgaaagcgttccgagggagccgtggtcaacgtccagccaactgacaaagaattcactgttcggctggagacagagaagcggctgcacacggtgggcgagccggtggagttcagatgcatcctggaggctcagaatgttcccgaccgttactttgctgtctcctgggccttcaacagctcgctcatcgccaccatgggtcctaacgctgtgcctgtcctcaacagcgaatttgctcaccgggaagccaggggacagcttaaggtggccaaagagagcgacagtgtctttgtgctgaagatctaccacctccgccaggaagatagcgggaaatacaactgccgggtgactgagcgagagaaaaccgtgaccggggaattcattgataaggagagcaagcgtcccaagaacatccccatcatagtcctccccctcaagagcagcatctccgtggaggtggccagcaatgccagcgtcatccttgagggcgaggacctgcgcttctcctgcagtgtccgcacggcaggcaggccgcagggtcgcttctctgtcatctggcagcttgtggacaggcagaaccgccgcagcaatatcatgtggctagaccgggatggcaccgtgcagccaggctcgtcctactgggagcgcagcagctttgggggcgtccagatggagcaggtgcagcccaactcgttcagcctgggcatcttcaacagcaggaaggaggacgagggccagtatgaatgccatgtgactgaatgggtgcgggcagtggatggcgagtggcagattgttggggagcgccgggccagcactcccatctccatcacagctcttgaaatgggcttcgcagtcacagccatctcccggacaccgggggtgacctacagcgactcctttgacttgcagtgtatcatcaaaccccactaccctgcctgggtccccgtgtcggtgacatggcggttccagccggtggggcacggtggagttccatgacttggtgaccttcacccgggacggaggggtccagtggggggacaggtcctccagcttccgaacccgaactgccatcgagaaggctgagtccagcaacaacgtccgcctaagcatcagccgagccagtgacacggaagcaggcaagtaccagtgtgtggcagagctgtggcggaagaactacaacaacacctggacgcgactggcggagaggacctccaacctgctggagatcagggtgctgcagccagatagaatgggtgtcagtgcaagagccctaagaggagagctcagcccctcccagatccctcaggcctgttgtcatggtaacaccggggcacttgttattggcatcaaggagccagggtcactgccctacctgcagacagtgacaaagctgcaggtgagcaaatcgaagaggaccctcaccctggtggaaaacaagcccattcagttgaactgctcagtcaagtctcagactagccagaactcccactttgcggtgctctggtatgtccacaagccctcggatgccgatggcaagcttatcctgaagaccacccacaactccgcctttgaatacggtacttacgccgaggaggagggcctgagagccaggctccagtttgagaggcatgtgtcggggggcctgttcagcctcaccgtccagagagccgaggtcagcgacagcggcagctactactgccacgtggaggagtggctgctgagccccaactacgcctggtacaagctggcagaggaggtttctgggcgcacagaagtcactgtgaaacagccagacagccgcctgaggctcagccaagcccaggggaacctgtcggttctggagacccggcaggtacagctggagtgtgtggttctcaaccgcaccagcataacctcccagctcatggtggaatggtttgtatggaagcccaaccaccctgagcgggagactgtggcccgcttgagccgtgacgccaccttccactatggagagcaggcagccaagaacaatctgaaggggcggctgcatttggagagtccttcccccggcgtgtaccgtctcttcatccagaacgtggctgtgcaggacagcgggacctacagctgccatgtggaggagtggctgcccagccccagtggcatgtggtataagcgggcagaggacaccgctgggcagacagctctgacagtcatgcgaccagatgcttccctgcaggtggacacagtggtccccaatgccacggtctctgagaaggcagctttccagctggactgtagcatcgtgtcccgctccagccaggactcccgcttcgctgtggcctggtattccctgaggactaaagctggggggaaaaggagcagccctggcctggaagaacaggaagaggaaagggaggaggaggaggaggaggaggaggaggacgacgacgacgacgacccaacagagcggacggccctgctgagcgtgggcccagatgctgtctttggcccagagggcagtccttgggagggcaggcttcgcttccagaggctctccccggtgctctaccggctcacagtgctgcaggcaagcccccaagatacaggcaattactcctgccatgtggaggagtggctgcccagccctcagaaggaatggtaccggctgacggaggaggagtcagcccccatcggcatccgtgttctagatacaagtcccaccctccagtccatcatctgctccaacgacgcactcttctacttcgtcttcttctaccctttccccatctttggcattcttatcatcaccatccttctggtgcgtttcaagagccggaactccagcaagaactctgatgggaagaatggggtgcctctgctgtggatcaaagagccacacctcaactactcccctacttgcctggagccccctgttctcagtatccatccaggggccatagactaa

SEQ ID NO: 4771 - DNA, 2223 bp, Homo sapiens
  SIMILAR (825)..(136): 991254mologous to Homo sapiens gamma- glutamyltranspeptidase,accession number X60069,Smith-Waterman Score =1183.
cctggcacagtggcctcatttattgtgctgctctgctgctcacaggggaagccggtcccccagagtccccttcctggtcctggtgagtatcttgtccctggattgcttgtcagccttgtcctcctggagcactcagtagccggcaggctccccgcctttcctggagtccgaggcagctgcccagccaccagccgtgcggacgatggcttgcaccacagcgatgaaggtggacgcgatctgggtgtgatggtgccgggtctccagggctgcagtcactgcctggtcaatgtttctctccactgtcgtgacgttgggcagaagctggttgtgcagccggggctcctccacggcccgcttcacgtcatagccgaaccagaggttgtagatgatggccagtgcagtggccgtggtgatctgtgtgcccccagcagctcccaccaccatccggacctggccgtcctggcccaccatgatcgtcgggcacatggacgagagcggctgcttccctggctggatgaaattggcaggtgaggggggtaccccaaactcgttggtgatgctgggagagctgaagtcgtccatttcattattgaacaggatcccgctgaccggggagcggaccttggagccaaagtagaggttgatggtgctggtggcggacacagcactgccgtcctctgcgacgacagacaggtgagcagtgcccccgtcatccggcgtgtagaactcgggcttgtagtaggagatcgggtgagtggtgtcgtcagagatctgggcccggagctgggcagcgaagaactcggaggtcatgttgcggaccacctgccgagaccccagagctggcctcagtcacatccacaaacttggggtccccaagcagggtcctcttggcgtaggcaaaccggaaagcctctacgatgcggtggtacgtcaggcccttctgctcggggctctccacgctctcccgggagaagttgtaccctttgaggatgttgaggatgagggccagcacgggcccgctgagcggcgcactgggcatgtacagcaccgcgtctcccaggctgatgttcagcgggtgctcgatcagctcagcacggtagttgttcaggtcctcagctgtcacaatgcccccggccgcctggatgtccttcacaatctgggccgtgaggctgccgttgtagaaggcctgggcaccctcgatggccagcgtctcgtaggtgtcagccagctgcggcagggtcagtctctccccctcccgaagcacctttctatcccggcagaacacctcacacaagacaggctgctgctcgatgacggtccgcttgttttccagggctgccgccaagcccttgcccacggggaagccctggcgggccagctggatgctgggctggaagaggcgagcccagggcagccgcccatgccgctggtgtgccagctcatagccctcggatctccccaggcaccgccaccgacagcccccccttctgggactgctccgagctgttgaacatggtggcaaaggccagcctgggggccacctcgcgggcgttgatgacctcagcttttcgtgtggtgctgttgtagatggtgaggaagaggccacccccgatgcccatgctgtgggcattcatgagccccacacacaacagggctgcaatggctgcatccaccgcagagccaccgtcccgcagtgcatccctcccaatcttcgagcactgcttggcatccgcggccacggcagccctggtgtacacatggttgtcaggttccttggaggctgagggcagccagagacagaggccgacaatgaccagcaccaggaccacggccagcaggcccagcaccactaacttcttcttcatggctctgcgtccagcagcagacgggggccccaagccttgcctggggtgttggccacgaaagacaggaggatttggtggaaatagctgaggaaataaccggggtctccctcacactctgctgaagcctgtagccacagaatcttcttcagggactctctgatcaggcagccttctcgttctcctgaaggtcaagggaggttacctgaagcacgcgcagcccagacctttctgggggactccgtgttacctccctctgcctctagctggtttctctgtctccagttgaactctgctgtggggcctcaggcaaatcactgaactgtccagcctggatgacggcagcacctcacttgccccg

SEQ ID NO: 4772 - DNA, 1677 bp, Homo sapiens
  SIMILAR (4)..(870): 901254mologous to Homo sapiens Ig-like membrane protein,accession number AF031174,Smith-Waterman Score=1342.
atgtggaatagtaaaattaatcatgatcatgatgaccagtttttgaaaacctactatgtgttagagagcagcatctccgtgggggtggccagcaatgccagcgtcatccttgagggcgacgacctgcgcttctcctgcagcgtccgcatggcaggcaggccgcagggtcgcttctctgtcatctggcagcttgtggacaggcagaactgccgcagcaatatcatgtggctagaccgggatggcaccgtgcagccaggctcgtcctactgggagcgcagcagctttgggagcgtccagatggagcaggtgcagcccaactcattcagcctgggcatcttcaacagcaggaaggaggacgagggccagtatgaatgccatgtgactgaatgggtgcgggtggtggatggcgagtggcagattgttggggagcgccgggccagcactcccatctccatcatagctcttgaaatgggcttcgcagtcacagccatctcccggacaccgggggtgacctacagcgactcctttgacttgcagtgtatcatcaaaccccactaccctgcccaggtccccgtgtcagtgacatggcggttccagccggtgggcacggtggagttccatgacttggtgaccttcacccgggacggaggggtccagtggggggacaggtcctccagcttccgaacccgaactgccaccgagaaggctgagtccagcaacaacgtccgcctaatcatcagccgagccagtgacacggaagcaggcaagtaccagtgtgtggcagagctgtggtggaagaactacaacaacacctggacgcaactggcggagaggacctccaacctgctggtgatcagggtgctgcagccagatagaatgggtgtgagtgcaagagccctaagaggagagcccagcccctcccagatgcctcaggcctgttgtcatggtaacaccggggcacttgttattggcatcaacgagccagagtcactgccctgcctgcagacagtgacaaagctgcaggtgagcaaatcgaagaggaccctcaccctggtggaaaacaagcccattcagctgaactgctcagtcaagtctcagaccagccagaactcccactttgcggtgctctggtacgtccacaagccctcagatgccaacggcaagcttatcctgaagaccacccacaactccgccttcgaatacggtacttacgtggaggaggagggcctgagagccaggctccagtttgagaggcatgtgtcgggggacctgttcagcctcaccgtccagagagccgagtggctgctgagccccaactacgcctggtacaagctggcagaggaggtttctgggcgcacagaagtcactgtgaaacagccaggtggttccttgggcctggggtgctactgtttctggatgggcagcagaaccagtctgcactcagggccccaggccatgttcctggaacacacctttagcattgacagcagcatgtgcagagccatgaagaagaagttagtggtgctgggcctgctggccgtggtcctggtgctggtcattgtcaatctctgtctctggctgccctcagcctccaaggaacctgacaaccatgtgtacaccagggctgccgtggctgcagatgccaagcagtgctcggagattgggaggaaaagctga

SEQ ID NO: 4773 - DNA, 2340 bp, Homo sapiens
  SIMILAR (799)..(1554): 911254mologous to Homo sapiens gamma- glutamyltranspeptidase,accession number X60069,Smith-Waterman Score =1172.
aggaaaacccttcagacttgggagacagccggcattgctggcactggcctctctggagcttttctcggtgtggtgtcagcacagcggcaggtcaccgttcaagaaggacccttgtaccgcacggagggctcccacatcactatctggtgcaatgtgagtggctaccagggaccttctgaacagaatttccagtggtccatttacctgccttcgtcgccagagcgagaggtgcagatcgtcagcaccatggactcttccttcccctatgccatctacacccagcgcgtccgcggagggaagatcttcatagaaagagtccaggggaacccaaccctattgcacatcacagatcttcaggcccgggatgccggggaatatgaatgccacacacccagcaccgagaagcaatactttgggagttacagtgcaaagatgaacctagtgggagaacgagaaggctgcctgatcagagagtctctgaagaagattctgtggctacaggcttcagcagagtgtgagggagaccccggttatttcctcagctgtttccaccaaatcctcctgtctttcgtggccaacaccccaggcaaggcttggggcccccgtctgctgctggacgcagagccatgaagaagaagttagtggtgctgggcctgctggccgtggtcctggtgctggtcattgtcggcctctgtctctggctgccctcggcctccaaggaacctgacaaccatgtgtacacccagggctgccgtggccgcggatgccaagcagtgctcggagattgggagggttttggtgggtgggcctgcctacctgcttcttctaggaaaagctgaggtcatcaatgcccgcgaggtggcccccaggctggcctttgccagcatgttcaacagctcggagcagtcccagaagggagggctgtcggtggcggtgcctggggagatccgaggctatgagctggcacaccagcggcatgggcggctgccctgggctcgcctcttccagcccagcatccagctggcccgccagggcttccccgtgggcaagggcttggcggcagtcctggaaaacaagcggaccgtcatcgagcagcagcctgtcttgtgtgaggtgttctgccgggatagaaaggtgctttgggagggggagagactgaccctgccgcggctggctgacacctacgagatgctggccatcgagggtgcccaggccttctacaacggcagcctcatggcccagattgtgaaggacatccaggcggctgggggcattgtgacagctgaggacctgaacaactactgtgctgagctgatcgagcacccgctgaacatcagcctgggagacgcggtgctgtacatgcccagtgcgcggctcagcgggcccgtgctggccctcatcctcaacatcctcaaagggtacaacttctcccgggagagcgtggagacccccgagcagaagggcctgacgtaccaccgcatcgtagaggctttccggtttgcctacgccaagaggaccctgcttggggaccccaagtttgtggatgtgactgagaatttgattgcgggcctactgtgtgctcggatggactcgccagctctggggtctcagcaggtggtccgcaacatgacctctgagttcttcgctgcccagctccggtcccagatctctgaccacaccactcacccgatctcctactacaagcccgagttctacacgctggatgacgggggcactgctcacctgtctgtcgtcgcagaggacggcagtgctgtgtccgccaccagcaccatcaacctctactttggctccaaggtctgctccccggtcagtgggatcctgttcaataatgaatggacgacttcagctctcccagcattcaccaatgagtttggggcacccccctcacctgccaatttcatccagccagggaagcagccgctcttgtccatgtgcctgacgatcatggtgggccaggacggccaggtccggatggtggtgggagctgctgggggcacgcagatcaccacagacactgcactgcccccaagccacgctgatcacactcccatgccccaggccatcatctacaacctctggttcggctatgacgtgaagagggccgtggaggagccccggctgcacaacaagcttctgcccaacgtcacgacagtggagagaaacattgaccaggcagtgactgcagccctggagacccggcaccatcacacccagatcgcgtccaccttcatcgctgtggtgcaagccatcgtccgcacggctggtggctgggcagctgccttggactccaggaaaggcggggaacctgctggctactga

SEQ ID NO: 4774 - DNA, 435 bp, Homo sapiens
  SIMILAR (238)..(2): 971254mologous to Mus musculus Nedd4 WW domain-binding protein 5,accession number AF220209,Smith-Waterman Score=415.
atccagggaaataggtggaaaacctgacaatcaggatccatttaattagagagagaccaaatcctgaaatggccccataccttcctgcagctgaagtggtcaggcaaaaagacaggaaaaacccaatccagttaaagaggaatgccatgaaaaaagttaacatgaaaatcccatcatttcctatcctcagctggtcagcatcatcaaaatcatcccgacccacaaaatcctcatccttgtagtcaaaatatgctgcgctctctgcagaaatgctgctgtaaggtggaggagcatcacctgcagcctgttcaggttctccagactcttcttcattctgcaactgctggtaccggctgccgcaggccggctcgaccgccgccagcgccgccaacgccaacgccatggcgcagccggcagcagggaagcagagcgagc

SEQ ID NO: 4775 - DNA, 240 bp, Homo sapiens
  SIMILAR (134)..(45): 411254mologous to Homo sapiens homeobox protein Cdx2,accession number U51096,Smith-Waterman Score=59.
atggcgttggcgttggcggcgctggcggcggtcgagccggcctgcggcagccggtaccagcaggcctctctggccggcccgcggccaactcgacgccggggcttggcaggccgcgctgggcctggaggggcgggtcgggccccgggctcggattcgaggctgccacgggcccggcctgcccgtctgcgaccccagatgctttcggtgcatacagatgtcaatcctccttttatcaaataa

SEQ ID NO: 4776 - DNA, 681 bp, Homo sapiens
  SIMILAR (167)..(487): 751254mologous to Homo sapiens Human secreted protein sequence SEQ ID NO:216,accession number Y87177,Smith-Waterman Score =383.
gtagtccccgcctcttccccaggggccgcgtcggagcctcggcggcggcggcggtgcttacagcctgagaagagcgtctcgcccgggagcggcggcggccatcgagacccacccaaggcgcgtccccctcggcctcccagcgctcccaagccgtagcggccgcgccccttcagctagctcgctcgctcgctctgcttccctgctgccggctgcgcttatggcgttggcgttggcggcgctggcggcggtcgagccggcctgcggcagccggtaccagcagttgcagaatgaagaagagtctggagaacctgaacaggctgcaggtgatgctcctccaccttacagcagcatttctgcagagagcgcagcatattttgactacaaggatgagtctgggtttccaaagcccccatcttacaatgtagctacaacactgcccagttatgatgaaagcggagagggaccaaggctgaaagctactatcccttttggttcctggggagagatgaggattttgtgggtcgggatgattttgatgatgctgaccagctgaggataggaaatgatgggattttcatgttaacttttttcatggcattcctctttaactggattgggtttttcctgtcttttttgcctgaccacttcagctgcaggaaggtatggggccatttcagggat

SEQ ID NO: 4777 - DNA, 1044 bp, Homo sapiens
  SIMILAR (452)..(375): 451254mologous to Homo sapiens Human secreted protein fragment encoded from gene 42,accession number Y07785,Smith- Waterman Score=53.
atgatccaccctctgcaagctgaagatctggaaaagctgatggtgttatccaaaggccatgatgtcaattcccgcctggaatctgaagacctgaacacaaggagtgctgaggacaggaaaagatcaatgttccagctgaagccgcctggatcccatacctccaaggagaccacaagtcaggcatggagtagtgaggagtatgtgagtgagcgtggggtctgcaccctcagacatgccagctgctgctacaaggtgggcaactccagatgccagcatgggcagcggctctctgcgaggctgtggctggaccaggcacactacaagcagcttcccctggctggcaccaaggaatgtggtggtacccggaagcttggagatgccaggcactgcagggccccaaagagggagtcacagcagtccccaagggtcctcagctcttctctccttctccttgttcacaacgtagagagcaaggagcctgtctgcctcctgctgccatccatggcatccaggctgctcacaccaaggggcacctgcaggccagtgccaggctgtcttcagcaccccctcagtcttcctcctgtgcttgtgggcacccaaagtccttcccaggcccccaagagtgcaaagaggcccagtccacagccccaacttgggtggctacagctgcatcccggtggatcagggctctgcctgctcccagctcctgctggctccatggaatgtgcagccctggaatctgtcccctcgcagcttgggataggggctccaggtccttgctgggcccaggctggtgtccagggatggagcaatgttgccacgagctcccccagtggcccaagtgctcaggggcagcccagggctcccccttgcctggtttgtggccctgcccaatgtggcacctctgggagcagatcacgggccacaggcctcaggcccagctgtctggagtgtcaggtctggtggtcaccccaatgtggggcaaaccctggggacacaacctcctcccaagatgcaggaacccggtgctctaaagtagggtga

SEQ ID NO: 4778 - DNA, 487 bp, Homo sapiens
  SIMILAR (29)..(472): 641254mologous to Homo sapiens hepatocellular carcinoma- associated antigen 67,accession number AF243495,Smith-Waterman Score=483.
tcctgaattcccgagtcgacgatttcgtctggacggagcactcagaacattcttgaaggccttcccgctgatgggggagacacaagagcgtgggcgggtcctcacacacttctcccgccggtactgccagtgcaaacccctgatgacagcacttcggaagatgggatcccacacgctcacctgtgccctgatgctgctcaacacggacctgcacggccacgtgaacattggcaaaaagatgtcctgtcagcaattcattgccaacttggaccagctgaatgatggccaagactttgccaaagacctgctgaagaccctttacaactccatcaagaatgaaaagctggaatgggccattgatgaggatgagctgaggaaatccctgtctgagctggtggatgacaagttcgggacaggcacgaagaaggtgacgcgaatcctggatggtggcaaccccttcctggatgtcccacaggcgctcagtgcc

SEQ ID NO: 4779 - DNA, 760 bp, Homo sapiens
  SIMILAR (243)..(383): 341254mologous to Rattus norvegicus exchange factor for ARF6,accession number AB040468,Smith-Waterman Score=53.
tcggaattcctgggtcgacgatttcgtgtctagaggagtcccaggagcagccaggacaggcggaagcagtgtctgccatggaggaggacaagctcttatctgcagtgcctgaggaaggcgatgccacccgtgaccccggtccagagcctgaagaggagccaggggtccggaatgggatggccagttggatggcccggggagccagatgtgcgggatggcttcagcgccacgtttgagaagatctggagtcagagctgctgcggggcacccagtacagcagcctcgactcctagacgggctgagcctcacggatgagagcgacagctgcgtcagcttcgagcccccctcacacccctcatccagcagcgggcccgtgacagccctgagcaggggctggaacttcttgaaggccttcccgctgatgggggagacacaagagcgtgagcgggcctcacacacttctcccgccggtactgccagtgcaaccctgatgacagccttcggaagatgggatccacacctcacctgtgccctgatgctgctcaacacggacctgcacggccacgtgattggggaggtgacgggggaaacgaacagaacagataagcaacagaacagaacagagcaaagcaaacgacaagcaaacgcagacaagcacaacgaacacgcaaacaacgaacagcaacacgaacacgacaaagataacgacacacggacacgcgacaccgaaatgcgacacgcgaaacgcgacaacgcgtaa

SEQ ID NO: 4780 - DNA, 421 bp, Homo sapiens
  SIMILAR (120)..(25): 341254mologous to Vibrio alginolyticus uncB (AA 1- 129),accession number X16050,Smith-Waterman Score=65.
  misc_feature (1)...(421): n = a,t,c or g
ctgagagaatttttcttacataatttcagaatggtaaaggtctaagtataatataggacccagaagccatatgaatgaaagaataggtaaatttaatgacaaaaaaacttcccatggcaaaatgcacaatatgaaaagtcaaaaaacaaatgccaatctgagaaaaatatttgtaaatcatattacagaaaaaagttaatttcccaaatgtataaagaatannnnnnnnnnnnnnnnnnnnnnnnnnnnnnnnnnnnnnnnnnnnnnnnnnnnnnnnnnnnnnnnnnnnnnnnnnnnnnnnnnnnnnnnnnnnnnnnnnnnnnnnnnnnctccttgctattctcacgatagtgagatctcacaagatctggttgcttaaaagggtgtagcacctcttccttctctctcgaattccaccacg

SEQ ID NO: 4781 - DNA, 1851 bp, Homo sapiens
  SIMILAR (372)..(518): 301254mologous to Mus musculus Pro-Pol-dUTPase polyprotein,accession number Y12713,Smith-Waterman Score=42.
atatgcatgtttgcaattttggaagatcttaaaaacttgcctcctataggtgttgtaccagtatatacttctgccagtaatagatgggtgggctgctgatgcctcaaaatttccacaggctatacaggaagcatggctgaggaggcctcaggaaacttaacaatcatggcagaaggtgaaggggaagcaggcacatctacacatggccagagcaggaggaagagagagaaggaagaggtgctacacccttttaagcaaccagatcttgtgagatctcactatcgtgagaatagcaaggaggaaatctgcccccatgattcagtcacctcctgccagacccctcctccaacattagggattacaattcgacacgagattgccgcaagcatctgccacgtagcagatactgctggagtcgctggagatgcaatgatgagaaaaacagacttgatacctcccttcataggccttactctccagggaggaagaagtgcagatatgggaaaccagaaaaagtggagaaaggggagcgagaatctggccactctagtggccatggcatcagaaagattccactggcagtacagtggaaatagtacaatacagcccaaacagaaacagcatgggatgataaccagactcgtcacagcccccgtgtgcccaggattagttcagccttccctgtgtgcagtaggcctcagaaacatcatgtctctgagctctcacacttgtgcactccagaacacaaaacaggcatgggaaggttatgatgactgtcactcacagagagtatcgcaacctggagaaaacatgacaaaactgtcatttcttaaccttttaaaccagatgccctcctggggggaagggaagatggtgcctgccgatttctcaggaagctgctgggaaggtactggcacaggaagtccagctggatctcaggtcagctttctgaatcgccacaatgatggacagcttgctggagacagccctgggctccccccacccccgtgtccccggggactgcagggggcagagcagcgctcagctctacgtcgacacaaagctgatgttcatagagatcagtggcttgtcatttctttcagtaagaagttaagaaccagtgctagaaagtggtatgaagcagggcccttctcaggggttccccgagtgcttcctgctgctgctcagggtggcacagactttcccttctctccatcagaggagcctttccaacctagtccattctctatggtccaggcacatacagtcaggtcgaagccacagttccactttcctgcagcaggagagaattgtctgaataggtctgagctatccaggaatcaaggattgcaagcaagagtaggcccacttgccatcatgtccagtgacccatctggggactttgtgctttacacccccacaatactgggctttgtaggattagaggttctagtctctagagagggtacattcctgtggagatatagcacatgtcctgttgaactacaagttatggttgcctcctgggtacttaggactgctggtgcccaaagaccagaaggtgagagcagtcttccttggaatgtagcacagtgtactaaccaaatagctgtaatgtatgcattggccttatatgtaaaacgtttcaactctgctgaaactgtttctgcctatggcccagagcaccagctgctgcccagctcagatcaagtagtaactttgtctgtgtctggctcagccttgcttagattgcctttggaaagaatgctgtcctccatgagccctgctgggtcagccattttaccagcatctagatctccttctgagtgtgatgttagtgaggaagagtga

SEQ ID NO: 4782 - DNA, 1884 bp, Homo sapiens
  SIMILAR (1455)..(1505): 641254mologous to Homo sapiens bA145E8.1 (KIAA1074),accession number AL162272,Smith-Waterman Score=52.
atgtcagctcgaggctccaaggggacagagtttgaagtgaatgaagtttgtctgaagttccttctaaatgtgcacgaagcacaaggactgacgtgtcagctcgaggctccagggtttgctgcttgggaagggctgctcggggtccacacaggagctcctcacttcctgctggtgctgtgctgcactgttcccaaagtgatggagcaagagaatttggcctggtcctactgtgtgctgttgctgtgtgaccctaggcatgttgcttcacgtctctggggctcagtctccacctgcaaaatgagtcatgaccttccaagacgagaagcttcacggcaggcaatgaacagagacggcgtcatctccaaggctcagtggagcgagtcacgtcaccctcacttagctgcatggtgcactaggctctacaaagataagttagaaacagtccctgtggcagggaactcacaacttagtcttggagaacacaatcttgaacccagagaaagcatggcaaatgtctgcaaacacattcagggggtccgagggactgacgagggtagagacccggtgacatggaaccagccaggcagcaacctatgcctgcaagtgagtgtggagaagaaggaggtgcaggatctgccgcaaggaggggcgctcagcatcagtcttgtgaagtcatcagtgtgctccgctgtccatgtagcagcagttacaccagccaaagagagaaacaaagtcagggcatgtagactccacacagataaagcccctgtgccacggattctagggggacggggcaagaagcccagtgccaggactgccatcatctgcataggaaaccaggcaaaggcagtggtcctaagggagagtcagtctccacctgtgtgcatgggctctggaccagacagcagctcagggaacaccgtcagctgcgtgtctcctggagctgactggctggaggctggtcctccacccatgctggtctttgagctggccgatgctggtgatgtggaccttcaatacttgtatgaaccatccgtcacacaagtacaggtctcgagtcacagatctgtcagcctgggaaccggcccccaaatggaagacctaggcagttctgatgggtccatctgcaagggcctcctgcacaagcaacagtcgctgcttgctgttactgtgggctccacgttgggatcagacacacctgtcttcagtggcttgcagttgcagcaaggaccgaatgtgagtgaaagcactttgtgcctggaaatggacagaacattgaaatatgatgccccgaaaatcgtccagaagacaggatctccatctactgagcccacctggaagctgcagggtggagctctagtgtccaaccaggtccatctcccagagtgctcggcagggcagaggagcatgggcagcagtctggaagagcaaaagaaatcgggcacaaaattcctaaggagacatttgatgaacttacagcagagctggaaactatatcttcaaaaatgtctatatttggctaaaaagaatcaagttattcaacaggagttattatctatgaaagaagtacaacagaaatgtaaaaaacttgaggaggttaacaaaattttggaacaagaagtagtgaatcttaagacacatgaaaaaaatatggtagaatttggtgacgtagaagaatgtaaattgcagttggaagaaagagcaggacaggaaatagaaaaattagaagaaatcaatttacagcgagcctgccttagtgccaaaaaggtcagagcagaaggggagctggagccccgcagacatcacaatcacactcttggatttactgaaggcccatggggactcatgtctgtgattactggagcttatgatctaatcaggtga

SEQ ID NO: 4783 - DNA, 457 bp, Homo sapiens
  SIMILAR (108)..(164): 471254mologous to Homo sapiens Human secreted protein encoded by gene 152 clone HTLAD94,accession number W75004,Smith-Waterman Score=42.
ggcggtccttgctgcaactgcaagccactgaagacaggtgtgtctgatcccaacgtggagcccacagtaacagcaagcagcgactgttgcttgtgcaggaggccctgtgtgccacatgttgctcttcactactgatcagggctgtttacgtgggtcccacacagctgctctgtgactagggaacttgacgtctccatttttcaactgaaaacacagaagtacaaaggggttcaccaccttgtccacggttgccctgcttctaactggtcatgttggaataaaaacaagcaactgtcatccgggatattaaccacgcaggctgtggtgttgcaaagcagggggagcacggagcagggagcattaccaccctgcttgagatcagctcactcacaagtggcagggctagggctgcagtgcagctcacttatgggcactgtgtaagcctgaaagcaaagtc

SEQ ID NO: 4784 - DNA, 1893 bp, Homo sapiens
  SIMILAR (1476)..(1514): 761254mologous to Homo sapiens bA145E8.1 (KIAA1074),accession number AL162272,Smith-Waterman Score=48.
accctgaccgcccttatagaaggaagcaatacacaaaacaaagcaccatcaaccattatccagggccagtggatcgcttctcctcccacgccagccatccgagaaaggctcagctatgcatctgccccacacatcacagagcaagagtgtggttctggcgtgtctcctggagctgactggctggaggctggtcctccacccatgctggtctttgagctggccgatgctggtgatgtggaccttcaatacttgtatgaaccatccgtcacacaagtacaggtctcggccccagcggcaacagctcctgtggcttctccagccccagcacgcaatccggggcttcattatgagccaacccagagctgtggggaaaggagtcggggaaccacctggaggctgaaattcggatggagccctcagctctcaggcaccctccttcgtgaagccttcccaagtctccctgtggtttatcacacgcttatgtgtgttgatgtatcaggcacatattgcctaagaattcacggcctcctgcacaagcaacagtcgctgcttgctgttactgtgggctccacgttgggatcagacacacctgtcttcagtggcttgcagttgcagcaaggaccgaatgtgagtgaaagcactttgtgcctggaaatggacagaacattgaaatatgatgccccgaaaatcgtccagaagacagaagctattcagtcaacctgctactgtttcctggatgttatgtccagccgcacttctgtgtcagttcccctcagtcccagttccctcacaggtgacacagcaggctcagatgaatgccgtgtgtgcagcgtgaagcgtggagcttggagaaggcgctgtgcttacagcaagccagaagccagcctgctgtttgcctggaggatcatggggaggggtcaatgttacctcacctctcagagttatcagctggacctgagaaatgggccagctaagggacactcagggccttgcagttgtggcatgctcagcaagggacagggatctccatctactgagcccacctggaagctgcagggtggagctctagtgtccaaccaggtccatctcccagagtgctcggcagggcagaggagcatgggcagcagtctggaagagcaaaagaaatcgggcacaaaattcctaaggagacaccctgccagcaccccatgctacccacggcccactccaacagcacctcaatattacgcataccctgatcctacccacacctcacttctacccgtgccctgccccaccagcaccccactcctagtgtgtccggaattggttccttttggtgcgttcttggtctcgctgacttcaagaatgaagctattgacccttgcgttccacatttttgggtatctttacggcagcacaccaccctactggtaccaacttactgtgttagtccattttcatgctgctgataaagacatacctgagactggtttgatgaacttacagcagagctggaaactatatcttcaaaaatgtctatatttggctaaaaagaatcaagttattcaacaggagttattatctatgaaagaagtacaacagaaatgtaaaaaacttgaggaggttaacaaaattttggaacaagaagtagtgaatcttaagacacatgaaaaaaatatggtagaatttggtgacgtagaagaatgtaaattgcagttggaagaaagagcaggacaggaaatagaaaaattagaagaaatcaatttacagcgagcctgccttagtgccaaaaaggtcagagcagaaggggagctggagccccgcagacatcacaatcacactcttggatttactgaaggcccatggggactcatgtctgtgattactggagcttatgatctaatcaggtga

SEQ ID NO: 4785 - DNA, 753 bp, Homo sapiens
  SIMILAR (1)..(468): 841254mologous to Homo sapiens prohibitin,accession number S85655,Smith-Waterman Score=647.
atggctgccaaagtgtttgtgtccattggcaagtttggcctggccttagctgttgtaggaagcatgctgaactctgccttatataatgtggatgctggtcacagagctgtcatctttgaccgattctgtggagtacaggacattgtggtaggggaagggactcactttcctatcccatgggtacagaaaccaattatctttgactgccattctcgaccacttaatgtaccagtcatcactggtagcaaagacttacagaatgtcaacatcacactgcacatcctctcctggcctgtcgctagccagcttccttgcatcttcaccagcatcagagaggactatgatgagcgtgtgctgccatccatcactaccaagatcctcaagtcggtggtgtctcactttgatgctggagaactaatcacccagagagagctgctctccaggcaggagttcacagaagcagtggaagccaaagaggtggatcagcaggaagcagagagggccagatttgtggtggaaaaggctgagcagcagaaaatagcagccatcatctctgctgagggtgactccatggaagccaagctgatccccaactcactggccaccgcaggggacggcctgatcgagctgagcgtgctggaagctgcagaggacatcacataccagctctcagctctgagaacatcacctacctgcctcctccagctgtcccagtgggggcccaccctgcctgcacctctgcaggctgactag

SEQ ID NO: 4786 - DNA, 410 bp, Homo sapiens
  SIMILAR (273)..(410): 801254mologous to Mus musculus prohibitin or B-cell receptor associated protein (BAP) 32,accession number X78682,Smith-Waterman Score=188.
  misc_feature (1)...(410): n = a,t,c or g
caggatgggtctcttgtcaaaatcagnnnnnnnnnnnnnnnnnnnnnnnnnnnnnnnnnnnnnnnnnnnnntatgacctctnnnnnnnnnnnnnnnnnnnnnnnnnnnnnnnnnnnnnnnnnnnnnnnnnnnnnnnnnnnnnnnnnnnnnnnnnnnnnnnnnnnnnnnnnnnnnnnnnnnnnnnnnnnnnnnnnnnnnnnnnnnnnnnnnnnnnnnnnnnnntggagttcagagtggaaacaggtgtgagagggttcaacagaagaaaacatagctgccaagtgtttgagtccatcggcaagtttggactggccttatctgttgcagaaggcatggtgaactctgccttatataacatggatgctgggcacagaactgtcatctttgaccgattctgtggagtacaggac

SEQ ID NO: 4787 - DNA, 410 bp, Homo sapiens
  SIMILAR (273)..(410): 801254mologous to Mus musculus prohibitin or B-cell receptor associated protein (BAP) 32,accession number X78682,Smith-Waterman Score=186.
  misc_feature (1)...(410): n = a,t,c or g
caggatgggtctcttgtcaaaatcagannnnnnnnnnnnnnnnnnnnnnnnnnnnnnnnnnnnnnnnnnnntatgacctctnnnnnnnnnnnnnnnnnnnnnnnnnnnnnnnnnnnnnnnnnnnnnnnnnnnnnnnnnnnnnnnnnnnnnnnnnnnnnnnnnnnnnnnnnnnnnnnnnnnnnnnnnnnnnnnnnnnnnnnnnnnnnnnnnnnnnnnnnnnnntggagttcagagtggaaacaggtgtgagagggttcaacagaagaaaacatagctgccaagtgtttgagtccatcggcaagtttggactggccttacctgttgcagaaggcatggtgaactctgccttatataacatggatgctgggcacagaactgtcatctttgaccgattctgtggagtacaggac

SEQ ID NO: 4788 - DNA, 411 bp, Homo sapiens
  SIMILAR (273)..(410): 801254mologous to Mus musculus prohibitin or B-cell receptor associated protein (BAP) 32,accession number X78682,Smith-Waterman Score=188.
  misc_feature (1)...(411): n = a,t,c or g
caggatgggtctcttgtcaaaatcagannnnnnnnnnnnnnnnnnnnnnnnnnnnnnnnnnnnnnnnnnnntatgacctctnnnnnnnnnnnnnnnnnnnnnnnnnnnnnnnnnnnnnnnnnnnnnnnnnnnnnnnnnnnnnnnnnnnnnnnnnnnnnnnnnnnnnnnnnnnnnnnnnnnnnnnnnnnnnnnnnnnnnnnnnnnnnnnnnnnnnnnnnnnnntggagttcagagtggaaacaggtgtgagagggttcaacagaagaaaacatagctgccaagtgtttgagtccatcggcaagtttggactggccttatctgttgcagaaggcatggtgaactctgccttatataacatggatgctgggcacagaactgtcatctttgaccgattctgtggagtacaggacc

SEQ ID NO: 4789 - DNA, 1170 bp, Homo sapiens
  SIMILAR (360)..(629): 451254mologous to Homo sapiens prohibitin,accession number S85655,Smith-Waterman Score=144.
  misc_feature (1)...(1170): n = a,t,c or g
tgcgtgcgggcaattcgcacgagattcatgtggaggtcacgagtggaagcagttatcttggccccaggatgtcatccatctcctgcttccataagaagcatgtcgttcttaatacacgatgttgacaagcagtatggtgaggaggtgtgagaggtgttcagcagaaggaaacatgtgctttcaaagtgctagagtccattggcaagttgggccgtggccttatctgttgcaggaggcgcggagaactctgccttatataatgtggatgctgggcacagagctgtcatctttgaccgattccgtggagagcaggacattgtggtaggggaagggactcattttctcatcccgtgggtacagaaaccccaattatctttgactgccgttctcgaccacgtaactgtgccagtcatcactggtagcaaagatttacagaatgtcaacatcacactgcgcatcctctttccggcctgtcgccagccagcttcctcgcatcttcaccagcatcggagaggactatgatgagcgtgtgctgccgtccatcacaactggagaacctcaagtcagtggtggctccgtttgatgctggagaactaatcacccagagagagctggtctccaggcaggttgagcgacgacctttacagagcgagccgccacctttgggctcatcctggatgacgtgtccttgacacatctgaccttcgggaaggagttcacagaagcggtggaagccaaacaggtggctcaacaggaagcacagagggccagatttgtggtggaaaaggctgagcaacagaaaaaggcggccatcatctctgctgagggcgactccaaggcagctgagctgattgccaactcactggccactgcaggggatggcctgatcgagctgcgcaagctggaagctgcagaggacatcgcgtaccagctctcacgctctcggaacatcacctacctgcccancggggcagtccgtgctcctccagctgccccagtgaggggcccaccctgcctgcaccttccgcgggctgactgggcccacagccccggatgattcttaacaacagcctttcttttctgctcccaccccagaaaatcacttgtaaaatttcatgatttggccttaaagggaaggaaattaaagggtaaaattcacttcagatctct

SEQ ID NO: 4790 - DNA, 453 bp, Homo sapiens
  SIMILAR (302)..(216): 601254mologous to Homo sapiens Human secreted protein, SEQ ID NO: 5576,accession number G01495,Smith-Waterman Score=70.
  misc_feature (1)...(453): n = a,t,c or g
accagagggttgacccaaggaggacaattattttcttccccctccttgttatttcatatcattatttcctnnnnnnnnnnnnnnnnnnnnnnnnnnnnnnnnnnnnnnnnnnnnnnnnnnnnnnnnnnnnnnnnnnnnnnnnnnnnnnnnnnnnnnnnnnnnnnnnnnnnnnnnnnnnnnnnnnnnnnnnnngcagccactcccagagcccctggaactccggcccaaggctctctgactgactccttcccagatcttctcggcttagcggctgaagactgctgctcggttgcctcggaagccctgggctgtacttccgcaaggcttcacagacacacccccccacttcagtcaagcccaaatttcatcctcatctgttacctatctcagcataattctcgtaaaaacacacgtgctctgctctcccgaattccaccgcactggagtagtgat

SEQ ID NO: 4791 - DNA, 443 bp, Homo sapiens
  SIMILAR (341)..(303): 761254mologous to Homo sapiens calbindin D28K,accession number S46006,Smith-Waterman Score=45.
  misc_feature (1)...(443): n = a,t,c or g
ccctgtgagagttacctagagcatctgtgatggtcctgtaggcttctgaggcgattgggcagtgtcagtcttcagctgctaagctgagaagatctgggaaggagtcagtcagagagccttgggccagagttccaggggctctgggagtggctgccaggtgagttgaacagtctgattttcagtagggtccggatttgaaattggtgagatgtttcttgggctggtcagtctgaggacttgaggttgtaggtggatctttctcatggagtaaagatcaggaggacaggggattgatctcccaaaggaggtcccccgatctgagtcacggcaccaaatttcatgcatgtcccnnnnnnnnnnnnnnnnnnnnnnnnnnnnnnnnnnnnnnnnnnnnnnnnnnnnnnnnnnnnnnnnnnnnnnnnnnnnnnnnnnnnacgtgagaa

SEQ ID NO: 4792 - DNA, 263 bp, Homo sapiens
  SIMILAR (241)..(125): 561254mologous to Homo sapiens calbindin D28K,accession number S46006,Smith-Waterman Score=117.
catttttactcacgtcccctccactgtgagagttacccagagcatctgtgattgtcctgtaggcttccaaggcgattgggcagtgtcagtcttcagctgctaagccgagaagatctgggaaggagtcactcagagagccttgggccagagttccaggggatctggaagcggatgatttaaaattggtgagatgttccctggcctggtcggtctgaggaccagaggtcgtaggtggatctttcctcgtgccgaattcctgcagg

SEQ ID NO: 4793 - DNA, 741 bp, Homo sapiens
  SIMILAR (307)..(717): 661254mologous to Homo sapiens reverse transcriptase,accession number L27428,Smith-Waterman Score=471.
atgtctggccatctatgggggatagctcctgggagtctggaggtatatagggagaagctagcaattggcaaggccttgggaaacttggtacctaaactctcaggtggggagagactaacctgcatattggttggacagattaaagttgcaacaagagaagagatgtcagtctcagtagctatggagcatagaaaccaaaccaaaaacaagccacaggcgattcggcagtatcagtcttcagctgctaagccgagatctgggaaggagtcagtcagagagccttgggccagagttccaggggctctggaagtggctgccagatggactagagacttaaatgtaaaacccaaaactataaaagtcctggaagacaatctaggcaataccattcaagacacaggaactggcaaagatttcatgatgaagatggcaaaagcaattgcaacaaaagcaaaaattggcaagttggttctaattaaactaaggtgctactgcacagcaaagaaaactatcaacagagaaaacagacatcctatagaatgggaaaaaatatttgcaaactatgtatctgacaaaggtctaaaatctagcatctctaaggaacttaagcaagtttataagaaaaatacaaacaacaccattaaaaagtgggcaaaagacatgaacagacactttacaaaagaagatatagatgcagccaacaatcataggagaaaaaagctcaacatcactgatcattag

SEQ ID NO: 4794 - DNA, 526 bp, Homo sapiens
  SIMILAR (238)..(14): 681254mologous to Homo sapiens neutral protease large subunit,accession number M27826,Smith-Waterman Score=245.
tctgttggaattcgagttggggagttttaagaggtttagaagcctggccgtcaacacccacaacagttatgaaggcaaaggaaacaggcccttgaaaagaaggtaacgtggagtgggtagcctccgtattgattaagaaggggacaggcttaccttccgctgtgagagttacgcgaagctcggcgtccgtgaatggtctagggggcttccgaggcgatcgtgcagtgtcagtcttcagctgctaagccgagaagatctgggaaggagtcagtcagagagccttgggctagagttccaggggctctgggagtggctgccagatgaatcctctgtctggccggccccaggttgtctgcttctttactgcacacatgttgacaaagaaaagggaagaaggagcctccatgttgaacatgccttgcttccagtgaaaggaagagatgatccaagcaaatttaggaccaatagcagactcttcacactgcctggggatagagggaccaccctgggctcctcttactcctgg

SEQ ID NO: 4795 - DNA, 385 bp, Homo sapiens
  SIMILAR (248)..(271): 871254mologous to Homo sapiens hPMSR3,accession number U38979,Smith-Waterman Score=45.
caagagcagcagaaaatgaacacattgcaggggccagtgtcattcaaagatgtggctgtggatttcacccaggaggagtggcggcaactggaccctgatgagaagataacatacggggatgtgatgttggagaactacagccatctagtttccttggcttatgaggtggcaacatcttgtacttcggagattctgaagccgagcaacttgcccaagtccttcttcttttcccattaacaagatatgatatcaccaagccaaacgtcatcattaagttggagcagggagaggagctgtggataacgggaggtgaatttccatgtcaacatagtcctgggatcgtgggactttaccaagatcggttgtaataacacctcgaagacgg

SEQ ID NO: 4796 - DNA, 520 bp, Homo sapiens
  SIMILAR (520)..(185): 731254mologous to Homo sapiens Human gene 40-encoded protein fragment, SEQ ID NO:357,accession number Y86442,Smith-Waterman Score=429.
  misc_feature (1)...(520): n = a,t,c or g
acgttctgcattttatttctgcaggcaacacttttgctcaccagcaagaacacagcccgaggaagggacccaataacctttcaaaacgcaaactgctgcctgcggtgagggcccagggtcttccacggagaggacaggcatcttccttttccaccaggaaggagtgagcccggagcctctgctatgtgcaaggcggtgtgcaagcaccggctgcagctttttgctctcttctttctctttggggctgggctgggtgtgcgttctggtgctgatgctttggcctgtgagggtcggcaacttggacccgttcaattacagcaacgaagaagccaccgctaagcgtggtcttgggggaagcccggaggcagtgctcggcacccgggaacgtgctcaggcctcggtggggccgggcaggcagggcgggagctagcctgaaggcgcccgggttctgctgcagcgcatcttgtaccatgtcttcattctcctnctggcagagggagcacatggagtagacgagccg

SEQ ID NO: 4797 - DNA, 7011 bp, Homo sapiens
  SIMILAR (883)..(3861): 591254mologous to Rattus norvegicus integral membrane glycoprotein,accession number Z21513,Smith-Waterman Score=2756.
cgcttcctgcgcctcttcaggtcaccgcttgctctagttcccaggctttggcctctagtggatgagaatcaccgagtctgcggggctggacgctgaccgcccgggccagcacctaggcgggcgggagctgtgcggcccagggttcgcgcgggccgggtagaggctcgagccgggacccccgagcgtgaaccccggagccagcggcgctggggccagaggggccgggcgggaggtggtggcggaggcgaaggggcgacgggacctgggcctggcccgtgtgtgtcctcggcggcctggcgccggccgtcgctgtacggtgagccccagggaggcggatctgggccccgagaaggacacccgcctggatttgccccgtaggcccggcccgggcccctcgggagcagaacagccttggtgaggtggacaggaggggacttcgcgagcagacgcgcgcgccagcgacagcagcccgccccggcctctcgggagccgtggggcagaggctgcagagccccaggagggggccagtgtcattcaaagatgtggctgtggatttcacccaggaggagtggtggcaactggaccctgatgagaagataacatacggggatgtgatgttggagaactacagccatctagtttccctggcttatgaggtggcaacatcttgtacttcggagatctgaagccgagcaacttgcccaagtccttcttcttttcccattaacaagatatgatatcaccaagccaaacgtcatcattaagttggagcagggagaggagctgtggataacgggaggtgaatttccatgtcaacatagtccagcccttcacatcctcagccgaagatctcacttcctcccagaggcctttgctgactgacccctcagggattgtgggactttaccaaatcggtttgtaataacacctagaagacgctatccgatccatcaggcccagtattcctgtctgggggtacttcccaccgtgtgctggaatggttatcacaagaaggctgtgctgtcccctcgcaactccaggatggtgtgtagcccagtgactgtgaggatcgcccctcctgacagaagattttcgcgttctgcgataccagagcagataatcagctcaacactgtcctcaccatcaagtaacgccccagacccatgtgcaaaggagacagtactgagtgccctcaaagagaaggagaagaaaaggacagtggaggaagaagaccaaatattccttgatggccaggaaaataaaagaaggcgccatgatagcagtggcagtggacattcagcatttgagcccctggtggccaatggagtccccgcttcttttgtgcctaagcctgggtctctgaagagaggcctcaattctcagagctcagatgaccacttgaataagagatcccgaagctcttccatgagctccttgacaggcgcttacgcaagtggcatccctagctccagccgcaatgccattaccagttcctacagctccactcgaggcatctcacagctctggaagagaaatggccccagttcatcacccttctctagcccagcctcctcccgctcccagacaccggagaggccagcaaagaaaataagagaagaggagctgtgtcatcattccagttcttcaactccattggcagcagacagggagtcccagggagaaaaggctgcagatacaaccccaaggaagaaacaaaactcgaattctcagtctacacctggcagctctgggcagcgtaagcggaaagttcagctgctgccttctcggcgaggggaacagctgaccttgcctccacctccccagcttggctattcgatcactgccgaggacctagacttagagaagaaggcttcattacagtggttcaaccaggccttggaggacaagagcgatgctgcctcgaactctgtcactgagaccccacctatcactcagccttcatttacctttaccctgcctgctgctgcacctgcctccccacccacctccctcctggccccaagcaccaacccactgttagagagcttgaagaagatgcagactcccccgagcctgccaccctgcccagaatctgctggagcagcaaccactgaggccctctcacctccaaagacacccagcctcctacccccgctgggtttatcacagtcagggccgccagggctgctccccagcccctcctttgactccaaacccccgaccactttgctggggctgatccctgctccatccatggtaccagccactgacaccaaggcacctccaacccttcaggcagagacggctaccaaaccccaagccacatctgccccgtcccccgcccccaagcaaagcttcctgtttggaacacagaacacctcaccttccagccctgccgcccctgctgcatcttcagcacctcccatgttcaagcccattttcacggctccacccaagagtgagaaggaaggccccacaccgcctggcccttcagtcacagccacagcgccctccagctcctccctccccacgaccaccagcaccacagccccgaccttccagcctgtctttagcagcatggggccacctgcatctgtgcccttgcctgctcccttcttcaagcagacaactactcccgccactgctcccaccacaactgccccgctcttcactggcctggccagcgccacctctgctgtggctcccatcacctctgccagtccatccacagactctgcttcgaagcctgcgtttggctttggcataaacagtgtgagcagcagcagtgtgagtaccacgaccagcaccgccactgccgcctcacagcctttcctcttcggggcgccccaggcctctgctgccagcttcaccccggccatgggctccatattccagtttggcaaacctcctgccttgcccacaaccaccacagtcaccaccttcagccagtccctgcacactgccgtgccaacggccaccagcagcagcgctgccgactttagtggttttggcagcaccctcgccacctccgccccggccaccagcagccagcccactctgacgttcagtaacacgagcacccccacgttcaacattccctttggctcaagcgccaagtccccgctcccatcatatccgggagccaacccccagcccgcatttggggccgctgaggggcagccaccgggggccgccaagccggcccttgcccccagctttggcagctctttcacttttggaaactctgcagccccggctgctgcacccacacctgcacctccgtccatgatcaaggtcgtgcctgcgtacgtgcctacgcccatccatcctatctttggcggtgccacgcactcggcgtttgggttgaaagccacggcttcggccttcggcgctcccgccagctcacagcccgcctttggcggctccactgctgtcttcttcggtgcagccaccagctccggctttggagccaccacccagaccgccagcagcgggagcagcagctcggtgtttggcagcacaacaccatcacccttcacgtttgggggttcggcagcccccgctggcagtgggagctttgggatcaacgtggccaccccaggctccagcaccaccaccggagctttcagctttggagcaggacagagtgggagcacagccacctccacccccttcgcagggggcttaggtcagaacgccctgggcaccaccggccagagcacaccgtttgccttcaacgtgagcagcacaactgagagcaaacctgtgtttggaggcaccgccacccccacctttggtctgaacacccctgcgcctggagtgggcacatcaggcagcagcctctcctttggggcatcctcagcacccgcccaaggctttgttggtgttgcacctttcggcaacacttttgctcaccagcaagaacacagcccgaggaagggacccaataacctttcaaaacgcaaactgctgcctgcggtgagggcccagggtcctccacggagaggacaggcatcttcctttcccaccaggaaggagtgagcccggagcctctgctatgtgcaaggcggtgtgcaagcaccggctgcagctttttgctctcttctttctctttggggctgggctgggtgtgcgttctggtgctgatgctttggcctgtgaggctgagctagagaaatgtagatgttagatgtgccagtaccatcctgcgcctcccaagcatgcccccactcactcacgtcggcatctcgacccgttcaattacagcaacgaagaagccaccgctaagcgtggtcttgggggaagcccggaggcagtgctcggcacccgggaacgtgctcaggcctcggtggggccgggcaggcagggcgggagctagcctgcaagagaaacagccccaatgctgggtaagagagcagttcaccccatccccccctccacgaccctggcgcacgccctgtacctgaaggcgcccgggttctgctgcagcgcatcttgtaccatgtcttcattctcctcctggcagagggagcacatggagtagacgagccgctgcagggaagggaaagtgagcgcgtggcacagggctcgctgctggaaccctgccagggcatgcagacgcaccgggctaggtgtccctgccccgggctcctccagctgtctgctcggcatacctaaggaaaagcgtgtctcggttacacagcttcacaggctgcctcagtcctgaaatcctcgctcctgaaatcctcgcttcacagaggagaacttttgctccagggtcccaagcccattaaagtgtcagaactaagaccaaaacagatgactccaggtctaagctgctgtggacctctgagtccctcagccacgccttctcaccatctcacccgagccactgcaggaaggatccagcaggacatagtggacctcacgatagcgcggatctaagggggagaccgccaggaagtcctcctcagccagctcacagcaggagacgccagcccaggccagcagcgtggccatggatgccagccgcctggcatccaggtcaaaggcaaagatcttcctagggcagagggcagagcaggggtgagctgagcatgcatggagcagctaagggcctgtcacagctgacacagacaaccagaacatgcaggttaagccaggacacacaatattgaaacagcctatatttaaagggcccagggtcagaggtaactggcctggggtctctgccccaagggctaagggatccacatctcacacctgcagtggggaaagcttagcttggggcaaataccgtgaactactttggtgcagcaggaaagagttaagcgaaagtcatcctttcagccttcattacccactgaaaggcacaaaatcaaaccccatgtcctcctcctcctcctgtggcactcacccttggttcttcagaagagcagccaagtgactggtctttattgcctggggtggcacaggcatccatgacatgggagcctggcgggggtccagcagcatggctgggagacagctggcctggcaggcagaacacaggggccgggtaaacagagaccccaggctaggcccttcccgtgcctacacattcttcccttttctattcctcttgcctaccctgtcctgcagaatgaggtgtccggcccggtacagtgggtgttcatgcagatctgtctgggcgggaaacaccagcagctccggcatcaaggggtccaggagaaaatgcttccccttgagggctcgtaagtcatcgaggctgccagggaagaaccattcattcatcatttcctgaatttctccctgccaggccctatttcaacggtccattcatgcaacaaatgttaccacagctatggagaaatcaacagggtgataagggaatccgggatccgcagttgagggaatgggttgtcaagccagacttatgggtcaggagccccctctactgtttaccagcagtgggagcctgggcaagtgattcaatctcaagccccactggcatctctgtaaaatagtaggtgtgaggattcaatgagccaatatatccaagatacttacgtgccacaatttaataaatgttagctattcctgttgaagcataaccttggagaaaggttactttacaggggggtgaggagtggggaagtgagagctgagctcattcttgatggatgaggagttagtcatgtgaggcgcttaggttaaaactacattcactataactcagtaaagcagtcccgcccactctccgacccatgcagaaataggcctagagagtcacatgtctcagttcagaaatctatcgaagtggcagagctggaattcaaacacaagcagccgttctctgctattccaccctggtgtccaagcaacatggtagggcagaaggaagaggatcttacaaagagtaagggaaagggagaggggcagaggctgcttctcagagccaccaaaggacaaaataagacaggtgtgagcccagtggaggaggcacggggcagagaccagccactgttgctggcacgctggtgcacgtagcactgtggcagatggacctggagaggaagcaggagggacagcacaatggagccaagaaaggacttagcatggccgggcgcggtggttcatgcctgtaatcccagcattttgggaggccaaggtgggcagatcacctgaggtcaggagtttgagaccagcctggccaacatggagaaatcccgtctctactaaaaatacaaaattagccaggcatggtgctgcatgcctgcaatcctgtagggaaaagaaagagagatcagactgttactgtgtctgtgtagaaagggaagacataagaaattccattttgacctgtaccttgaacaattggttggctgagatgctgttaatttgtgactttgccccaaatttgagctcacaaaaacatgtgttgtatggaatcaaggtttaaaggatctagggctgtgcaggacatgccttgttaataaaacgtttacaagc

SEQ ID NO: 4798 - DNA, 197 bp, Homo sapiens
  SIMILAR (1)..(186): 601254mologous to Homo sapiens stromal antigen 3, (STAG3),accession number AJ007798,Smith-Waterman Score=187.
gtggcaaaatatccaaagaaagggtcccaagcggtacatcgtcatagccggaaacagtcagagccaccagccaatgatattttcaatgctgcgaaagctgccaaaagtgacatgcaggactggatggtttccatgatcgtggacagagagtacagtgtggcagtggaggccgtcagattactgatacttatccttaa

SEQ ID NO: 4799 - DNA, 431 bp, Homo sapiens
  SIMILAR (384)..(313): 1001254mologous to Homo sapiens DKFZp434A0131 protein,accession number BC002581,Smith-Waterman Score=119.
  misc_feature (1)...(431): n = a,t,c or g
gggaagcgctcaagtaatttaatatatggtatnnnnnnnnnnnnnnnnnnnnnnnnnnnnnnnnnnnnnnnnnnnnnnnnnnnnnnnnnnnnnnnnnnnnnnnnnnnnnnnnnnnnnnnnnnnnnnnnnnnnnnnnnnnnnnnnnnnnnnnnnnnnnnnnnnnnnnnnnnnnnnnnnnnnnnnnnnnnnnnnnnnnnnnnnnnnnnnnnnnnnnnnnnnnnnnnnnnnnnnnnnnnnnnnnnnnnnnnnnnnnnnnnnnnnnnnnnnnnnnnnnnnnnnnnnnnnnnnnnnnnnnnnnnnnnnnnnnnnnnngctctccacaaagaaggacagcagaagctggaagaaagtcctctgagcacctgggctctggcgttgctctctatccacccatcgttctgtcgggnncgtggctcgacccgggaaggcgt

SEQ ID NO: 4800 - DNA, 584 bp, Homo sapiens
  SIMILAR (102)..(296): 921254mologous to Homo sapiens hPMSR3,accession number U38979,Smith-Waterman Score=320.
ccgggagccgtggggcagaggctgcggagccccaggagggtgatttctgcctttgcaggccggagccctcatgacttcagtgacctgcttctgcccctctaggtctatcagccacagtctctgcatgtttccaagagcagcagaaaatgaacacattgcaggggccagtgtcattcaaagatgtggctgtggatttcacccaggaggagtggcggcaactggaccctgatgagaagataacatacggggatgtgatgttggagaactacagccatctagtttccttggcttatgaggtggcaacatcttgtacttcggagattctgaagccgagcaacttgcccaagtccttcttcttttcccattaacaagatatgatatcaccaagccaaacgtcatcattaagttggagcagggagaggagctgtggataacgggaggtgaatttccatgtcaacatagtcctggtaagttagtagagtatcaaatgttaaaaaatgctcatcccagacctttgggagtgactaaagagttgtttatatgtattcggtaccctcagtaacacctcccaacccccaaatatc

SEQ ID NO: 4801 - DNA, 372 bp, Homo sapiens
  SIMILAR (372)..(1): 991254mologous to Homo sapiens Human gene 40-encoded protein fragment, SEQ ID NO:356,accession number Y86441,Smith-Waterman Score=643.
gtacagtggttgttcatgcagatctgtctgggcgggaaacaccagcagctccggcatcaaggggtccaggagaaaatgcttccccttgagggctcgtaagtcatcgaggctggaagcccgaccctgataggagaaaccttgtctcttgaaataatcaactacatcatcggagcaggtcttgagagtgttcacacgcacaaatcgaggcagctgggaggctggaccaggcctggatcccacttccaacaggtcctcattccggctcacaccccgatgaaccttgagccgagccaactcagccttgagcctcgcctggtgccggcccaacagagccttccatcggcccccaccccctcgaaagccctttcccaa

SEQ ID NO: 4802 - DNA, 496 bp, Homo sapiens
  SIMILAR (495)..(313): 901254mologous to Homo sapiens stromal antigen 3, (STAG3),accession number AJ007798,Smith-Waterman Score=286.
aatacaatggggggaagcgcgttaaaccagggagtcctggaaggggacgacgcccccggccaggtgagggcccagacgtgggggcgtagacgctgaggggtggccgggtgggtctgcggctctgaggcctggctttcattctccatcagtccctgtacgagcggttaagtcagaggatgctggacatctcgggggaccggggcgtgctgaaggacgtcatccgagaaggagctggagacctagtggcgcctgatgcttcggtgctaggtacgccctggggcggtttgtccgcaggatccatgtcatcgcactcttgctctccacaaagaaggacagcagaagctggaagaaagtcctctgggcacctgggctctggcgttgctctcttccacccatcgttcttatctcgcactcagggtagaaaagtttccagtacagaaattcacccacagcagaggccaggcctcaattagaggcctacacaatggggtagacg

SEQ ID NO: 4803 - DNA, 3895 bp, Homo sapiens
  SIMILAR (2234)..(3892): 1001254mologous to Homo sapiens stromal antigen 3, (STAG3),accession number AJ007798,Smith-Waterman Score=2855.
  misc_feature (1)...(3895): n = a,t,c or g
gcaggacgcctgagagcttgaggccacacgaggctgtggagcggcgtgactcaaacgtggcgcgcatcagctcgcacacttccaaacctcgcgatagctactggccctgggcgagccgttgggattgcgcttgcgcacagcgtgtcttctggatcgccatacctaccctgtggtcctcatcttcctggcctcatagctcctcctcgccaagcatgtccaccccgttgcaaagagctgtgggagataccaagagggccttgtctgcatcttctagttcctctgccagtctaccctttgatgacagggactcaaaccatacctcagaggggaatggcgactctttgttagctgatgaagacactgactttgaagacagcttgaatcgcaatgtgaagaagagagcagcaaaacgaccaccgaaaacaacaccggtggcaaaacatccaaagaaagggtcccgagtggtacatcgtcatagccggaaacagtcagagccaccagccaatgatcttttcaatgctgtgaaagccgccaaaagtgacatgcagtctttggtagatgagtggctggatagctacaagcaagaccaggatgcaggatttctggagcttgttaactttttcatccaatcttgcggatgtaaaggcattgtgacccctgagatgttcaagaagatgtccaactcagagatcatccagcacctaacagagcagtttaatgaggactcgggggactaccctctcatagctccaggtccatcctggaagaagttccagggcagcttctgtgaatttgtgaggacattggtctgtcagtgccagtacagcctcctctatgatggcttccctatggacgacctcatctccctgctcactggcctctcagactcacaagtccgcgccttccgtcacactagcaccctggctgctatgaaactgatgacctccctggtaaaagttgccctccaactgagtgtgcaccaagataacaatcagcgtcagtatgaggctgaaagaaacaaggggccagggcagagggcacctgagcggctggagagcctgttggagaaacgcaaagagctccaagagcatcaagaggagattgaggggatgatgaatgccctcttcaggggtgtctttgttcatcggtacagggatgtccttcctgagatccgtgctatctgcattgaggaaattgggtgttggatgcaaagctacagcacgtctttcctcaccgacagctatttaaaatatattggttggactctgcatgataagcaccgagaagtccgcctgaagtgtgtgaaggccctgaaagggctgtacggtaaccgggacctgaccacacgcctggagctcttcaccagccgcttcaaggaccggatggtttccatggtcatggacagagagtacagtgtggcagtggaggccgtcagattactgatacttatacttaagaacatggaagggttgctgacggacgcggattgtgagagcgtctaccccgttgtgtatccttctaatcgaggcctggcttctgccgcaggcgaatttctgtactggaaacttttctaccctgagtgcgagataagaacgatgggtggaagagagcaacgccagagcccaggcgcccagaggactttcttccagcttctgctgtccttctttgtggagagcgagctccatgaccacgctgcttacttagtagacagtctgtgggactgtgcaggggctcggctgaaggactgggagggtctgacaagcctgctgctggagaaggaccagaacctgggtgatgtgcaggagagcacactgatagaaatccttgtgtccagtgcccggcaagcttcagaggggcacccgcctgtgggccgggtcactgggaggaagggcttaacctctaaggagcgcaagacccaagccgatgacagggtgaagttgactgagcacctcatccccctgctgccccagctcctggccaagttctcagctgatgcagagaaggtcactcccctgctccagcttctcagctgctttgacctccacatctactgcactgggcgcttggagaagcacctggagctgttcctgcagcaactccaggaggtggtggtgaagcatgcagagccagcggtgcttgaggctggggcgcatgccctctacctgctctgtaatcccgaattcactttcttcagccgggcgggacttttgcccgcaagccaagctagtagcatttgctgactgaccgcttccagcaggagcttgaagagctgttacagtcgtccttcctagatgaggatgaggtatataatctggcagccactctgaaacgcctctctgccttctacaacactcatgacctgactcgctgggagctctatgagccatgttgccaactcctgcagaaggctgtggacacaggagaggttcctcaccaggttatcctgccagccttgactcttgtctatttttccattctctggacactaacccacatttctaaatcagatgcttcccagaagcagctgtcgagtttgagggacagaatggtggccttctgtgaactctgccagagttgcctctcagatgtggatactgagatccaggagcaggcttttgtcttattaagtgatctacttctcatctttagccctcagatgatagttgggggccgtgatttccttaggccacttgtcttttttcctgaagctactctccagtctgagctagccagcttcctcatggaccacgtcttcatccagccgggagacctgggcagtggtgattcccaggaggatcatttacagatagagcggctacaccagcggcgccgcctcctagccgggttctgcaagctgttgctttatggggtgctggagatggatgcagcctcagatgttttcaaacactacaacaagttctacaatgactatggtgacattatcaaggaaacattaactagagcaaggcagattgaccgaagtcattgttcccgaatcctgctgctgagcctnaagcagctgtacacagaactgctgcaggagcatgggccccagggcctgaatgagcttcctgccttcatcgagatgagggacctggcccggaggtttgccttgagttttggaccccagcagctgcagaaccgtgacctcgtggtcatgctacacaaggaaggcatccagttctccttgtctgagcttcctccagctggctcctccaatcagcctccaaatctggcattcctggagctcctttcagagttttccccccgactcttccatcaggacaagcagcttttgctgtcctatctagaaaagtgcctgcagcatgtctcccaggcacctggccatccctggggcccagtcaccacctactgccactccctcagccctgtggagaacacagcagagaccagccctcaggtcctccccagctccaagaggaagcgcgttgaagggcctgccaagcctaacagagaggacgtctcctcgtcccaggaagaaagtctgcagctgaacagcatcccgcccacgcccaccctcacctccacagctgtgaagagcaggcagcccctgtgggggttgaaagagatggaggaagaagatggctcagagttggattttgcccaggggcagcccgtcgcaggcaccgagaggtcaaggttcttgggtccacaatatttccagactccacacaacccttcaggtcctggcctgggcaaccagctgatgcgactcagccttatggaagaggacgaggaagaagagttagaaatccaggatgagtcaaatgaagaacggcaggatacagacatgcaagcaagtagctactcttccaccagtgagcgcgggctggacctcttagattctacagagctggatattgaggatttctga

SEQ ID NO: 4804 - DNA, 639 bp, Homo sapiens
  SIMILAR (4)..(123): 651254mologous to Homo sapiens Human secreted protein, SEQ ID NO: 6619,accession number G02538,Smith-Waterman Score=147.
ttttttggtagagacagggtctcactatgttgcccaagctggtctcaaactcctgggctcaaaggatcctcccacctcagcctcccaaagtgttgggcttacaggcgtgaaccaccaaccccagcccacttgtaggtcctatgcacaacagccagagttatctctgtgtatgtcaccttgctctccacaaagaaggacagcagaagctggaagaaagtcctctgggcacctggggctctggcgttgctctcttccacccatcgttcttatctcgcactcagggtagaaaagtctggtgggaatggacacaagggaaagggctcagcacaggagggaaacaaggaggtgtaattgattgaccacagagggaggagatggcccaaggagatgataaaggaaaaggaggtgcagagctaaggaaagccccaaggagctgagagaggaaaagagacagcagagagacttccacggagatggggaggccttaagtagggcagcagcacatgtgggagagaaaccgagagggtggtgttaaagaaacgtaaaaggagccccactcactttcagtacagaaattcacccacagcagaggcgcaggcctcaattagaggccctacacatggggtagacgcctctaca

SEQ ID NO: 4805 - DNA, 3019 bp, Homo sapiens
  SIMILAR (155)..(3016): 941254mologous to Homo sapiens similar to KIAA0618 and nuclear envelope protein POM 121; similar to PID:g3327050 and P52591 (PID:g1709213),accession number AC006014,Smith-Waterman Score=4562.
atggtgtgtagcccagtgactgtgaggatcgcccctcctgacagaagattttcgcgttctgcgataccagagcagataatcagctcaacactgtcctcaccatcaagtaacgccccagacccatgtgcaaaggagacagtactgagtgccctcaaagagaaggagaagaaaaggacagtggaggaagaagaccaaatattcctttgatggccaggaaaataaaagaaggcgccatgatagcagtggcagtggacattcagcatttgagcccctggtggccaatggagtcaccgcttcttttgtgcctaagcctgggtctctgaagagaggcctcaattctcagagctcagatgaccacttgaataagagatcccgaagctcttccatgagctccttgacaggcgcttacgcaagtggcatccctagctccagccgcaatgccattaccagttcctacagctccacttcgaggcatctcacagctctggaagagaaatgggcccagttcattaaccttcttcttagcccagccttcttcccggtttccaagacaccggagaggccaagcaaaagaaaattaggagaagaggaactttgtcatcattccagttcttcaactccattggcagcagacagggagtcccagggagaaaaggctgcagatacaaccccaaggaagaaacaaaactcgaattctcagtctacacctggcagctctgggcagcgtaagcggaaagttcagctgctgccttctcggcgaggggaacagctgaccttgcctccacctccccagcttggctattcgatcactgccgaggacctagacttagagaagaaggcttcattacagtggttcaaccaggccttggaggacaagagcgatgctgcctcgaactctgtcactgagaccccacctatcactcagccttcatttacctttaccctgcctgctgctgcacctgcctccccacccacctccctcctggccccaagcaccaacccactgttagagagcttgaagaagatgcagactcccccgagcctgccaccctgcccagaatctgctggagcagcaaccactgaggccctctcacctccaaagacacccagcctcctacccccgctgggtttatcacagtcagggccgccagggctgctccccagcccctcctttgactccaaacccccgaccactttgctggggctgatccctgctccatccatggtaccagccactgacaccaaggcacctccaacccttcaggcagagacggctaccaaaccccaagccacatctgccccgtcccccgcccccaagcaaagcttcctgtttggaacacagaacacctcaccttccagccctgccgcccctgctgcatcttcagcacctcccatgttcaagcccattttcacggctccacccaagagtgagaaggaaggccccacaccgcctggcccttcagtcacagccacagcgccctccagctcctccctccccacgaccaccagcaccacagccccgaccttccagcctgtctttagcagcatggggccacctgcatctgtgcccttgcctgctcccttcttcaagcagacaactactcccgccactgctcccaccacaactgccccgctcttcactggcctggccagcgccacctctgctgtggctcccatcacctctgccagtccatccacagactctgcttcgaagcctgcgtttggctttggcataaacagtgtgagcagcagcagtgtgagtaccacgaccagcaccgccactgccgcctcacagcctttcctcttcggggcgccccaggcctctgctgccagcttcaccccggccatgggctccatattccagtttggcaaacctcctgccttgcccacaaccaccacagtcaccaccttcagccagtccctgcacactgccgtgccaacggccaccagcagcagcgctgccgactttagtggttttggcagcaccctcgccacctccgccccggccaccagcagccagcccactctgacgttcagtaacacgagcacccccacgttcaacattccctttggctcaagcgccaagtccccgctcccatcatatccgggagccaacccccagcccgcatttggggccgctgaggggcagccaccgggggccgccaagccggcccttgcccccagctttggcagctctttcacttttggaaactctgcagccccggccccggctactgcacccacacctgcacctgcgtccacgatcaagatcgtgcctgcgcacgtgcctacgcccatccagcctacctttggcggtgccacgcactcggcgtttggattgaaagccacggcttccgccttcggcgctcccgccagctcacagcccgcctttggcggctccactgctgtcttctccttcggtgcagccaccagctccggctttggagccaccacccagaccgccagcagcgggagcagcagctcggtgtttggcagcacaacaccatcacccttcacgtttgggggttcggcagcccccgctggcagtgggagctttgggatcaacgtggccaccccaggctccagcgccaccaccggagctttcagctttggagcaggacagagtgggagcacagccacctccacccccttcacagggggcttaggtcagaacgccctgggcaccaccggccagagcacaccgtttgccttcaacgtgggcagcacaactgagagcaaacctgtgtttggaggcaccgccacccccacctttggtcagaacacccctgcgcctggagtgggcacatcgggcagcagcctctcctttggggcatcttcagcacccgcccaaggctttgttggtgttgcacctttcggcaacacttttgctcaccagcaagaacacagcccgaggaagggacccaataacctttcaaaacgcaaactgctgcctgcggtgagggcccagggtcctccacggagaggacaggcatcttcctttcccaccaggaaggagtga

SEQ ID NO: 4806 - DNA, 1668 bp, Homo sapiens
  SIMILAR (189)..(782): 751254mologous to Homo sapiens stromal antigen 3, (STAG3),accession number AJ007798,Smith-Waterman Score=732.
tagcgtgaattccttgctttggttgcgccatgccgatgtaccagacaagaagacaagaaaatgatttgaggacagcttctatcgcggtgtgaagaagaaagcagcaggacgaccactgaaaacaacgccggtggcaaaatatccaaagaaagggtcccaagcggtacatcgtcatagccggaaacagtcagagccaccagccaatgatattttcaatgctgcgaaagctgccaaaagtgacatgcagggatgtccttcctgagatccgtgctatctgcattgaggaaattgggtgttggatgcaaagctacagcacgtctttcctcaccgacagctatttaaaatatattgggtggactctgcatgataagcaccgagaagtccgcgtgaagtgcgtgaaggctctgaaagggctgtacggtaaccgggacctgaccgcacgcctggagctcttcactggccgcttcaaggactggatggtttccatgatcatggacagagagtacagtgtggcagtggaggccgtcaagattactgatacttatccttaaagaacatggaaggggtgctgatggacgtggactgtgagagcgtctaccccatttgtgtaggcctctaattgagccctggcctctgctgtgggtgaatttctgtactggaaacttttctaccctgagtgcgagataagaacgatgggtggaagagagcaacgccagagcccaggtgcccagaggactttcttccagcttctgctgtccttctttgtggagagcaagtctcattttgtcacccagggtggaggcagtgggcagttctcggctcaccgaaacctttgcctcccgggctcaggcaattttcatgtctcagcctcccgagtagctgggattgcgggtgcacccccccacacctggctgatttatgtatttttttcgtaaaaacggggttttcccgtgttggccgggctggtctcgagctcctgacctcgggtgatccgcccgcctcggcctcccaaagtgctgggcttacaggcgtgagccaccaaccccagcccacttgtaggtcctatgcacaacagccagagttctctctgtgtatgtcaccttgctctccacaaagaaggacagcagaagctggaagaaagtcctctgggcgcctgggctctggcgttgctctcttccacccatcgttcttatctcgcactcagggtagaaaagtttaaggataagtatcagtaatctgacggcctccactgccacactgtactctctgtccacgatcatggaaaccatccagtccttgaagcggccagtgaagagctccaggcgtgcggtcaggtccccggtaccgtacagccctttcagagccttcacgcacttcacgcggacttctcggtgctggtgaggagggaaaaccaagagaatggaaataagaccaaccacactctactcgcccctactgagcgtccagactcccctctccgatccctcattctagcttgggtgtcccctctactgaggactctgagatgtcagaaacaatgaacagctgtcttcatacttaaaaaaaaaaaaggatcacagcagtactcatgatgagaaggatcctttggctgccccttagcacctgcattaccatccatcaataaatctcttccattggaaagtcaaa

SEQ ID NO: 4807 - DNA, 1752 bp, Homo sapiens
  SIMILAR (592)..(774): 951254mologous to Homo sapiens stromal antigen 3, (STAG3),accession number AJ007798,Smith-Waterman Score=283.
atggtccaggcactgaaatacaccaggggacaaaatgaagtccccactctcatgcaccagagagtgcaaacaggggagtgtccagacacaaacaaggggcgtctatcagccacagtctctgcatgtttccaagagcaacaggaaatgaacacattgcaggaccctttgtctgcctttgacatccgttacttcgaaactgatattttctccatggagtctctcttttcttggcttttaaaaagattcatctttgtagataatgagcattttattaatacctatcttagtgggaaggggccagtgtcattcaaagatgtggctgtggatttcacccaggaggagtggcggcaactggaccctgatgagaagataacatacggggatgtgatgttggagaactacagccatctagtttccttggggccacctgagcgaggggtatggccagctgtgcagcatctacctgaaactgctaagaaccaagatggagtaccacaccaaagatccttggtgctgtaccagcctcatgcaagctattcaggtgctatcgtggcctctaaggacctccagagagagattgtggagagcggcaggcaccgagaagtccgcgtgaagtgcgtgaaggctctgaaagggctgtacggtaaccgggacctgaccgcacgcctggagctcttcactggccgcttcaaggactggatggtttccatgatcatggacagagagtacagtgtggcagtggaggccgtcagattactgatacttatccttaaacttttctaccctgagtgcgagataagaacgatgggtggaagagagcaacgccagagcccaggtgcccagaggactttcttccagcttctgctgccttcttttggagagcaagtccagtgcctggtgaatagcaggccctcaaccataaaagaatgcttgctttttgaaaaacagcaggctaccagccttgatgacttacaagccctcaaggggaagcattttctcctggactccttgatgccggagctgctggtgtttcccgcccagacagatctgcatgaacacccactgtaccgggccggacacctcattctgcaggacaggcggctggcatccatggccacgctgctggcctgggttggcgtctcctgctgtgagctggctgaggaggacttcctggcggtctcccccttagatccgcgctatcgtgaggtccactatgtcctgctggatccttcctgcagtggctcgggtgagatgcggctcgtctactccatgtgctccctctgccaggaggagaatgaagacatggtaccagatgcgctgcagcagaacccgggcgccttcaggctagtcccgccctcctgcccgccccaccgaggcctgagcacgttcccgggtgccgagcactgctccgggcttcccccaagaccacgcttaggtggcttcttcgttgctgtaattgaacgggtcgagatgccgacgcctgggtctctgaagagaggcctcaattctcagagctcagatgaccacttgaataagagatcccgaagctcttccatgagctccttgacaggcgcttacacaagtggcatccctagctccagccgcaatgccattaccagttcctacagctccactcgaggcatctcacagatcacctcctctccacggtcacatccatttccagctgcatcgagcaactggagaaaagctggagccagtatctggcctgcccagaagtcgtcatatgagtga

SEQ ID NO: 4808 - DNA, 1422 bp, Homo sapiens
  SIMILAR (1180)..(1317): 501254mologous to Homo sapiens Human gene 40-encoded protein fragment, SEQ ID NO:357,accession number Y86442,Smith-Waterman Score=86.
ggaattcagtatcttggatatattggctcattgaatcctcacacctactattttacagagatgccagtggggcttgagattgaatcacttgcccaggctcccactgctggtaaacagtagagggggctcctgacccataagtctggcttgacaacccattccctcaactgcggatcccggatttccctaacaccccggtggatttcccaaaaccggtggaaccattggtggcatgaatggaccgttgaaatagggcctggcagggagaaattcaggaaatgatgaatgaatggttcttccctggcagcctcgatgacttacgagccctcaaggggaagcattttctcctggaccccttgatgccggagctgctggtgtttcccgcccagacagatctgcatgaacacccactgtaccgggccggacacctcattctgcaggacagggccacctgtctcccagccatgctgctggaccccccgccaggctcccatgtcatcgatgcctgtgccgccccaggcaataaagaccagtcacttgggctgctcttctgaagaaccaagggaagatcttttgccttttgacctggatgcaaagcgggctggcattcatggcccacgctgctggcctggggttggcgtctcctgctgtgagctggctgaggaggacttcctgggcggtctcccccttagaatccgcgctatcgtgaggtccactatgtcctgctggattccttcctgcagtggctcgggtgagatggtgagaaaggcgtggctgagggactcggaggtccacagcagcttagacctggagtcatctgttttggtcttagttctgacactttaatgggcttgggaccctggagcaaaagttctcctctgtgaggcaaggatttcaggagcgaggatttcaggactgaggcagcctgtgaagctgtgtaaaccgagacacgcttttccttaggtatgccgagcagacagctggaggatcccggggcagggacacctagcccggtgcgtctgcatgccctggcagggttccagcagcgagccctgtgccacgcgctcactttcccttccctgcagcggctcgtctactccatgtgctccctctgccaggaggagaatgaagacatggtaccagatgcgctgcagcagaacccgggcgccttcaggctagctcccgccctgcctgcccggccccaccgaggcctgagcacgttcccgggtgccgagcactgcctccgggctttcccccaagaccacgcttagggttggcttcttcgttgctgtaattgaacgggtcgagatgccgacgttgaattgaagttggggggcatgctttggggaggcgcagggatggtactgggacattctaacatctacacttctctagctcaggctcacaggccaaagcatcagc

SEQ ID NO: 4809 - DNA, 1883 bp, Homo sapiens
  SIMILAR (639)..(860): 931254mologous to Homo sapiens stromal antigen 3, (STAG3),accession number AJ007798,Smith-Waterman Score=375.
ccgaacgctcgcagcagggtcagaagggaggtggtcgccctccgtcgtggtctggcgtgtattccgagcgttggtgtctggcggtttccgagcgttggtgtctggcggtttctgaccgttggtgtctggcggtttccgaccgttggtgtctggcacgcgccaccctctcttgctttggttgcgccatgccgatgtaccagacaagaagacaagaaaatgatttgaggacagcttcaatcgcggtgtgaagaagaaagcagcaaaacgaccactgaaaacaacgccggtggcaaaatatccaaagaaagggtcccaagcggtacatcgtcatagccggaaacagtcagagccaccagccaatgatattttcaatgctgcgaaagctgccaaaagtgacatgcagcaccgagaagtccgcgtgaagtgcgtgaaggctctgaaagggctgtacggtaaccgggacctgaccgcacgccttgagctcttcactggccgcttcaaggactggatgggtttccatgatcatggacagagagtacagtgtggcagtggaggccgtcagattactgatacttatccttaagaacatggaaggggtgctgatggacgtggactgtgagagcgtctaccccattgtacttttctaccctgagtgcgagataagaacgatgggtggaagagagcaacgccagagcccaggtgcccagaggactttcttccagcttctgctgtccttctttgtggagagcaagctccacgaccacgctgcttacttagtagacaacctgtgggactgtgcagggactcagctgaaggactgggagggtctgacaagcctgctgctggagaaggaccagagcacgtgccacatggagccagggccagggaccttccacctcctagggtgaaaccaggagagattgcttgcttcacttgtacaaggcaggaacggtggcatggggtgggggaaacttggagttggaaggtggctaatctttgattctatgtttttgatcctcctggcactccagacctgggtgatgtgcaggagagcacactgatagaaatccttgtgtccagtgcccagcaactcctgcctcagcctcccgagcagctgggactacaggcatgtgacactatgcctggctaattttttttgttatttttaagtagagacggggttttgccatgttggcccaggcaggtggatcacttgaggccagaatttgagaccagcctggccaacatggcgaaaccctgtgtcactcttttagacccttctgagtgtttgcaggttgagtgttcacagggtgttagcctattgagctttcttttgtggttcttatgcaggtgatttctgcctttgcaggccggagccctcatgacttcagtgacctgcttctgcccctctaggtctatcagccacagtctctgcaagtttccaaagagcagcagaaaatgaacacattgcaggggccagtgtcattcaaagatgtggctgtggatttcacccaggaggagtggcagcaactggaccctgatgagaagatagcatacggggatgtgatgttggagaactacagccatctagtttctgtggggtatgattatcaccaagccaaacgtcatcattggagtggaggtgaaggaagtggagcagggagaggagccgtggataatggaaggtgaatttccatgtcaacatagtccaggtaagttagtagattatcacatgttaaaaaacactcatccccgacctttgggagtgactaaagagttgtttatatgtactcggtaccctcagtaacacctcccaacccccaaatatcactttccttcccacacacataccacatacatgaactcttttgttgattttacat

SEQ ID NO: 4810 - DNA, 2361 bp, Homo sapiens
  SIMILAR (1498)..(1989): 681254mologous to Homo sapiens bA77C3.2 (Signal regulatory protein (SIRP-beta 1)),accession number AL138804,Smith-Waterman Score=566.
atgacatgccacacagggagcccgttagaaggagctcctagagaaagggctcaagttagcaggtggttcaaaggaactgaaacagggcaggaactaatctacagttcaaaaggaggccactttcccaagatagcttgcatttcagacatcacaaagagaaacaatacagacttttccatgtgcatcactagcatcacaagagccaacactggcacctacaactgtgtgaagttctggaaagggggccctgacatggagcttaaatctggaccaggcactgagttgtctgtgcatagtgagtacagtgtgggcctccttcgtcccccagttcagaacacccctgacattcagacctcgagcctgactggaaaacaggtacacagcagcccctgtgggtgttgtggggatgggagcaggtctcaggtcactgggttgaccttccggaggggagtattgctgcctgtgctgcacagaagggttcgcacatggaatggcctccccaagtcggttcctgcgctggttggagttagagccttcccccattgcctggactttcagggtccctggtgggggtgtctatccccaaggcagtctctcccttcctctcactctggggactcgcagcccttgcctgactcacagtgtaggcggcagcctcctgcttccttcaaaaggtcttatctgaatacagtagtgaatgaaataggtgtttcattcacgaacaaaagtcctttcctgctgctgactctcctgctaggactcacaggagtggcaggtgaggagctgcaggtgattcagcctgaggcatttgtgtcagttgcagctggagagatggccactctgaactgcactgtgacctccctgctccctgtgggacccatccagtggttcagaggagcttgtccaggccagaaattaatctatagtccaaaaagatgccactctccccgggtaacaactatttcagaccagagaaagagaaacagcacagactattccatccgcatcagtagcatcaccctcgaagatgctggcacctactactgtatgaagctccggagagcaattcctgccaacgtggagattaagtctggaccagggactcagatgtctgtgcgtggtgagtacagtgtaggcctccttcatcccccaagtgctacgaagtcggagccatttgctgtcccttttacagatgaagacattgaggctcagagagggaacctgagtggtgaacaggtctcctcctgggctccaaggtgctgctgctggttgatgtctctgctgcctatgtccaccggaagcagaaggcctgactccctgaaatccctgcccctgggctttcagggattccagacaaacacaagtgctcccaaggatgaggccaagaggggcattgtttctgcatcaaaagccctggggaaattcatggccaacatgagtggtgaagagactccaacaggcatgaaagaagttggcaaaatttttatagagaagaggaatgagctctcaggcttccagatcaacgtggaccctgcaggagaaagtatgccctatagcacctgcagcacagccaggatggtgctggcctctggagacctttgccttcaggtcatctgcgaggtggcccacatcactttacagggggaccctctttgtgggactgaaaacttgtctgaaaccattcaagttccacccttcttggaggttactcaacagcccataaaggcagggaaccaggtgaacgtcacctgccagaacctacagctgacctggttggagaacagaaatgtgtcccagatagaaacagcctccatcctcattgagaacatggaaggcacctacgactggacaagctggctcctggtgaacatatctgcccacagggatgatgtgctcacctaccagatggcgcatgatgggcagctggtggtcagcaaaagccttgccctagaggtctcagcccaccaggagcagagctcagaggccacccttgtaggagagcctggcaccgggagatggggtgactggaaagaaggagcctctttccctggtttctgccttgggttggatccagggcatccagggaaggactcagattcaaaagttttggagccttgttgggcccaggtagctttggatgggagtaatgctgagaagccccagataggcaactctgaaagctgttcccactctgatcctctgagtgcctgcgtggaagggatgcgggaaagggcgccaggactcaggaggagggctgagctggcacagtcctatctcagagctgcctgtccaaccaccacagacatctcaggaggagatcagcaccgggaacataacaggctctccggaaacatttcctga

SEQ ID NO: 4811 - DNA, 1004 bp, Homo sapiens
  SIMILAR (64)..(555): 691254mologous to Homo sapiens SIRP-b2,accession number AB042624,Smith-Waterman Score=568.
atgagtggtgaagagactccaacaggcatgaaagaagttggcaaaatttttatagagaagaggaatgagctctcaggcttccagatcaacgtggaccctgcaggagaaagtatgccctatagcacctgcagcacagccaggatggtgctggcctctggagacctttgccttcaggtcatctgcgaggtggcccacatcactttacagggggaccctctttgtgggactgaaaacttgtctgaaaccattcaagttccacccttcttggaggttactcaacagcccataaaggcagggaaccaggtgaacgtcacctgccagaacctacagctgacctggttggagaacagaaatgtgtcccagatagaaacagcctccatcctcattgagaacatggaaggcacctacgactggacaagctggctcctggtgaacatatctgcccacagggatgatgtgctcacctaccagatggcgcatgatgggcagctggtggtcagcaaaagccttgccctagaggtctcagcccaccaggagcagagctcagaggccacccttgcccatctggacagcccctgccacttcctctgctaccaggactcacagcaatttcagataagcacaagcactgccaaggaaggtcaaggactggacattgtccaagagcagaagatcagggagctgagcactttctctgtggatctgcagctggctaccagaggcatcaaacctttgctccgttattggatcactaagcttgcgggagttatttatatcctactgctcaagggcatcgccaaggtctgatttttcacacaaaaaaacttgcaacctccggcataaatgggttaattaaggttagtgtagaagttaataaaatagaggctacaaaaataacacaggaaaatcaaaagttagttctttaaaaagagtttttaaaaagataaatctttagctcgatgaattccaacgctctcagtagggtctcagtgggccctcgcgcc

SEQ ID NO: 4812 - DNA, 313 bp, Homo sapiens
  SIMILAR (49)..(153): 911254mologous to Homo sapiens hair type II basic keratin,accession number X81420,Smith-Waterman Score=175.
atgccccacactccccgatgcctcttcaggccccaggcgtcctgcttggtgcacttcctggagcagcagaacaagctgctggagacaaagctgcagttcttccagaaccgtgagtgctgcaagagcaacctggagcctctgtttgagggctacaactctgcgacgggaggccgagtgcatggaagccaacagtgggaggctggcctcagagctcaaccacgtgcaggaggtgctggagggttacaagaagaagtatgaagaagaggtggcactaaaggccactgctgaaaatgaatttgtggccttgaagaag

SEQ ID NO: 4813 - DNA, 479 bp, Homo sapiens
  SIMILAR (300)..(157): 321254mologous to Homo sapiens Human secreted protein, SEQ ID NO: 7460,accession number G03379,Smith-Waterman Score=65.
  misc_feature (1)...(479): n = a,t,c or g
aggggttcccccagggtgcccaaactgagaccacgtcagntgnctcgcgaaacggccagcgnggcgaatgacggaagaaactcgcattgtctactggatcaaggacagacagctcaccaaccgtgacagcaccatactggaacttcaaaaagttctgaaaacatgttgaagaccttactgctgatagcaccatcttcaaatttgtggaagcttattagttcggtgtagcactgtttgcggcgaggagaaaggaaggagaggagaaaactgcactggatcaaggaggtcttcccataggcctgcagtagggctgtttaccattggaagcaagggaaagaggaggagatcaatctagaagcatggagatctgcctgcatgtctgctgcagggcttaagatcactggaagcaaagaaacaaagaggagattgctcctgatcagtatagactgggtgtattgccaagagatgcaagaggagag

SEQ ID NO: 4814 - DNA, 666 bp, Homo sapiens
  SIMILAR (176)..(9): 731254mologous to Homo sapiens peptidylprolyl isomerase,accession number X52851,Smith-Waterman Score=209.
ggcacgagtggaagaattctgtgaaagcaggaacccttataactaaattatttctctccagtgctcagagcatgaaaattttctgctgtctttggaactttgtctacaaacagttagaagatgcagcccaagggctcaccatgggtggcgatgttgaagaacatggtgagtttgactgtggctggtggcagaggtctctgtgtgtcagcggcatctgcaaagcagcccaatcttaagtattttgttataacagcacatacagactaagacaacttccttgaccaaactttaattgggctcatctgagcattctgcttaaccaggggcatgaccttggtctgccatttaggcaaggaatcctgctaagttattttagagagaatctccgcaccttttatatctaattacctttgatatctgatcaagtttcttattccccacccttgatgtctaagtccttggcttccctctaccaagaatcctattagacaattttagcaagaatccccctacccttgatatctccttttgttaattctctatccactgaccttttcattcttctcattggcaatacatctatagctatctttgctgaatttggagtaagtgcaatctctctcccctcttgtaatagtcttgaataaagtcttccttaccatttca

SEQ ID NO: 4815 - DNA, 766 bp, Homo sapiens
  SIMILAR (630)..(592): 691254mologous to Bos taurus cyclophilin I,accession number AF228021,Smith-Waterman Score=49.
atgagctctggcgaaggaaagaggacatggctgggatccttatggggtggtgtacgagtacccgtgccccccccgatctgtgggctgagggtggcggtgactagcgctgggaccagctccttctctctcgctcccaagcccacaagaattcggggagaaaggggaaagggacagggaagaggctgtcgggaaatggcggccgcggccgggctggggcttcagcgggaggcagcagaggggaagtggtcagcgtggcgaatgacggaaggtggcgagggagaggaagaggggtcgggtgtccgcggagctccaagagggaagacaatcgctttgccaaacacggcagggcatctggaaaggcctgggaacctcacccgccctcccaggcccttcgggctcttttcggtcccattaggaggagggggagggcggcagaaactcgcattgtctactggatcaaggacagacagctcaccaaccgtgacagcaccatactggaacttcaaaaagttctgaaaacatgttgtgctcagagcatgaaaattttctgctgtctttggaactttgtctacaaacagttataagatgcaggcccaagggctcaccatgggtggcgatgttgaagaacatgaagaccttactgctgatagcaccatcttcaaatttgtggaagcttatgtgagttggataggaaaatttcctacatataatgttggctcttccatttgtttctaatttagtatttctcaattgatattttttttgt

SEQ ID NO: 4816 - DNA, 468 bp, Homo sapiens
  SIMILAR (115)..(132): 831254mologous to Drosophila hydei testis-specific RNA,accession number X58114,Smith-Waterman Score=36.
  misc_feature (1)...(468): n = a,t,c or g
gaattccagccatgnnnnnnnnnnnnnnnnnnnnnnnnnnnnnnnnnnnnnnnnnnnnnnnnnnnnnnnnggtgcatgagggtgttcgggcagtgggaacagccagtacagaggccctgtgggggcacatgcctgctgctacgggannnnnnnnnnnnnnnnnnnnnnnnnnnnnnnnnnnnnnnnnnnnnnnnnnnnnnannnnnnnnnnnnnnnnnnnnnnnnnnnnnnnnnnnnnnnnnnnnnnnnnnnnnnnnttaaaagagnnnnnanaannnnnnnnnnnnnnnnnnnnnnnnnnnnnntnnnnnnnnnnnnnnccccagganaaanaccaccccctttttttaaccaaaagagggggccncccccccttttcctttttttatttnnnnnnnnnnnntgcgatatttttgttttgttttgtgttttnttnnccaaaggggagggggngggagctgcgacccg

SEQ ID NO: 4817 - DNA, 1315 bp, Homo sapiens
  SIMILAR (331)..(996): 241254mologous to Homo sapiens trichohyalin,accession number L09190,Smith-Waterman Score=173.
atggctttcaggaagaagattattactgctggatgcatcgatcatgttttgtctgtatctgatagccagcagatgcaagcaaacctaacccaaagaacagaagcagaaatcagaaagcagacacagattgccccaacatttcctgctcattctctgccagataaatacctggggtttgctctattaaatcggaagataattggcactttcctcgtcttcaacatgtgtaaacgaaaccatgaagataagaatgaagcatttacagtgttgagagaaaaaaaagtcttcaatctagaattctgtaccctgcaaaattattcttcagaagtgaaggagaaagaaagacaaagattctcagacaaacaaacattgagggaatttgctaccagaaaacctgccttgaaagaaatgttaaaagttcttcagagatataaagagaggaagcacattagaaaaagaaacgttaaatacagcgccgaccacaccaccgaccacaccgcgaatcaggcagacccaaaccagcaggagccccatgtgccgggccatgctcctgacaataagaccataagacaaaaacaaaaccaacataaggacaatacaacacgcaaacacaaccagatgacgtccgacacatcacgaaccaacacaaaagtaagcgggcagccacgaggcaaacagacaagaagacgacacgagagacaacagaaagcaagagaacgaggacagcacagacaaaaacagacgcacagacgcgagagcatacacagcgccaacgacaagccagagcagaagaaccaggtaatagagaacaaacgagaagagaagagaacgtcagagcgaaccaacgatagcacgcgacgagagggcacgcgccgcccgaggcgaacagaaaaaggagagaggcaagaggaaggagacagggccacggccacacaccgcaaggaccacgacaggcaacagccacacggggctcctcactgttcccgtagcagcaggcatggtgcccccacagggcctctgtactgctgttccccactgcccggaacaccctcatgcaccatctgcactgtccaatacggccgcctctggccacacatggctactgagcagttgaacatggctggtccaaaccaagatttccaagacgtcgtatggtaaaaaataacataaaatcttgcaaaaatgtttctattgattatcttaaaattatgatgttttaggtatattaggttaaatcagctattttatcaaaatgaatctcacctgtttgtttttgctttttttttttgttttttttgtttttgagatggagtct

SEQ ID NO: 4818 - DNA, 1582 bp, Homo sapiens
  SIMILAR (542)..(1171): 601254mologous to Homo sapiens Human brain-specific transmembrane glycoprotein,accession number B09968,Smith-Waterman Score=672.
  misc_feature (1)...(1582): n = a,t,c or g
atggcccccgcgctcctgctgctgctgctggccagtggagcggccgcctgcccgctgccctgcgtctgccagaacctgtccgagtcgctcagcaccctctgtgcccaccgaggcctgctgtttgtgccgcccaacgtggaccggcgcacagtggagctgcggctggctgacaacttcatccaggccctggggccccctgacttccgcaacatgacgggactggtggacctgacactgtctcgcaatgccatcacccgcattggggcccgcgcctttggggacctcgagagcctgcgttccctccaccttgacggcaaccaagctggtggagctgggcacccgngagccctccggggccccgtcaatctgcagcacctcatcctcagcggcaaccagctgggccgcatcgcgccgggagccttcgacgacttcctagagagcctggaggacctggacctgtcctacaacaacctccggcaggtgccctgggccggcatcggcgccatgcctgccctgcacaccctcaacctggaccataaccttattgacgcactgcccccaggcgccttgcgcccagctcggtcagctctcccgcctggacctcacctccaaccgcctggccacgctggctccggacccgcttttctctcgtgggcgtgatgcagaggcctctcccgcccccctggtgctgagctttagcgggaaccccctgcactgcaactgtgagctgctgtggctgcggcggctggcgcggccggacgacctggaaacgtgcgcctccccgcccggcctggccggccgctacttctgggcagtgcccgagggcgagttctcctgtgagccgcccctcattgcccgccacacgcagcgcctctgggtgctggaaggccagcgggccacgctgcggtgccgggccctgggtgaccccgcgcctaccatgcactgggtcggtcctgacgaccggttggttggcaactcctcccgagcccgggctttccccaacgggaccttagagattggggtgaccggcgctggggacgctgggggctacacctgcatcgccaccaaccctgctggtgaggccacagcccgagtagaactgcgggtgctggccttgccccatggtgggaacagcagtgccgaggggggccgcccgggccctcggacatcgccgcctccgctcgcactgctgccgaggtacaacagcagcgaagatgagaccctcatctaccggattgtcccagcctccagccaccacttcctgctgaagcacctcgtccccggcgctgactatgacctctgcctgctggccttgtcaccggccgctgggccctctgacctcacggccaccaggctgctgggctgtgcccatttctccacgctgccggcctcgcccctgtgccacgccctgcaggcccacgtgctgggcgggaccctgaccgtggccgtggggggtgtgctggtggctgccttactggtcttcactgtggccttgctggttcggggccggggggccggaaatggccgcctccccctcaagctcagccacgtccagtcccagaccaatgcccgtctctattaa

SEQ ID NO: 4819 - DNA, 403 bp, Homo sapiens
  SIMILAR (2)..(403): 1001254mologous to Homo sapiens WD repeat protein WDR3,accession number AF083217,Smith-Waterman Score=692.
attctttgtacctggtgatagacaggtagtcataggaactaagacagggaagctgcagctttatgacttggcttcagggaatctgctggagacaatagatgcacatgatggagctttgtggtccatgtccctctctccagatcagcgtggctttgtgacaggtggtgcagataaatctgtcaaattctgggattttgagttagtgaaagatgaaaatagtacccaaaagagactttctgtgaagcaaacccgaactttgcaactagatgaagatgttctgtgtgtcagttactctcccaatcaaaagctattggctgtgtctttgctggactgtactgtgaaaattttctacgttgatactttaaagttttttctgtcactgtatggacacaaactgcctgtt

SEQ ID NO: 4820 - DNA, 594 bp, Homo sapiens
  SIMILAR (351)..(97): 541254mologous to Homo sapiens dJ776P7.1 (Novel protein),accession number AL121993,Smith-Waterman Score=173.
  misc_feature (1)...(594): n = a,t,c or g
ggccancccgggaanccaagaangcactnaaaagatngccaggtccacaaantctggtgaatgggggatatgatgtatagtaaggncccgttttcccctggcatccatattccaaggaccaaaaggaggaaagtcaatctgttctggtgatatggcagaaaacagctggtggaggctggtccacatggtggattttgtccttcagtcctgagacagaaaaggtggtaaaaaaacccatgttgacaccctttgaaacgaaatgtgggatgtaacaaaataaacagccttcaaaattccctcttgtacttgacatcaacaacatccgtagagtttcttcaggaagtcggagtcccaggtgattgtattcgctggtcagggtgtgaaaatacactaatacatactccttcacagcaatgtgatccattacatgaatgaaatataagagagccttgtccatatctattaatgttacaggaatgtttcttccaactaccaccatcactgttcgaccacagttatcaacacctgtttggtataaggcttttagagaagcaatatcagacagatcctcagatcttgcttgacataaccagc

SEQ ID NO: 4821 - DNA, 651 bp, Homo sapiens
  SIMILAR (8)..(649): 901254mologous to Homo sapiens dJ776P7.2 (WD repeat domain 3),accession number AL121993,Smith-Waterman Score=978.
ggaattcattaaacagtgggatgcagacaaatttgaacacatacagactctggagggtcatcaccaggaaatatggtgtttggctgtaagccccagtggagactatgttgtatcatcgtcccatgacaaatctctgagactttgggagagaacaagggagcctcttattcttgaggaagaaagggagatggaaagagaagcagaatatgaggagagtgtggccaaagaagaccaaccagccagttccaggagagattcaaggtgacagattactttacttgaaagaaaactattgaaacagttaaaagcagctgagaggattatggaggcttttgagttgtaccgagaagaaactgcaaaaatgaaggaacacaaagccatttgtaaagctgcagggaaagaggttccacttcccagcaaccccatcctaatggcttatggcagtatctcaccttcagcttatgtattagagatttttaaagggatcaagtcgagtgagctggaagaatctctacttgtgctgcctttctcttatgtcccagacattcttaaactctttaacgaattcattcagctgggctctgatgttgaacttatatgccggtgcctcttcttcctccttaggattcactttggacagatcactagcaa

SEQ ID NO: 4822 - DNA, 1160 bp, Homo sapiens
  SIMILAR (1)..(567): 711254mologous to Homo sapiens dJ776P7.2 (WD repeat domain 3),accession number AL121993,Smith-Waterman Score=666.
atggggctcaccaagcagtacctacgctatgttgctagtgcggtctttggcgttatcggcagccaaaaaggtaatattgtctttgtgacacttcgtggtgagaaaggacgttatgtggcagtaccagcttgtgaacacgttttcatctgggacttaaggaaaggagagaaggggcttaaacaagaagttacttgcttatgcccctccccagatgggctacacttagctgttgggtatgaggatgggtcgatccgaatcttcagtctcctgagtggggaaggaaatgtgaccttcaatggtcacaaagcagctatcactaccttgaagtatgatcagctaggaggcagactggcatctgggtccaagaacaacctggtggaattgtattcactgaatccatccttgcctactcctcagcctgtcaggacaagcagaatcactattgggggtcatcgcagtgatgtgcggactttgtcattcagctcagacaatattgctgttctttcagctgcagctgattccattaaaatatggaacaggtctacactgcagtgtattcgcacaatgacctgtgaatatgcactttgctcattctttgtacctggtgatagacaggtagtcataggaacaaagcccccaaaacgatgtttccaagatgcactgaaggcctggaccgtggcaacagacctgccacacattcctaaacgagtcttcggtcaggggagggtgacggagggttccacacaccgaacacacggtcatatcatcctcaggccagcccgtgcacacgcacggactcacctcagcctccacgaggctcccagccgattggacccgcccacaagacctgccccttccgggtccgttccggaagcctcttccgccagaggttccctttgccttctaggaggaaatgacggagaaagccgggcgctgattggctggtctgatcaatgtaagcattttgaaagacagatcagcactaaagatctaaaaaaattagctctcaacgtgaatcatgctctcttatatttcattcatgtaatggatcacattgctgtgaaggagtatgtattagtgtattttcacaccctgaccagcgaatacaatcacctggactccgacttcctgaagaaactctacgatgttgttgatgtcaa

SEQ ID NO: 4823 - DNA, 2616 bp, Homo sapiens
  SIMILAR (1249)..(2022): 631254mologous to Homo sapiens dJ776P7.2 (WD repeat domain 3),accession number AL121993,Smith-Waterman Score=776.
atggggctcaccaagcagtacctacgctatgttgctagtgcggtctttggcgttatcggcagccaaaaaggtaatattgtctttgtgacacttcgtggtgagaaaggacgttatgtggcagtaccagcttgtgaacacgttttcatctgggacttaaggaaaggagagaaggggcttaaacaagaagttacttgcttatgcccctccccagatgggctacacttagctgttgggtatgaggatgggtcgatccgaatcttcagtctcctgagtggggaaggaaatgtgaccttcaatggtcacaaagcagctatcactaccttgaagtatgatcagctaggaggcagactggcatctgggtccaagcgtggctttgtgacaggtggtgcagataaatctgtcaaattctgggattttgagttagtgaaagatgaaaatagtacccaaaagagactttctgtgaagcaaacccgaactttgcaactagatgaagatgttctgtgtgtcagttactctcccaatcaaaagctattggctgtgtctttgctggactgtactgtgaaaattttctacgttgatactttaaagagacggcgtccccgacaacgcctcgggaaagaacctaaccaacatgcgaggaagtggcgccaggctcgttcttcaagagaaaattttggtggtccaatccgggcgggggccggcacggatcaggttcttggaagaaggcggccaaccaatatttccggcgaccctaagcaggagcgcgccgagtacggagagtcaaagtcccaggagactggagtgaccagctgcaaatgctctgggctgaaaaacaccggtttccgctcctggccagagctcaccaaacagcgcccggtgtcaacatggttttttaccaccttttctgtctcaggactgaaggacaaaatccaccatgtggacagcctccaccagctgttttctgccatatcaccagaacagattgactttcctccttttgtccttgaatatgatgccaggatcagcactaaagatctaaaaaaattagctctcaacgtgaatcatgctctcttatatttcattcatgtaatggatcacattgctgtgaaggagtatgtattagtgtattttcacactctgaccagcgaatacaatcacctgtactccgactttctgaagaaactctacgatgttgttgatgtcaatgtgatgtacctacagtttgtacccaagtctcacctcttcttcactgccggaaaagatcataagattaaacagtgggatgcagacaaatttgaacacatacagactctggagggtcatcaccaggaaatatggtgtttggctgtaagccccagtggagactatgttgtatcatcgtcccatgaccaatctctgagactttgggagagaacaagggagcctcttattcttgaggaagaaagggagatggaaagagaagcagaatatgaggagagtgtggccaaagaagaccaaccagcagttccaggagagactcaaggtgacagttactttactggaaagaaaactattgaaacagtgaaagcaattgaagacccggaagaaccagaccccaagaaaatcaaaggatcttctcctggaatacaagatactcttgaggcagaggatggtgcctttgagacggatgaagcccctgaggatgtaattcattttcatttcttaagtttaattgtgttgaataatgggaaacgaatcctttcatgcagaaaagctggttccataatgcgggaaggaagagacagagttgtaaaccttgcagtcgacaagacaggcaggattcttgcttgccatggaactgactctgtgctagaattgttttgtatcctttccaaaaaggaaattcagaagaaaatggataagaagatgaagaaagctagaaagaaagcaaaattacattctagccaaggagaggaggaagatcctgaggttaatgttgaaatgagtctgcaagatgaaatccagcgggtgactgaatataaaaacttctgccaaaatcaaaacaacctggtggaattgtattcactgaatccatccttgcctactcctcagcctgtcaggacaagcagaatcactattgggggtcatcgcagtgatgtgcggactttgtcattcagctcagacaatattgctgttctttcagctgcagctgattccattaaaatatggaacaggtctacactgcagtgtattcgcacaatgacctgtgaatatgcactttgctcattctttgtacctgtgatagacagttataatcgctggttatgtcaagcaagatctgaggatctgtctgatattgcttctctaaaagccttataccaaacaggtgttgataactgtggtcgaacagtgatggtggtagttggaagaaacattcctgtaacattaatagatatggacaagactcgtttaggaatgtgtggcaggtctgttgccacggtccaggccttcagtgcatcttggaaacatcgttttgggggctgtaggttaggaagcggagatcatggggtctcggaagaaggtttggtcgtgaactgtcagaaaggaggcgaaagctgtgcacgtggaacaaagtga

SEQ ID NO: 4824 - DNA, 676 bp, Homo sapiens
  SIMILAR (36)..(104): 341254mologous to Homo sapiens polybromo-1,accession number AF225871,Smith-Waterman Score=46.
tcccggagtgtacaggacgcacgctgaggtccgcgagccagcaacatgataccttttatattttggcgtgtgaactgaattcactggccgacgatgcacaacgctagtgacgtgcccaaactcatgcctctacccacctgatttaccttggcgcccagttatgcaggcaaagaagaaagagcttgccaggagagacgatatcgaggacggagacagcatgatctcttcagccacctctgatactggtagtgccaaaagaaaaagtaaaaagaacataagaaagcagcgaatgaaaatcttattcaatgttgttcttgaagctcgagagccaggttcaggcagaagactttgtgacctatttatggttaaaccatccaaaaaggactatcctgattattatataatcatcttggagccaatggacttgaaaataattgagcataacatccgcaatgacaaatatgctggtgaagagggaatgatagaagacatgaagctgatgttccggaatgccaggcactataatgaggagggctcccaggtttataatgatgcacatatcctggagaagttactcaaggagaaaaggaaagagctgggcccactgcctgatgatgatgacatggcttctcccaaactcaagctgagtaaggcagcctcacacttcattatttag

SEQ ID NO: 4825 - DNA, 425 bp, Homo sapiens
  SIMILAR (36)..(425): 441254mologous to Caenorhabditis elegans C54G7.2 gene product,accession number U40410,Smith-Waterman Score=287.
ttgttcagaagctcttagtttgtgggctgtccttgttatttcacttgaccatctgtacaacattacctgtggagtacaacattgatgagcattttcaagctacagcttcgtggccaacaaagattatctatctgtatatctctcttttggctgccagacccaaatactattttgcatggacgctagctgatgccattaataatgctgcaggctttggtttcagagggtatgacgaaaatggagcagctcgctgggacttaatttccaatttgagaattcaacaaatagagatgtcaacaagtttcaagatgtttcttgataattggaatattcagacagctctttggctcaaaagggtgtgttatgaacgaacctccttcagtccaactatccagacgttcattctctctgccatttggcacggg

SEQ ID NO: 4826 - DNA, 1117 bp, Homo sapiens
  SIMILAR (317)..(655): 471254mologous to Homo sapiens dJ434O11.1 (novel protein),accession number AL355139,Smith-Waterman Score=275.
ctttgtagtgtgccaactctttgccttgctagcagccatttggtttcgaacttatctacattcaagcaaaactagctcttttataagacatgtagttgctacccttttgggcctttatcttgcacttttttgctttggatggtatgccttacactttcttgtacaaagtggaatttcctactgtatcatgatcatcataggagtggagaacatgcacaattactgctttgtgtttgctctgggatacctcacagtgtgccaagttactcgagtctatatctttgactatggacaatattctgctgatttttcaggcccaatgatgatcattactcagaagatcactagtttggcttgcgaaattcatgatgggatgtttcggaaggatgaagaactgacttcctcacagagggatttagctgtaaggcgcatgccaagcttactggagtatttgagttacaactgtaacttcatggggatcctggcaggcccactttgctcttacaaagactacattactttcattgaaggcagatcataccatatcacacaatctggtgaaaatggaaaagaagagacacagtatgaaagaacagagccatctccaaatactgcggttgttcagaagctcttagtttgtgggctggccttgttatttcacttgaccatctgtacaacattacctgtggagtacaacattgatgagcattttcaagctacagcttcgtggccaacaaagattatctatctgtatatctctcttttggctgccagacccaaatactattttgcatggacgctagggacggcacccaggaaatggtctccctgtcctgggccacaatgcatccagctccgcgctgctgacccatcaggaccagagcccctgctaatgctaagctcacaagaaaggcagccaaaggcaaagccccccaaagaggcccatgctgacatcgccggtacccctcgggaaggagagaagaccaggacagggggcccaggaaaagccttcctcagggatccaggagccagctcctctgtggagctctctcgcactcagctctgggtcctcactcctcctcctattgccaaggccccttgtgaatgcctccaataa

SEQ ID NO: 4827 - DNA, 932 bp, Homo sapiens
  SIMILAR (4)..(228): 351254mologous to Homo sapiens Gag protein,accession number AF164612,Smith-Waterman Score=161.
atggaaaatatggtcaccctattcagggtggtggaagaacactgtccttgctttcctgaaaagggaacgttagatgtggaactatgggatcgtgttggtgtaagattccaggaactggtcccgacaggaaattatgttcctgtcaccgtttggggtgatttggccttgtgcgtgcaaccatggaatggaagactggaggaacccatggtggccaaccatgggcccggtccctctggtatgggccatgagccagctgagcctgagtgcaaaaatggacagaaggcgaactggagtcatgatgacatcaacccctataacctgggggacactcgagaaaaccatgcaggaagctgagaaactactggagcgtcaaggccagacaaaaacccctgattccatgttcttggccatggaggaaaggtccaattcaagaaacaatatggaaagcagcactgctgttcacaaacggtagtatccgggtaggaacactctctaataccagtactgctactcaacacagtcttaatgttacatttgtaaagaatatcaccactcaatttatggtttgtggttttaatccttatgtctttttggcagctaaggcggaccagctccaggtggtagtcagccacaccacaactgccagccaggaaagggtaagggcgcagggctgcctgctgccccctcagtgccagtgtcctctgcccagaaaggtcaaatcggcagagcagggtgcggaaagcaccctgaggaaagcaggatccctagtttccaggcttccctgccagagagagactggaaagaccatagaaggaaagtttctcctttcacagggggaaggatacagggagacagcgcagaagttggagagcagcatcgaaatgtttctggcctatgtggcttgcaccatccgattcccggcagtgttataa

SEQ ID NO: 4828 - DNA, 180 bp, Homo sapiens
  SIMILAR (131)..(15): 411254mologous to Nicotiana tabacum lipid transfer protein,accession number D13952,Smith-Waterman Score=60.
atgattcaattatctcctactgggtccctcccacaacacatgggaattatgggagctacagttcaagatgagatttggtgtgcagatgataataacgaagcatgtggcaatgctacagcagttatagtcacatggatccgggacatactagaaagaaacatgtcactgatccatgggcct

SEQ ID NO: 4829 - DNA, 261 bp, Homo sapiens
  SIMILAR (118)..(222): 601254mologous to Homo sapiens Human secreted protein encoded by gene 81,accession number Y00337,Smith-Waterman Score=128.
gtgcggactaggggctttttccacttgagccaggtgccaacgggatatgagggtgcagggcagaataagagcccagcgttggcttcctggaagacccaaattcactggcgagagcttcatcagatgaccaccgagagtggcaaaagagtctgggcagctgatttggtttggctgtgtccccacccaaatctcgtcttgaattgtagctcccataattcccacgggttgtgggagggtcccagtgggagataattgaatcat

SEQ ID NO: 4830 - DNA, 5058 bp, Homo sapiens
  SIMILAR (2221)..(5058): 991254mologous to Homo sapiens alpha-5 type IV collagen,accession number M58526,Smith-Waterman Score=5360.
atgaaactgcgtggagtcagcctggctgccggcttgttcttactggccctgagtctttgggggcagcctgcagaggctgcggcttgctatgggtgttctccaggatcaaagtgtgactgcagtggcataaaaggggaaaagggagagagagggtttccaggtttggaaggacacccaggattgcctggatttccaggtccagaagggcctccggggcctcggggacaaaagggtgatgatggaattccagggccaccaggaccaaaaggaatcagaggtcctcctggacttcctggatttccagggacaccaggtcttcctggaatgccaggccacgatggggccccaggacctcaaggtattcccggatgcaatggaaccaagggagaacgtggatttccaggcagtcccggttttcctggtttacagggtcctccaggaccccctgggatcccaggtatgaagggtgaaccaggtagtataattatgtcatcactgccaggaccaaagggtaatccaggatatccaggtcctcctggaatacaaggcctacctggtcccactggtataccagggccaattggtcccccaggaccaccaggtttgatgggccctcctggtccaccaggacttccaggacctaaggggaatatgggcttaaatttccagggacccaaaggtgaaaaaggtgagcaaggtcttcagggcccacctgggccacctgggcagatcagtgaacagaaaagaccaattgatgtagagtttcagaaaggagatcagggacttcctggtgaccgagggcctcctggacctccagggatacgtggtcctccaggtcccccaggtggtgagaaaggtgagaagggtgagcaaggagagccaggcaaaagaggtaaaccaggcaaagatggagaaaatggccaaccaggaattcctggtttgcctggtgatcctggttaccctggtgaacccggaagggatggtgaaaagggccaaaaaggtgacactggcccacctggacctcctggacttgtaattcctagacctgggactggtataactataggagaaaaaggaaacattgggttgcctgggttgcctggagaaaaaggagagcgaggatttcctggaatacagggtccacctggccttcctggacctccaggggctgcagttatgggtcctcctggccctcctggatttcctggagaaaggggtcagaaaggtgatgaaggaccacctggaatttccattcctggacctcctggacttgacggacagcctggggctcctgggcttccagggcctcctggccctgctggccctcacattcctcctagtgatgagatatgtgaaccaggccctccaggccccccaggatctccaggtgataaaggactccaaggagaacaaggagtgaaaggtgacaaaggtgacacttgcttcaactgcattggaactggtatttcagggcctccaggtcaacctggtttgccaggtctcccaggtcctccaggatctcttggtttccctggacagaaaggggaaaaaggacaagctggtgcaactggtcccaaaggattaccaggcattccaggagctccaggtgctccaggctttcctggatctaaaggtgaacctggtgatatcctcacttttccaggaatgaagggtgacaaaggagagttgggttcccctggagctccagggcttcctggtttacctggcactcctggacaggatggattgccagggcttcctggcccgaaaggagagcctggtggaattacttttaagggtgaaagaggtccccctgggaacccaggtttaccaggcctcccagggaatatagggcctatgggtccccctggtttcggccctccagggcccagtaggtgaaaaaggcatacaaggtgtggcaggaaatccaggccagccaggaataccaggtcctaaaggggatccaggtcagactataacccagccggggaagcctggcttccgtggtaacccaggcagagatggtgatgtaggtcttccaggtgaccctggacttccagggcaaccaggcttgccagggatacctggtagcaaaggagaaccaggtatccctggaattgggcttcctggaccacctggtcccaaaggctttcctgggaattccaggacctccaggagcacctgggacacctggaagaattggtctagaaggccctcctgggccacccggctttccaggaccaaagggttgaaccaggatttgcattacctgggccacctgggccaccaggacttccaggtttcaaaggagcacttggtccaaaaggtgatcgtggtttcccaggacctccgggtcctccaggacgcactggcttagatgggctccctggaccaaaaggtgatgttggaccaaatggacaacctggaccaatgggacctcctgggctgccaggaataggtgttcagggaccaccaggaccaccagggattcctgggccaataggtcaacctggtttacatggaataccaggagagaagggggatccaggacctcctggacttgatgttccaggacccccaggtgaaagaggcagtccagggatccccggagcacctggtcctataggacctccaggatcaccagggcttccaggaaaagcaggtcggtctggatttccaggtaccaaaggtgaaatgggtatgatgggacctccaggcccaccaggacctttgggaattcctggcaggagtggtgtacctggtcttaaaggtgatgatggcttgcagggtcagccaggacttcctggccctacaggagaaaaaggtagtaaaggagagcctggccttccaggccctcctggaccaatggatccaaatcttctgggctcaaaaggagagaagggggaacctggcttaccaggtatacctggagtttcagggccaaaaggttatcagggtttgcctggagacccagggcaacctggactgagtggacaacctggattaccaggaccaccaggtcccaaaggtaaccctggtctccctggacagccaggtcttataggacctcctggacttaaaggaaccatcggtgatatgggttttccagggcctcagggtgtggaagggcctcctggaccttctggagttcctggacaacctggctccccaggattacctggacagaaaggcgacaaaggtgatcctggtatttcaagcattggtcttccaggtcttcctggtccaaagggtgagcctggtctgcctggatacccagggaaccctggtatcaaaggttctgtgggagatcctggtttgcccggattaccaggaacccctggagcaaaaggacaaccaggccttcctggattcccaggaaccccaggccctcctggaccaaaaggtattagtggccctcctgggaaccccggccttccaggagaacctggtcctgtaggtggtggaggtcatcctgggcaaccagggcctccaggcgaaaaaggcaaacccggtcaagatggtattcctggaccagctggacagaagggtgaaccaggtcaaccaggctttggaaacccaggaccccctggacttccaggactttctggccaaaagggtgatggaggattacctgggattccaggaaatcctggccttccaggtccaaagggcgaaccaggctttcacggtttccctggtgtgcagggtcccccaggccctcctggttctccgggtccagctctggaaggacctaaaggcaaccctgggccccaaggtcctcctgggagaccaggtctaccaggtccagaaggtcctccaggtctccctggaaatggaggtattaaaggagagaagggaaatccaggccaacctgggctacctggcttgcctggtttgaaaggagatcaaggaccaccaggactccagggtaatcctggccggccgggtctcaatggaatgaaaggagatcctggtctccctggtgttccaggattcccaggcatgaaaggacccagtggagtacctggatcagctggccctgagggggaaccgggacttattggtcctccaggccctcctggattacctggtccttcaggacagagtatcataattaaaggagatgctggtcctccaggaatccctggccagcctgggctaaagggtctaccaggaccccaaggacctcaaggcttaccaggtccaactggccctccaggagatcctggacgcaatggactccctggctttgatggtgcaggagggcgcaaaggagacccaggtctgccaggacagccaggtacccgtggtttggatggtccccctggtccagatggattgcaaggtcccccaggtccccctggaacctcctctgttgcacatggatttcttattacacgccacagccagacaacggatgcaccacaatgcccacagggaacacttcaggtctatgaaggcttttctctcctgtatgtacaaggaaataaaagagcccacggtcaagacttggggacggctggcagctgccttcgtcgctttagtaccatgcctttcatgttctgcaacatcaataatgtttgcaactttgcttcaagaaatgactattcttactggctctctaccccagagcccatgccaatgagcatgcaacccctaaagggccagagcatccagccattcattagtcgatgtgcagtatgtgaagctccagctgtggtgatcgcagttcacagtcagacgatccagattccccattgtcctcagggatgggattctctgtggattggttattccttcatgatgcatacaagtgcaggggcagaaggctcaggtcaagccctagcctcccctggttcctgcttggaagagtttcgttcagctcccttcatcgaatgtcatgggaggggtacctgtaactactatgccaactcctacagcttttggctggcaactgtagatgtgtcagacatgttcagtaaacctcagtcagaaacgctgaaagcaggagacttgaggacacgaattagccgatgtcaagtgtgcatgaagaggaca

SEQ ID NO: 4831 - DNA, 1650 bp, Homo sapiens
  SIMILAR (1038)..(1595): 971254mologous to Homo sapiens COL4A5 (Collagen Alpha 5(IV) Chain Precursor),accession number AL031622,Smith-Waterman Score= 1031.
cagaagatgaaggaagagcaaagggacatcatacatggcagcagacaagagaaaatgagagccaagcgaaaggggaaacaccttataaaaccatcagatttcgtgagacttactatcacaagaacagtatgggggaaaccacccccatgattcaattatctcccaccgggtccctcccacaacacgtgggaattatgggagctacaattcaagataagatttgggtgactcctggacttcctggatttccagggacaccaggtcttcctgtaaaacgtggatttccaggcagtcccggttttcctggtttacagggtcctccagtaatacctggtcccactggtataccagggccaattggtcccccaggaccaccaggtttgatggtaactcctggtccaccaggacttccaggacctaaggtaaatatgggcttaaatttccagggacccaaaggtgaaaaagtgaagcaaggtcttcagggcccacctgggccacctgggcagatcagtgaacagaaaagaccaattgatgtagagtttcagaaaggagatcaggtgattcctggtgaccgagggcctcctggacctccagggatacgtggtcctccagtaaccccaggtggtgagaaaggtgagaagggtgagcaaggagagccaggcaaaagagtaaaaccaggcaaagatggagaaaatggccaaccaggaattcctgtaatgcctggtgatcctggttaccctggtgaacccggaagggatggtgaaaaggtaatgcagttatgggtcctcctggccctcctggatttcctggagaaaggggtcagaaaggtgatgaaggaccacctggaatttccattcctggacctcctggacttgacggacagcctggggctcctgggcttccagggcctcctggccctgctggccctcacattcctcctagtaacaaaggtgacacttgcttcaactgcattggaactggtatttcagggcctccaggtcaacctggtttgccaggtctcccaggtcctccaggtaattccaggagctccaggtgctccaggctttcctggatctaaaggtgaacctggtgatatcctcacttttccaggaatgaagggtgacaaaggagagttgggttcccctggagctccagggcttcctggtttacctggcactcctggacaggatggattgccagggcttcctggcccgaaaggagagcctgtgagaattacttttaagggtgaaagaggtccccctgggaacccaggtttaccaggcctcccagggaatatagggcctatgggtccccctggtttcggccctccaggcccagtaggtgaaaaaggcatacaaggtgtggcaggaaatccaggccagccaggaataccaggtaataaaggggatccaggtcagactataacccagccggggaagcctggcttgcctggtaacccaggcagagatggtgatgtaggtcttccaggtatccctggacttccagggcaaccaggcttgccagggatacctggtagcaaaggagaaccaggtatccctggaattgggcttcctggaccacctggtcccaaaggtattattctcacaaatggcaagagcacacagtggtctgaggacagttcttaaatat

SEQ ID NO: 4832 - DNA, 257 bp, Homo sapiens
  SIMILAR (142)..(189): 1001254mologous to Homo sapiens platelet glycoprotein VI- 2,accession number AB043820,Smith-Waterman Score=89.
atgaccggtgtgagccgccgcacccagcctcaacctttgtttttctgactcctgtgtgcaggcatgcatcaccacaccggtctatgacaacaccctcacatcagagtagtgtagcggaacctaccgatgctacagcttcccagcagggacccatacctgtggtcagcccccagcgaccccctggagctgtggtcacaggtcctgcccgccagtactacaccaagggcaacctggtccggattgcctcggggctgtga

SEQ ID NO: 4833 - DNA, 2888 bp, Homo sapiens
  SIMILAR (2)..(2806): 701254mologous to Mus musculus cyclophilin-related protein,accession number L04289,Smith-Waterman Score=3195.
gttaagtgacccctgttcaagccgatgggatgaaagaagcttgtctcagagatccagatcatggtcctataatggatattattcagaccttagtacagcaagacactctggccaccataaaaaacgcagaaaagaaaaaaaggttaagcataaaaagaaagggaaaaagcagaaacactgcagaagacacaaacaaacaaagaagagaaggattcttataccgtctgacatagaatcctcaaaatcttccactcgaagaatgaaatcctcttgtgatagagaaaggagttctcgttcttcctcattgtcatctcatcactcatcaaagagagactggtctaaatctgataaggatgtccagagctctttaacccattccagcagagactcatacagatcaaaatctcactcacagtcttattctagaggaagctcaagatcaaggactgcgtcaaagtcctcatcacattctcgaagtagatcaaagtccagatctagttccaagtctgggcaccgaaagagagcatcaaaatcaccaagaaaaacagcttctcagttaagtgaaaataaaccagttaaaacagaacctttaagagcaaccatggcacaaaatgaaaatgtagtagtacaaccagttgtagcagaaaatattcctgtaataccactgagtgacagtccccccccttcaagatggaagcctggacagaaaccttggaagccctcttatgagcgaattcaggaaatgaaagctaaaacaacccatttgctacccatccaaagcacttacagtttagcaaatattaaagagactggtagctcatcatcctaccataaaagagaaaaaaattcggaaagtgatcagagcacttattcaaaatacagtgatagaagttcagaaagctcaccaaggtcaaggagcagatcttctaggagtagatcttattccagatcatatacaagatcacgtagtctagctagttcacattcaaggtctaggtctccatcatctagatctcattcacgaaataaatacagtgatcattcacagtgtagtagatcatcttcatatacttctattagcagtgatgatggaaggcgagctaagaggagacttagatccagtgggaaaaaaaatagcgtttcacataaaaagcatagcagcagctctgaaaagacacttcacagtaaatatgtcaaaggtagagacaggtcttcatgtgtgagaaagtatagcgagagcagatcatctttagattattcttcagacagtgagcagtcaagtgttcaggccacacagtcagcccaggaaaaagagaagcagggccaaatggaaagaacacataataaacaagaaaaaaacagaggtgaagaaaaatccaagtctgaacgggaatgccctcattcaaaaaaaagaactttgaaagagaatctttctgatcaccttagaaatggcagtaagcccaaaaggaagaattatgctggtagtaaatgggactctgagtcaaattcagaacgagatgtcactaaaaacagtaaaaatgactcccatccatcctctgacaaggaagaaggtgaggccacatccgattctgaatcagaggttagtgaaattcacatcaaagtcaaacccacaaccaagtcgtccacaaatacttcactgcctgatgataatggtgcttggaaatcaagcaaacagcgcacatcaacttctgactctgaggggtcctgttccaattcggaaaacaataggggaaagccacaaaagcacaaacatgggtcaaaggaaaatcttaaaagagaacacaccaaaaaagtgaaagagaaattgaaagggaaaaaagacaaaaagcataaggctccaaaacgaaagcaagcatttcactggcagcctccactagaatttggtgaagaggaggaggaggagattgatgacaagcaagttactcaggaatcaaaagagaaaaaagtttctgaaaacaatgaaaccataaaagataatattctaaaaactgagaaatccagtgaagaggacctttcaggtaaacatgatacagtgactgtttcatcagatcttgatcagtttactaaagatgatagtaaactcagtatttctcccacagctttaaatactgaggaaaatgtggcctgtttacaaaacattcagcacgttgaagaaagtgttcccaatggagtggaagatgtgcttcaaacagatgacaacatggagatctgcactcctgataggagttccccagcaaaagtagaggagacttcccctctaggaaatgcacggcttgataccccagatataaacattgttttgaagcaggatatggcaacggaacatcctcaagcagaggtagtaaaacaggaaagcagcatgtccgaaagtaaagtgttgggtgaagtggggaaacaggacagcagctctgctagcttggctagtgctggagaaagtaccgggaagaaggaggtggctgagaagagccagatcaacctcattgataagaaatggaagcccctgcaaggtgtggggaacctggcagcacctaatgctgccacatccagtgctgtggaagttaaggtgttgaccactgtgcctgaaatgaaaccacaaggcttgagaatagaaattaaaagcaaaaataaagttcggcctgggtctctctttgatgaagtaagaaagacagcacgcttaaaccgtagaccaagaaatcaggagagttcaagtgatgagcagacgcctagtcgggatgatgatagccagtccaggagtccaagtagatctcgaaatcaagaagctactctagaagtcggagcagaggatggtacagcagaggccgaaccagaagccggagcagttcctaccggagttacaaaagtcacag

SEQ ID NO: 4834 - DNA, 1831 bp, Homo sapiens
  SIMILAR (276)..(914): 381254mologous to Volvox carteri f. nagariensis hydroxyproline-rich glycoprotein DZ-HRGP,accession number AJ242540,Smith-Waterman Score=272.
ctggatgttgcgctcgcagtctgtctgcctgtgcagcagcagctcgctctccagcaggaagcgcttgccgcactggtcgcagatctgcatgcggctgtgggtcacattcatgtgtttctccaggtaccagcggttgttgaaaactcgtgggcacttctggcatggatggtgctgcttctcctccagcttcaccttggcccccagcccatcagtggctggcggccctcgggccgatgcagaggccactccagggggtggctttggcctcttcccaccccgccgcccagcttcttcaggttcaggggtaccccggcgccgggcgttctcccgggaccgtgtggccatgtgactgtggggaggggggtctgcccggctgcttcggcttccccgtggcccctgcttgcccccagcctccccctcctccccctcctcctcctcagagctctcttgatcctgctcactaggcccttcctcctcttcctcctcctcttcctcttcctgctcactgtgcccgtcctcctcctcttcttcctcttctccctgactgccaccctcttcctcctcctcctcctcccgtccactgccaccaccttcctcttcctcttcttcctcctcctcctcctcgtcgtcctcctcctcctcgtccgagtgtctctgcagcccgtcctcccggcccagaaccacggtggctgggcttggcccggcacctggcttcccctctggccccgtggacacgtgcagtgtctggttgttgaggttcacctccacgatgatctgggattgctccctgcggctgtaggtgccagaacccccaagctcttcctccaactcttctccaccctccagcttgcacaagctggctgggggcccaccggcctcctcgacaccaccctccttctcctccttaaagaagggctgggctggcccaatggtggcaggcactgtgccaccagcagtccctgccccgtcctcaacacgcaccgagtaagggtcagggccctcgcgggcatagatcttgggcaggcctggggtgtcggcctcctgcttgatgtcacagtagtagggcggcgcagctggagtgcagctggcagccggctgggccagggccacagtgcccggacctggtgggcctagagagcgggcgtccagcagctcttggcaggacgcagcgatgtcagccatctgcagcaatgaggcggcgctgagcacctcgtggacgttggccgcgttgaccagcagcttggacgtatagatgaagttgaggatctgctgcaggccaccaggtgccagtgcctccagggacagctccacacgctgcagctgcttgttctgggtgaagagtgagtggaagaactggctgtaggcggctagcacacccttgtgtgccggaaagacgctgcgctggggcaccagcaccaagtccacgtcgcagaggtcaggctggaagaggcgctgctcgttcaggcggcccatcaagcaggcaaagtgcagcgccacgtcctccaccagcgagaactcagccgccggggagtcagttgtcttctcaaccagcaacatggtgccgtggcgctgggggctcacagggccccgcgggatcgcgctgcccccggcggccaggccagggccgctccatgaagcgccgcgctgggggccgcccccgcgcagggccccgcgaccatggcccccgggggcgcggccaggcaggcggaggcgcagggccgcggcgagtccagcgccaagcagctgcggccccagagcctcgggcgcggcgggcggggggcgcggggcgccgattggagcccgcgcgtcagctggggccgccgtctggacg

SEQ ID NO: 4835 - DNA, 855 bp, Homo sapiens
  SIMILAR (20)..(334): 401254mologous to Homo sapiens Partial Human Natural Killer receptor,accession number R13319,Smith-Waterman Score=144.
tcacagtcttattctagtaggaagctcaagatcaaggactgcgtcaaagtcctcatcacattctcgaagtagatcaaagtccagatctagttccaagtcagctgtgctggcctccacagccagatgtgctggttcccggaagcaatgcgtgcccctccccatccggctgtgccagctgcagtccaggtcactccagcctagcatggtgccgtggcgctgggggctcacagggccccgcgggatcgcgctgcccccggcggccaggccagggccgctccatgaagcgccgcgctgggggccgcccccgcgcagggccccgcgaccatggcccccgggggcgcggccaggcaggcggaggcgcagggccgcggcgagtccagcgccaagcagctgcggccccagagcctcgggcgcggcgggcggggggcgcggggcgccgattggagcccgcgcgtcagctggggccgccgtctggacgcctatctctaccacatagctggccctttctgccccggagttcctctgactatgtgatgtacagctggggatactggggtccagagaggggccaggaccctggccgcctgcctttggtgctgagcttccaaggggcggctgctcggccgctgggtgacaccgggtcagccccttttctcgtttattcgtccctggcatggggagcggggtcaccagctctgcgccctgggagcgcgtcttcttgtggaccaagcgcaggtggctgctagccctctttctacgggctcgagcctgcacaatcgaggctggagatgtggtcgcggcggcaggatagagtggctggcggagccgtgtgacagaaggagaggcggagttcat

SEQ ID NO: 4836 - DNA, 4581 bp, Homo sapiens
  SIMILAR (1471)..(4578): 711254mologous to Mus musculus cyclophilin-related protein,accession number L04289,Smith-Waterman Score=3541.
gtactctcgcggtatttgtcccgactctcgcggggtttagcgtggcattgggaggcccggcctgggggaggagacggcgttccgttagcggcgttggggtttggctgcagtggcagtgctttctcttctgctcacggggacccgctcaggctggaggccagccagctcttgccgccacctcggtcgcgatgggggcgcaggaccggccgcagtgccacttcgacatcgagatcaaccgggagccggttggtcgcattatgtttcagctcttctcagacatatgtccaaaaacatgcaaaaacttcctttgcttgtgctcaggagagaaaggccttgggaaaacaactgggaagaagttatgttataaaggttctacgttccatcgtgtggttaaaaactttatgattcagggtggggacttcagtgaaggtaatggaaaaggtggagaatcaatttatggtggatattttaaagatgaaaactttattctcaaacatgacagagcgttccttttatcaatggcaaatcgagggaaacataccaatggttcccagtttttcattaccacaaagcctgctccacacctggatggggtgcatgtagtctttggactggttatttctggttttgaagtaatcgaacaaattgaaaatctgaagaccgatgctgcaagcagaccatatgcagatgtgcgagttattgactgtggagtacttgccacaaaatcaataaaagatgtttttgagaaaaaaaggaagaaaccaactcattcagaaggctcggattcctcttccaattcctcctcttcttcagaatcatcttcagaaagtgaacttgaacatgagagaagcagaaggaggaaacataagaggaggccaaaagttaaacgttctaaaaagaggcgaaaggaagcaagcagttcagaagagccaaggaataaacatgcaatgaacccaaaaggtcactctgagaggagtgataccaatgaaaaaaggtcagttgattccagtgctaaaagggaaaaacctgtggtccgcccagaagagattcctccagtgcctgagaaccgatttttactgagaagagatatgcctgttgttactgcagaacctgaaccgaagattcctgatgttgcacccattgtaagtgatcagaaaccatctgtatcaaagtctggacggaagattaaaggaaggggcacaattcgctatcacacacctccaagatcaagatcctgttctgagtcagatgatgatgacagcagtgaaactcctcctcactggaaagaggaaatgcagagattaagagcatatagaccacctagtggagaaaaatggagtaaaggagataagttaagtgacccctgttcaagccgatgggatgaaagaagcttgtctcagagatccagatcatggtcctataatggatattattcagaccttagtacagcaagacactctggccaccataaaaaacgcagaaaagaaaaaaaggttaagcataaaaggaaggggaaaaaagcagaacacttgcagaggacacaaacaaacaaagaggagagggattcttatcccgtctgacatagaatcctcaaaatcttccactcgaagaatgaaatcctcttgtgatagagaaaggagttctcgttcttcctcattgtcatctcatcactcatcaaagagagactggtctaaatctgataaggatgtccagagctctttaacccattccagcagagactcatacagatcaaaatctcactcacagtcttattctagaggaagctcaaggatcaaggactgcgtcaaagtcctcatcacattctcggaagtaggatcaaagtccagatctagttccaagtctgggcaccgaaagagagcatcaaaatcaccaagaaaaacagcttctcagttaagtgaaaataaaccagttaaaacagaacctttaagagcaaccatggcacaaaatgaaaatgtagtagtacaaccagttgtagcagaaaatattcctgtaataccactgagtgacagtccccccccttcaagatggaagcctggacagaaaccttggaagccctcttatgagcgaattcaggaaatgaaagctaaaacaacccatttgctacccatccaaagcacttacagtttagcaaatattaaagagactggtagctcatcatcctaccataaaagagaaaaaaattcggaaagtgatcagagcacttattcaaaatacagtgatagaagttcagaaagctcaccaaggtcaaggagcagatcttctaggagtagatcttattccagatcatatacaagatcacgtagtctagctagttcacattcaaggtctaggtctccatcatctagatctcattcacgaaataaatacagtgatcattcacagtgtagtagatcatcttcatatacttctattagcagtgatgatggaaggcgagctaagaggagacttagatccagtgggaaaaaaaatagcgtttcacataaaaagcatagcagcagctctgaaaagacacttcacagtaaatatgtcaaaggtagagacaggtcttcatgtgtgagaaagtatagcgagagcagatcatctttagattattcttcagacagtgagcagtcaagtgttcaggccacacagtcagcccaggaaaaagagaagcagggccaaatggaaagaacacataataaacaagaaaaaaacagaggtgaagaaaaatccaagtctgaacgggaatgccctcattcaaaaaaaagaactttgaaagagaatctttctgatcaccttagaaatggcagtaagcccaaaaggaagaattatgctggtagtaaatgggactctgagtcaaattcagaacgagatgtcactaaaaacagtaaaaatgactcccatccatcctctgacaaggaagaaggtgaggccacatccgattctgaatcagaggttagtgaaattcacatcaaagtcaaacccacaaccaagtcgtccacaaatacttcactgcctgatgataatggtgcttggaaatcaagcaaacagcgcacatcaacttctgactctgaggggtcctgttccaattcggaaaacaataggggaaagccacaaaagcacaaacatgggtcaaaggaaaatcttaaaagagaacacaccaaaaaagtgaaagagaaattgaaagggaaaaaagacaaaaagcataaggctccaaaacgaaagcaagcatttcactggcagcctccactagaatttggtgaagaggaggaggaggagattgatgacaagcaagttactcaggaatcaaaagagaaaaaagtttctgaaaacaatgaaaccataaaagataatattctaaaaactgagaaatccagtgaagaggacctttcaggtaaacatgatacagtgactgtttcatcagatcttgatcagtttactaaagatgatagtaaactcagtatttctcccacagctttaaatactgaggaaaatgtggcctgtttacaaaacattcagcacgttgaagaaagtgttcccaatggagtggaagatgtgcttcaaacagatgacaacatggagatctgcactcctgataggagttccccagcaaaagtagaggagacttcccctctaggaaatgcacggcttgataccccagatataaacattgttttgaagcaggatatggcaacggaacatcctcaagcagaggtagtaaaacaggaaagcagcatgtccgaaagtaaagtgttgggtgaagtggggaaacaggacagcagctctgctagcttggctagtgctggagaaagtaccgggaagaaggaggtggctgagaagagccagatcaacctcattgataagaaatggaagcccctgcaaggtgtggggaacctggcagcacctaatgctgccacatccagtgctgtggaagttaaggtgttgaccactgtgcctgaaatgaaaccacaaggcttgagaatagaaattaaaagcaaaaataaagttcggcctgggtctctctttgatgaagtaagaaagacagcacgcttaaaccgtagaccaagaaatcaggagagttcaagtgatgagcagacgcctagtcgggatgatgatagccagtccaggagtccaagtagatctcgaagtaaatctgaaaccaaatcaagacacagaacaaggtctgtctcctatagtcactcaagaagtcgatcgagaagttccacatcatcttatcgatcaagaagctactctagaagtcggagcagaggatggtacagcagaggccgaaccagaagccggagcagttcctaccggagttacaaaagtcacaggacgtccagcaggagcagatccaggagcagctcatatgatccccacagtcgatccaggtcctacacctacgatagctactatagcaggagtcggagtcgaagtagaagccagagaagtgacagttaccaccgaggcagaagttataatcggcggtccaggagttgtagatcttatggctctgacagtgaaagtgaccgaagttactctcatcaccggagccccagtgagagcagcagatacagttga

SEQ ID NO: 4837 - DNA, 1692 bp, Homo sapiens
  SIMILAR (727)..(1689): 1001254mologous to Homo sapiens necdin,accession number AB007828,Smith-Waterman Score=1675.
atggttggagaaggtggaactaagctggaggacacccgagtactcttaagcaatccccatgataagccaatttggatagaacaatggctgctaagtaaagagaaactggaggctttagaggacttagttactgaacaattagaaaatggacacatagctccaacattttccccttggaattctccagtttttgtaattaagaaaaaatcagaattggacctgaccagaaataatgaacgtgcttgtttgggaagatttcattgcagaacaggcagaggtgctggcaacgaatcctatggaatcattattgattggtcccctaaggggatgtttagcttgaattgcacctctcagtctgcgtcccacgaccacactatgttcagctggtctaaacaaaatggtcagatggtagaaatgtttacacattttcttggacaagcccgactgttcctctcactggttcgcataaagctcatgtttacaaagccgcccagacctttctctgggactctcatatttaacttaattctggatatacccagccgctggccaaggccgcggtcgcgcaggcgcagtgccgcgtcccgccgccgccccgccctgcccgtcgctgcggaaggcgccgcgcgcagcaacgcgcacttcctctccaggaatccgcggagggagcgcaggctcgaagagctcctggacgcagaggccctgcccttgccagacggcgcagacatgtcagaacaaagtaaggatctgagcgaccctaactttgcagccgaggcccccaactccgaggtgcacagcagccctggggtttcggagggggttcctccgtccgcgaccctggcagagccgcagagccctcctctaggcccgacggccgctccgcaggccgcgccgcctccccaggccccgaacgacgagggcgacccgaaggccctgcagcaggctgcggaggagggccgcgcccaccaggccccgagcgcggcccagccgggcccggcaccgccagccccggcgcagctggtgcagaaggcgcacgagctcatgtggtacgtgctggtcaaggaccagaagaagatgatcatctggtttccagacatggtgaaagatgtcatcggcagctacaagaagtggtgcaggagcatcctccggcgcaccagcctcatcctcgcccgggtgttcgggctgcacctgaggctaaccagcctgcacaccatggagtttgcgctggtcaaagcgctggagcccgaggagctggacagggtggcgctgagcaaccgcatgcccatgacaggcctcctgctcatgatcctgagcctcatctacgtgaagggccgcggcgccagagagagcgccgtctggaacgtgctgcgcatcctggggctgcggccctggaagaagcactccaccttcggggacgtgcggaagctcatcactgaggagttcgtccaaatgaattacctgaagtaccagcgcgtcccatacgtggagccgcccgaatacgagttcttttggggctcccgggccagccgcgaaatcaccaagatgcaaatcatggagttcctggccagggtctttaagaaagacccccaggcctggccctcccgatacagagaagctctggaggaggccagagctctgcgggaggctaatcccactgcccactaccctcgcagcagtgtctctgaggactag

SEQ ID NO: 4838 - DNA, 1606 bp, Homo sapiens
  SIMILAR (992)..(1297): 601254mologous to Homo sapiens Gag-Pro-Pol protein,accession number AF164614,Smith-Waterman Score=363.
atgggtatttcctgcccagggtcctcaaaaatgcttaatagtcgagcgctccctgtgctgaaactgacccaaggagctctgcgggattgtaaagaacgagcaaactacacaaacttcaacatttacaaggctgtagagagccagggaaagtttgtatgtgttctctataatggacagcaaagccctgaatatgtcatgataccatgtacatctgtgtctccaacaggccaggaagtccctgaggacagaggaatgagaatggtgatgaagaataaacccaataagcctagcaaaatgcagagtctgaaatccagtaagcatctcacaaattctgtcattgttattgctgtaggaattttcttctcggtcactttgcaagccagggacccccagctggatgatgccatagaacagcttagaggagtgtgcattagagcttgggaaaaaatcacttcaggtggagaacaatacccttcctttagtgctataaaacagggaccaaaagaaccatacattgattttatagctcggttacaggagtctcttaaaaagatgattgcagattcggctgctcaggatatagtgttgcagttattagctttcgacaatgctaatcccgattgccaggctgctctgcgacctatcagagggaaagcacatttagttgattgtatcaaggcctgtgatgatattggagatgggtctagtaatggtaaagcttcttattttggctcaaaaagtaaagttttccagacatcctatacttcagctcaaaaagcagagcttgtagcggtaattgaggtattgactgcttttgatatgcctattaatgtgatttctgattcttcatacatggtttattccacacagttaattgaaaatgctcagttacgatttcatacagatgaacaactgatgactttatttacccaattgcaaacagcatttaggagtacaatgcatcctttttacatcactcacattagggctcgctcatacacctcttccaggacctttgactgaagggaatcaaatggccgattgcctagttgctaatgcaatatctaatgctagacactttcacaatttaacccatgttaatgcctctggtctcaaacacagatacagcattacctggaaagaagctaaaaatattatccagcgatgcccaacttgccaaatggtacattcctcatcttttagaggaggagttaatcctcgaggactggaacctaattcactttggcaaatggatgtcacacatattcccttgtttgggagactagcttatgtacataaaagaagaagaataagaggaggaggaggaggagaaggagaaggagaaggagaaggagaaggagaagaagaagaagaagaagaagaagaagaagaagaagaagaagaagaagaagaagaagaagaagaagaacaagaacaagaacaagaagaacaagaacaagaagaacaagaacaagaagaacaagaacaagaagaaagaagaagaaaagacactgaagagctttcatactctctccccctcaacagaacccaaccatgctggcaccctgattttggacttccagccaccagaactgtgagaagataa

SEQ ID NO: 4839 - DNA, 1437 bp, Homo sapiens
  SIMILAR (337)..(891): 591254mologous to Homo sapiens Gag-Pro-Pol protein,accession number AF164614,Smith-Waterman Score=564.
atggttggagaatgtggaactaagctggaggtcatgcaagtacacttaagcaatccccgtgatgagttagaaggggagctcagaagcatcagggtgacaatgggacaagtgtgggctctggttcattccaccttggaaccttttcacactaatgaagaggaggaaggattatataacaaagtaacagaagaggtgacagagcaggtttgtttgccagctaaagctaaagcagcaaaggaaggagaggttcatccctacccttctccattccctcattattttgaagaaacagagtggcctgaccctccagatctttcttttctggaggacactggaggagatcctagtctcactagccattggcaattaacaaaggaggctgaggcagagttacagctgattgaaaagcaagtccataaagctcaaataaatagaatagatccagagaagattccagatttgctaattttttcaactcagcattcacctactggtgttattgtccaagaacaggacttagtagaatggctttttcttccacatactaattcatggactctaactccttatttggatcaaaacgctactatgataggaaatgagagaactcagattgttaaattacatggatatgatcctagaaaaattattgtcctcctcatgaaggcaaacatacagcaagcttttataaatggtcttacttggcaaactcatttagctaactttgtggttattctcgataatcattttcctaaaatgaaactgtttcaatttttgaaattaactaattggattctccctaaaataactaaatttaaaccaattaaaggtgctgaaaatgtcttcacagatgggtctagtaatggtaaagcttcttattctggctcaaaaggactgagtcaacagctgatttggatatcatcaagaaacctgaaaccttatcatgagtcagatgctgaggaagagattccaggaagaacccaaggaacccctggttgcagtcatgtcgagactgacactgaggaggaccccaactgtcatgagcagcacccattgaacacagccacccacctggggacagatcaagaagctgtcacagatggtggaagaaaacctgaggaaagagggacaaccagtcacaatgagtaatttggtgatctatcacagtgatgatcaccattgccatgagtattccttcaacaagggctgacacagagaacaattatacttattgggcatatttatcaatcttgtctggcaataatgcctagatgatttcactctatggcacagttacacatgctttctgatctcagtatttaccataataaatctgctcctataattgaggcataccaccctcaaaaacctatttgtaaacaaaatagaacctggccagaaataatgaacaacttgtttagtaagattgcattgcag

SEQ ID NO: 4840 - DNA, 1754 bp, Homo sapiens
  SIMILAR (94)..(384): 631254mologous to Homo sapiens Gag-Pro-Pol-Env protein,accession number AF164611,Smith-Waterman Score=332.
atgggacaagtgtgggctctggttcattccaccttggaaacttttcacactgatgaggaggaaggagagtataatgaagtaacagagcaggtttgtttgccagctaaagccggtagtgctgcagtagatttatgctgcacaaaagctgtgagccttctgcctggggaatccccgcaaaaggtcccaacaggagccggtggacccttgccagcggggatgacaggattacttctaggcaggtctagtttaaatataaaagcggtacaagtacaaacaggagtcactgattctgattacaatggggaaattcaaattgttacatctacttctgttccctggaaagcaaagcctggagaccatatagcacagctcctaattgtgccgaaaaaatttgcaaggtttgaaggaaccgcttcaagtggaaagacaaagttcctgccaaggtttaggatatcatttttgatggcggccattgttaagcctccagaacctatacctttaaaatggttaacagataagccaatttggacagaacaatggccgctgagtaaagagaaactggaggctttagaagacttaattactcaacaattaaaaaagggacacatagctccaacattttccccttggaattctccagttttcataattaagaaaaaatcagctgagcaggactgtgaatggtttgtatttacaattcttgcagtaaacaatctgcagcttaagcctgctaaacgttttcactggaaagtgttgccacaaggaccaaatcaacagccaatttggataccatcaagatacctgaaaccttatcataagccagatgccaaggaagagattccggaaggatcccaaggattcccagttgcagccatgtcaagactgacgctgaggaggaccccaactgtcacgagcaacacccatcgaacacagccacccacctggggacagatcgagaagctgccacagatggcggaagaaaacctgaggaaagctggacaaccagtcacaataagtaattggattctccctagaataactaaatttaaaccaattgaaggtgctgagaatgtttttacagatgggtctagcaacggtaaagcttcttattctggctcaaaaggacctttgactgaagggaatcaaatggctgatcgccttgttgctaaagtaatatctaatgctagacactttcacaatttaacccatgttaatgcctctggtctcaaacgcagatacagcattacctggaaagaagctaaagctattatccagcgatgcccaacttgccaagtgatgctatcagcagctgaacagcatctacagaaatcagctgcaaagacagaagcagaaaaactggtttggtggagagacccaataacaaaaagtcgggaaataggtaaaataataacttggggtagaggttatgcttgtgtttctccaggaccaaatcaacagccgatttggataccatcaaaacacctgaaaccttatcataagccagatgctggggaaaagatttcgggaggaaactgtggaccccacccccacccccggttgcagccatgtccagactgacgctgaggaagaccccaactgtcacgagcaacacctgtcaaacacagccacccacctggagacagatcaagaagctgtcacagatggtggaagaaaacctgaggaaagcgggacaaccagtcacaatgaataatttaatgatagcggtgatcaccactgccttcaacaagggctga

SEQ ID NO: 4841 - DNA, 423 bp, Homo sapiens
  SIMILAR (1)..(189): 431254mologous to Mus musculus Pro-Pol-dUTPase polyprotein,accession number Y12713,Smith-Waterman Score=105.
atgacaaatatcagtaccacccttaaagacctaaaagatgcagggatgatagatcccatcaaatccacatttaatttgccatctggatcccacaaaaaccagatggatcctggaaaacgacagcaaacaatcaaactcaaccaagcaacaatctcaattgcagccatagtgcttgatgtggcatctttgccggggaaggcgaggagttaccatgggttttctagccatgcaggaagggtaattgactccaataatcagaaggacattgagggctgcacttacatactgaatgtggcagggaagaatatgtttggaatccagcttaggcgttctgtaatattcccttgtccaaatttgatgtatacagacaattgcagcagccatggcccaagagggcccagtgattatgactcagatccttga

SEQ ID NO: 4842 - DNA, 771 bp, Homo sapiens
  SIMILAR (674)..(432): 241254mologous to Bos taurus SCO-spondin,accession number AJ132106,Smith-Waterman Score=66.
ttagccatcgtaaaacttgacattatgaagcagaaaacaggtgtcatctgtctctggtgttcctggaatttctaacccaaatgccaattcctccacaactcccttcacacacttcatgtcgaagaccagctcaagagcctggacccatatgccaccttcagcagggttgactgcagcttcttgttcttcctgagcatcttctccaatggtgacctgagcacattctcccaggggcccaagaggggccatcgtgtctctagaaccagaactggaaggtgaaacatgagcagctggaacacactctctgagagctgcaagatgcatggggacctcaagtacctgtttgtaattacagccaaggaccagcaggcagcattgctgcatccacatgggcttttgctggaaccagtaagtctctgccagcccctcccaggctcctgggatgccacttgttctgggtagaaggctgtggcagggctctcggcttggtgggctaagcatctccctctctgatgactgccatggggcccacaaccactcattcaagagggtcaccaccacattgcaggtgttcagctggacggttccccaggcagagcctgccatggactgcatacacacagcggttccccaaggcagaggctgccatgacaagctcatgagagtgtggcagaggtgatcatcacctgatatttgtggcagaagagaaaagtccagcgtgaaggccaggtaggggagacgtgccaggctgtggggccaggccctgcgcat

SEQ ID NO: 4843 - DNA, 651 bp, Homo sapiens
  SIMILAR (1)..(285): 361254mologous to Homo sapiens KIAA0664 protein,accession number AB014564,Smith-Waterman Score=125.
atgagcagctggaacccactccctgagagcttcaagaagcatgggtacctcttgtacctgtttgtaattacagccaaggaccagcaggcagcattactgcatccacatggggcttttactggaaccacctctcagggcaagaacccagagcagatggaggcctcacagaagcctgtggcagggctctgggcttggtggctgaacatctccctctctgctgccagccatggggcccagaaccacccattcaagagggtcaccaccacattgcagagccagggctggaacaaggacctgtggataatgagggaactgctctgcaataaccggcctgagcagctgcttcaagaaacagccacaatcaaggcacctatagcccctgctgacccgtggagccaggaggtgatttacaacttctgcaaggcagtcagctccgtcagctgtatgcccttcaacattcacttcaactcaaacatcccaccagaaagcagtggggactggcgaatgcagcagccctgcaaagtggaacagagcatcctgggagcccaacgtggaggaggaggttgccgccctgggagcctgagggagctcttcccttgcctgctggcagagcccaacatggaggaggaagttgccgccctgagagcctga

SEQ ID NO: 4844 - DNA, 597 bp, Homo sapiens
  SIMILAR (11)..(97): 401254mologous to Rattus norvegicus prostasin precursor,accession number AB017638,Smith-Waterman Score=43.
atgggacgctggagcccgcggccgagtggtcggtactgctgggcgtgcaactcccaggacgggcccctggacggcgcgcacacccgcgcagtggccgccatcgtggtgccggccaactacagccaagtggagctgggcgccgacctggccctgctgcgcctggcctcacccgccagcctgggccccgccgtgtggcctgtctgcctgccccgcgcctcacaccgcttcgtgcacggcaccgcctgctgggccaccggctggggagacgtccaggaggcagatcctctgcctctcccctgggtgctacaggaagtggagctaaggctgctgggcgaggccacctgtcaatgtctctacagccagcccggtcccttcaacctcactctccagatattgccagggatgctgtgtgctggctacccagagggccgcagggacacctgccagcccagtccagagcccggtccaatgtgcatcagcgaagccacatccagcgcttacgcgacgcggtctcccacacatggcaacgcgggactgagcccgccagactgggcagctgggagcggcggcagcggcagcaacagcaggggcctgtaa

SEQ ID NO: 4845 - DNA, 655 bp, Homo sapiens
  SIMILAR (457)..(368): 661254mologous to Homo sapiens neutral protease large subunit,accession number M27826,Smith-Waterman Score=99.
  misc_feature (1)...(655): n = a,t,c or g
tttttttttttttttctggcccatatttattactgctcgagctgagcttttgctcgctgtccaccactgctgtttgccgctgtcgcagacccgcggctgacttcacccctctagatccggcagggtgtctgctgcacttctgacccagtgaggcagcgcccactgccgctcccaatcgggctagaggctcgccattgttcctgcgagggctaagtgccccgagttcgtcctaatcgagctgaatagagggataacacctcaccgcatgggtcaagaatccattctttgaaatccgtgaggccaagaaccccaggtcagagaacaagaggcttgccaccatcttggaagctctaagaacaaggatgcccaggtaacatatgcttcagtttccttccactgtgagagttaccggaagcttggcatccgtgatggtccagggggcttccgaggcgatcgggtagtgcagtcttcagccgctaagccaagagatctgggaaggagcagtcagagagccttgggccaagatccaggggctcctggagtggctgccaggtgagatgaaccagtcgaattttcagtggtcccacacagatggnacgccgctttagagaatcctgggctgcgggcattcctttggccagtgggcagatttccg

SEQ ID NO: 4846 - DNA, 612 bp, Homo sapiens
  SIMILAR (179)..(553): 301254mologous to Mus musculus nonsyndromic hearing impairment protein,accession number AF073309,Smith-Waterman Score= 160.
tgcaattcctgaagcttgagaccccggatatatactctccagggggctgcggtgcgctcttcgggtccccgagccctgtgtttatgaacacgcggggacgttcaaacacccgctcctctcccgccgggcgggctcctttgtcttctgggctttcgtcgcgagatggaacgctggatataaatttacttcaacaccttttacactgaaagatattctcctaggagacagagaaatttcagctggtatttcatcttatcaattactgagttatgaagatgaatcagatgttccactctatggaaggcgaggtaaccatattgtaaatgacgttgggattaacgttgctggatcacattccattgcagagaaagcttcatttggtatagcaaccatacatgaagtggtagtatcaacattactcaaagaaattactacacgaaaaattaactttgaccacagcttgatacgtcagtcaaggagcagcagaaaggcagtattgtgtgtggtcatggagagcatccgaaccacacgacagtgctcactgtctgtgcatgctggaattcgaggggaagcaatgcggtttcactttatggatgaacagaatcccaaggg

SEQ ID NO: 4847 - DNA, 1131 bp, Homo sapiens
  SIMILAR (316)..(1020): 801254mologous to multiple sclerosis associated retrovirus polyprotein,accession number AF009668,Smith-Waterman Score=985.
atgaagaacactttggaggttcctcaaaaactaaaagtagagctcccatatgatccatcaatcacattgctagatatatgcccgaaagaaaggaaattaatatatggaagtgcttctaatagagctgtaacactcatcacatggcccaagattccattccttggaatccgtgaggccaagaaccccaggtcagagaacacgaggcttgccaccatcttggaagtggcccaccgccatcttggaagtggctcgccaccatcttgggagctctgtgagcaaggacccccggtaacattttggcgatcacaaagggacctccaaagtgctgtacctagcccttatactctgctttcccaaataccagaggaagcagagtggtttacagtcctggacgttaaggatgcctttttctgcatccctgtacatcctgactctcaattcttgtttgcctttgaagatccttcaaacccaacgtctcaactcacctggactgttttaccccaagggttcaaggatagcccccatctatttggccaggcattagcccaagacttgagccaattctcatacatggacactcttgtcctttggtatggggatgatttaattttagccacccattcagaaaccttgtgccatcaagccacccaagtgctcttaaatttcctcactacctgtggctacaaggtttccaaacgaaaggctcagctctgctcacagcaggttaagtacttagggctaaaattatccaaaggcaccacggccctcagtgaggaatgtatccagcctaaactggcttatcctcatcccagaaccctaaagcaactaagagcattccttggcataacaggcttctgccaaatgtggattcccaggtacagcaaaatagccaggccattatatacactaattaaggaaactcagaaagccaatacccatttagtaagatggacacctaaagcagaagcagctttccataccctaaagaaggcccttaacccaagccccagtgttaagcttgccaacagggcaagacttttctttatatgtcacagaagaaaaaggaatagctctaggagtccttatacaggtccgagggacgagcttgcaacctgtggcatacctgaataa

SEQ ID NO: 4848 - DNA, 620 bp, Homo sapiens
  SIMILAR (1)..(153): 391254mologous to Homo sapiens expression inversely correlated with estrogen receptor expression in breast cancer,accession number AF007790,Smith-Waterman Score=107.
  misc_feature (1)...(620): n = a,t,c or g
gatgacagatnncccaagggaagggacanagctattgttttcccagcacatacaaccatagctttcagtgtttttgaactcttcatatacctggatggtgcctttgacctttgtgtcacttcagtgtcaaaaggaggatttgaaagggaagaaacggcaacatttgcactgctgtacaggttgagaaatatcctatttgaaagaaatagaagagtgatggatgtcatttctcgttcacagcctttacttgaatgatcttttttctgactactatggacaaacctcctcagcatgactgatatttcactcaaagaagggacccatatccgagttaacttacttaatcacaacattcccaaagggccttgcatactctgtggaatggggaacttcaaaagggagacagtttatgggtgctttcagtgttctgttgatggtcagaagtatgtgagacttcatgcagttccttgttttgatatttggcacaagaggatgaaataaaatgaaaaatgaataccccgtgttggtgttttaggtgcagttgtgccacaaaccttccctaaattatctaggtttgaaatgatcccttaaattaaaatgagaaaaaaaaaataaagaaa

SEQ ID NO: 4849 - DNA, 529 bp, Homo sapiens
  SIMILAR (1)..(522): 991254mologous to Homo sapiens nuclear distribution protein C homolog,accession number AF130736,Smith-Waterman Score=908.
aaaaaggatgcagagaatcatgaggcccagctcaagaacggcagccttgactccccagggaagcaggatactgaggaagatgaggaggaagatgagaaggacaaaggaaaactgaagcccaacctaggcaacggggcagacctgcccaattaccgctggacccagaccctgtcggagctggacctggcggtccctttctgtgtgaacttccggctgaaagggaaggacatggtggtggacatccagcggcggcacctccgggtggggctcaaggggcagccagcgatcattgatggggagctctacaatgaagtgaaggtggaggagagctcgtggctcattgaggacggcaaggtggtgactgtgcatctggagaagatcaataagatggagtggtggagccgcttggtgtccagtgaccctgagatcaacaccaagaagattaaccctgagaattccaagctgtcaaacctggacagtgagactcgcagcatggtggaaaagatgatgtatgaccagcgactgtatt

SEQ ID NO: 4850 - DNA, 1672 bp, Homo sapiens
  SIMILAR (392)..(832): 841254mologous to Homo sapiens nuclear distribution protein C homolog,accession number AF130736,Smith-Waterman Score=663.
ttttaagatgtataattatatttaaaaacaagcaatgcttaattttgtgcctgattttcctctttaaaaatggatttatctgggggttgcagttgatgacgttttgattttaatatgtttgctgctgctaccaagagctttgtcaagcaagttggagatggagggagattatttcctgttccaagcctcagtgaagctgaccaatatcaacccttaagtcttgtgggtaaaaaagaagcgatgctttctgtttcctagatataaacttacttcaacaccttttacactgaaagatattctcctaggagacagagaaatttcagctgggatttcatcttatcaattactgaattatgaagatgaatcagatgtttcactctatggaaggcgagggaagcagaagactgaggaagatgaggaggaggaagatgagaaggacaaaggaaaactgaagcccaacctaggcaacagggcagacctgcctgattaccgctggaccaagaccctgtcggagctggacctggcggtccctttctgtgtggacttccagctgaaagggaaggacgtggtggtggggctcaaggggcagccagcgatcatcgatggggagctctacaacgaagtgaaggcggaggagagctcgtggctcattgaggacggcaaggtggtgactgtgcatctggagaagatcaagaagatggagtggtggagccgcttggtgtccagtgaccctgagatcaataccaagaagattaaccctgagaattccaagctgtcagacctggacagtgagactcacatcatggtggaaaagacaatctatgaccaaaaaattaactttgaccacagcttgatacgtcagtcaaggagcagcagaaaggcagtattgtgtgtggtcatggagagcatccgaaccacacgacagtgctcactgtctgtgcatgctggaattcgaggggaagcaatgcggtttcactttatggatgaacagaatcccaagggaagggacaaagctattgttttcccagcacatacaaccatagctttcagtgtttttgaactcttcatatacctggatggtgcctttgatagaagagtgatggatgtcatttctcgttcacagctttacttggatgatcttttttctgactactatgacaaacctctcagcatgactgatatttcactcaaagaagggacccatatccgagttaacttacttaatcacaacattcccaaagggccttgcatactctgtggaatggggaacttcaaaagggagacagtttatgggtgctttcagtgttctgttgatggtcagaagtattatcaaattaaaagcacactgaactcaacatggggttttgtgtacacagttaacaaggtgactgatagtagtaatgggctgccattctatgatgtggatatgctcacgagttttgtcttcataaaacgcaatacggtcattgtgaagttaagacagattccattccttggaatccgtgaggccaacaaccccaggtcagagaacacggggcttgccaccatcttggaagtggcctgccgccattttggaagtcgcccaccaccttcttgggagctctgggagcaaggacccccggtaacactttggcgaccacgaagggacctccaaggtgaattgaaactgtaa

SEQ ID NO: 4851 - DNA, 657 bp, Homo sapiens
  SIMILAR (463)..(624): 401254mologous to Plasmodium falciparum merozoite surface protein 2,accession number AF217015,Smith-Waterman Score=79.
ctgcctcatttataaatatatgtatatattttattaccattatatacatggcatatctatacagttacatttacacttgatttagagtcaaagtcatatctccacacacaggacttggactcaaagcttttaatgacaagcatgcaaaatttcttagtatagaccctaagagtacccttaatataagtatgtttatttaaaaattctatgtatctactactgttaccagggggtccttgctcccagagctcccaagatggtggtgggccacttccaagatggtggccggccacttccaagatggtggcaagcctcgtgttttctgacctggggattcttggcctcacggattcgaaggaatggaatcttgggccgtgcggtgagtgttatagctctattagaagtcgtgggtcacggaagagaaccgtggaacccagtgactagtgttcagcttgattaggacaaacccgggcacctagctgtgcaggaacaatgggcaagcctttagccggatcgggagcggcaatgggtgcctcattggatcaggagcacagtggacaccctgccggatccagacggatggcagtcagcagcgggtctgcgacagcgacaaacagcagtggtggacggcgagcaaaagctcagctcgaaccatga

SEQ ID NO: 4852 - DNA, 379 bp, Homo sapiens
  SIMILAR (221)..(298): 421254mologous to Mus musculus BUB2-like protein 1,accession number U88873,Smith-Waterman Score=61.
atggtgcgatttctccagttcactgcatcgaagcgtgcaagcattgcggactttctgcgttaccctatccggagccttcgtcagagactgcacgactgtgctaagttcaacgacatgcgaaccttctacagatgtggctgggcaatgaacatcgtgacctcggtgctcctgctctatggcagtgaggaggaggccttctggctcctggtggccctgtgctgagcgcatgctgcccgactactacaacaccagggtggtggtgatacgcacatacgaccaacggtatgaacaatgtgtcgacctctacgacggactccccactaccctgttcacgaccgacgactggcatgtgtggcccgacctcactggactaccctga

SEQ ID NO: 4853 - DNA, 251 bp, Homo sapiens
  SIMILAR (141)..(251): 421254mologous to Homo sapiens pANCA-reactive fragment of human histone H1S-2,accession number W29471,Smith-Waterman Score= 69.
accgaggccagaaaagccgctgcagtcatgcccaagacagctgtcctggcagccgagaggcccaagaaagcttggggcgtccttattccgaaaaagagtactaagcggaccccaaaagcttttgctggtggaggctgctggagaaggttggttggtcaaaggtggccaagaaagttcccaagccggaggcatccaagcctaagaaagcggcccccaaaacaaggagatataagagtaccttaaagacgaaa

SEQ ID NO: 4854 - DNA, 427 bp, Homo sapiens
  SIMILAR (178)..(83): 411254mologous to Naja naja cardiotoxin 3,accession number Z54227,Smith-Waterman Score=61.
aaagcagtgctggtcaagaggagtcaatttagaatagtcaaaaaagtcttattttaggcaactttgtctcatcttggctggccagcagactgctactgggatttataatgattctgtcttctctctttggataatctgggttttccagaagaaaattacaaagtcttgtccccgatggcagtgaaagttgttcaagtgaattacctcttcattgttgtttccctcttccattttcaaatgcagacatgcacatacgggactgctaatatctaaacatggtgaccatctgtttcaaaagagtcgccactcaactcgccggctagccaggcgggttcggcgactttcgctaccacgccgcttactcctccaaagctgcagctacgagctccgtggcagccgctgcactccttccggccctgccacgaaa

SEQ ID NO: 4855 - DNA, 1098 bp, Homo sapiens
  SIMILAR (575)..(1096): 291254mologous to Mus musculus type VI collagen alpha 3 subunit,accession number AF064749,Smith-Waterman Score=121.
atgactgtcagtttcctgaggcctccccagccacgcttcctgtacaggctgcagaactacctcacgctcagtttatccatggctaaaatctatggcaaagccagccctgatcaagagggtggagccgcctgccagtcccgtgctgtgcgcctgcactcctcagcccttgggcggtcaatgggatccggcgccgaggagcaggggacggcactcgtcggggaggctcaggctgcgcaggagcccacagtgccgggttggttgcaagtggcccagagtcttggatccctggtcctgttccaccgggagcagaaccacctcgacgcggggacagcggcctcgctcgctgcccagcgcccggacacccgagccgggccagcccccagcgccccgcagaagggtttgacgcacttgcggcgccctcgcgagtgccgggtgacagtcgccaactttcgcggaacaacacgcgctccagatgtgaggggagaggaggaaaaacgccgcccgcctgggctggggttcacaggcacgggccgcctcccgccgctcctccaggccgcgctcgggtgcacggacaccgcctccgcggcggcctcgggcccgggggagggaagcgcggtctcccgggctgttgccctcgcgcagcagacccgaggggccggcccgcgaaacttcgcgaagtggcgagagggggccacccggccgctcagcgcctttgtcgctccagcctcgccaccgcaccgggctcgagacgcccagcccagccccttggcccgatcccgcccgggcctcggcccgcgcccctcagctcggcggccctcacggcccgcgcccccgcccccacccccggagctccacagaggcgcccctcagagaggccgcgtcgcctcacagacccgcccaggagctcgagcgcgccccgcagccgacactcactcgtcactcaagtcgccggctagccaggcaggttcggcggccttcgctaccgcgccgcttactcctcagaagccgcagctgcgagctccgtggcagccgctgcactccttccggccctgccgcggcgtcacctcgcgcctgcgcacagcgccccctcccgactaa

SEQ ID NO: 4856 - DNA, 499 bp, Homo sapiens
  SIMILAR (166)..(74): 481254mologous to Homo sapiens Fragment of human secreted protein encoded by gene 89,accession number Y02883,Smith-Waterman Score=67.
agacgtgccggaccggaattgccgggtcgacgatttcgtaggtgacgccgcggcaggctcggaaggagtgcattggctgccacggagctcgcatctgcggcttctgaggagtaagcggcgcggtagcgaaggccgtcgaacctgcctggctagccggcgacgttgagtgacgactcttttgaaacagatggtcaccatgtttagatattagcagtcccatatatgcatgtctgcatttgaaaatggaagagggaaacaacaatgaagaggtaattcacttgaacaactttcactgccatcggggacaagagtggatcaatctccgagatgggcccatcaccatatctgactcctcagatgaggaaaggattccaatgctggtcaccccagctcctcagcagcatgaagaagaggacctggatgatgatgtcatcctgacagaaactttgtaattttcttctggaaaacccagattatccaaagagagaagacagaatca

SEQ ID NO: 4857 - DNA, 353 bp, Homo sapiens
  SIMILAR (3)..(296): 1001254mologous to Homo sapiens eukaryotic initiation factor 4AI,accession number D13748,Smith-Waterman Score=499.
accggagatacctgtcccccaaatacatcaagatgtttgtactggatgaagctgacgaaatgttaagccgtggattcaaggaccagatctatgacatattccaaaagctcaacagcaacacccaggtagttttgctgtcagccacaatgccttctgatgtgcttgaggtgaccaagaagttcatgagggaccccattcggattcttgtcaagaaggaagagttgaccctggagggtatccgccagttctacatcaacgtggaacgagaggagtggaagctggacacactatgtgactttatccgccatgcatggagatatggaccaaaaggaacgagacgtgattatgaggga

SEQ ID NO: 4858 - DNA, 410 bp, Homo sapiens
  SIMILAR (9)..(149): 971254mologous to Mus musculus put. altern. eIF-4A (aa 1- 370),accession number X03039,Smith-Waterman Score=245.
ccaacctccaggagtggaagctggacacactatgtgacttgtatgaaaccctgaccatcacccaggcagtcatcttcatcaacacccggaggaaggtggactggctcaccgagaagatgcatgctcgagatttcactgtatccgccatggtgtgtttgcccgctgccagcctgttgtgggtctgcccgtcagaagtgtcctacttgaagccagggttcctggaacccaggtgcctacctggtctgctgcatatttgttttctcttccagcatggagatatggaccaaaaggaacgagacgtgattatgagggagtttcgttctggctctagcagagttttgattaccactgacctgctggtgagtagagggaactgatagcaaaggcagaagggaggatccaaggtgatt

SEQ ID NO: 4859 - DNA, 534 bp, Homo sapiens
  SIMILAR (182)..(208): 881254mologous to Mus musculus put. altern. eIF-4A (aa 1- 370),accession number X03039,Smith-Waterman Score=39.
atgctttcttatgtgcttgaggtgaccaagaagttcatgagggaccccatttggattctggtcaagaaggaagagttgatcctggagagtatccaccaattctgcatcaatgtggaacaagagaagtggaagctggacacactgcgtgacttgtatgaaactctgaccatcacccaggcaagtcatcttcaccaacactcgaaggaagtgctgttcaaaggtgagggagatatagaaggaaaagtggagagaagaggcaatgaaaacaatgatcagtaccagtggctgtacaggagactggaacttacttcactaattcttcagtgtgaaggctttagaacagattacaactgggatcaagagcctgcaaaatctgcatcctccctgcctgtcattcaaactactgctgtagtggccacaatcggtagtaatacaacatccaagatagctcttgacgccctgcctttgatccatgaggaagcatgctataaaaattgggcttcccgggccaggcgcagtggctcaccccagtaa

SEQ ID NO: 4860 - DNA, 467 bp, Homo sapiens
  SIMILAR (9)..(263): 971254mologous to Homo sapiens eukaryotic initiation factor 4AI,accession number D13748,Smith-Waterman Score=421.
ggaattccaacgtggaacgagaggagtggaagctggacacactatgtgacttgtatgaaaccctgaccatcacccaggcagtcatcttcatcaacacccggaggaaggtggactggctcaccgagaagatgcatgctcgagatttcactgtatccgccatgcatggagatatggaccaaaaggaacgagacgtgattatgagggagtttcgttctggctctagcagagttttgattaccactgacctgctggtgagtagagggaactgatagcaaaggcagaagggaggatccaaggtgattccctctccaaggggacatcagtgcctctcaggaaagtagcagcttggaatataatctggcatgcctaaggcctttggggaactgggatgcttatttcctctgccttccttggctgcccacatggatgcctaagtgtcttccctccgggatagagtgtcctccgtg

SEQ ID NO: 4861 - DNA, 879 bp, Homo sapiens
  SIMILAR (20)..(793): 991254mologous to Homo sapiens eukaryotic initiation factor 4AI,accession number D13748,Smith-Waterman Score=1302.
cgcgcaattcccgacgagattagatctaaaagccacccaggccttggtcctagcacccactcgagaattggctcagcatatacagaaggtggtcatggcactaggagactacatgggcgcctcctgtcacgcctgtatcgggggcaccaacgtgcgtgctgaggtgcagaaactgcagatggaagctccccacatcatcgtgggtacccctggccgtgtgtttgatatgcttaaccggagatacctgtcccccaaatacatcaagatgtttgtactggatgaagctgacgaaatgttaagccgtggattcaaggaccagatctatgacatattccaaaagctcaacagcaacacccaggtagttttgctgtcagccacaatgccttctgatgtgcttgaggtgaccaagaagttcatgagggaccccattcggattcttgtcaagaaggaagagttgaccctggagggtatccgccagttctacatcaacgttgaacgagaggagtggaagctggacacactatgtgacttgtatgaaaccctgaccatcacccaggcagtcatcttcatcaacacccggaggaaggtggactggctcaccgagaagatgcatgctcgagatttcactgtatccgccatgcatggagatatggaccaaaaggaacgagacgtgattatgagggagtttcgttctggctctagcagagttttgattaccactgacctgctggccagaggcattgatgtgcagcaggtttctttagtcatcaactatgaccttcccaccaaccggggaaaactatatccacagaatcggtcgaggtggacggtttggccgtaaaggtgtggctattaacatggtgacagaagaagacaaga

SEQ ID NO: 4862 - DNA, 1764 bp, Homo sapiens
  SIMILAR (1396)..(1548): 781254mologous to Homo sapiens Human Y218 protein,accession number Y41245,Smith-Waterman Score=207.
atggcttctctggaggagggtatctacagccttaaaattaattccaaacgtagctcctataattccatgaaccctcaatttacagctggaagtgagggtcaaaatgaaactgaggaaccaaacaagttccagagcaggaagggtagacctcaagatagtggctcttcattgtctctgagtgttctccaggagatcctgggagatgacattccaaaagtaaaggaagaggctgtcattagttcacaatcagacctaggagagtgtccctactgtggagaaagaccagccaggaatgccactatctttgctcctcaaaaagagaaagagtcagccccagaaatgagcagctcctgtgacaagagggtgactgttaatcctcctgagaaattcagtgaggggcgacctaaaacacaaaatacactcatttgtgaaaaatgctctcagccttcaaattttctggatgactataacccccatgtaataatccaaaagcgacttagcaaccaaagtagagtcatttgtgaaaaaagctctccacctttaaatgttccggataactataactcccattcagtaattcaaaagcacaaagaaaagatggcaattgagcgcccctcttcagggagtgactggtctgatgtaggtggaaccacagtcatattctctgaagagaagccattctcactgtgtcttcctgtagtgtcagagcctccatactacgccactgactacaccacttttccacctcattatagtccttggcatgactacaccagctcttggttcagcagtaccaagtcttcttgctatccctccttgggcagcagcagtaacacattgcaggctgggaagagcagctgtagcagcagcagcagaagcaacaacaacatattccagggtgagaggagcagccaccagagcttcctgagtgattattccaccagttttccagtgagctccgaaaacacatccagagatctgaagatgacagaggaaggcagatccaagaattcttccttattttactactccagaaatgtggaagcagaggcgaaggaggagagagtatatcaagaggagacattaggacatccttatggaggacgtgcatctagctttccgccaaggaccatctggcagccagagcaaccgggtttcattgatacccactgtcatttagacttgctatattccaggctgcctttcaaaggcacctttaccaaattcagaaaaatttatagcaacaccttccccaaggagtttcagggctgcatttcttgcttctgcaatcctcaaaacctaagtgataacctgtgggaggatcagttgaaagatgatctggtttggggggtctttggctgtcgccctcattttgcccattattataacaactatcaagaaagaagtattttaaaagccttacgacaccccaaggctgtggcattcggcgaaatgggcttggattactccagtaagtgcaccacgcatatcccagagcagcagaaagtatttaagagactgctgcggctggccgtctctcttaaagaagcccatgatgatccactgccgagaagccgatgaagacctactgggcatcttgaaaaaatatgtgccctctgaccacaagatgtaccagcattgcttcactggcagttacccagtcatcaagcccctgttgagctgctttcccaacctgtatgtgggcttcatggcaattctgacttactcttctgctgagcaagcccgagaaactgtgaaaaagat

SEQ ID NO: 4863 - DNA, 1027 bp, Homo sapiens
  SIMILAR (494)..(781): 461254mologous to Homo sapiens mucin,accession number M74027,Smith-Waterman Score=178.
ccatggtccagcatagaggtgtttgtgtctctgtctgtgcctggggtctgcctcaacagcttcttaaggtttggattaattctataccagtcttattccacccaggtataaggtctgttcttgagtcctagccccaaattatcatattacctttagaaatctatcttctgtttcttccccagtgacatcagcagaaccggttttgcaggctgggcaggcaagggagctcagtttctcctctctgcatccagcctctcctttgcttgtgccctcaacccctgctctcacccttcatgcattcaatgccctggtactttttccttcttttcccctggaaaaagctgccaagagagaaaggcccaaatcaaaaattcagataacagcaagagttggaaagatgagaagaacttggagccctcataccaccatttctgctggtggaagtgtaaatggtgcatccactttgaaaaacagtctagtttgggaggccaagccagccgacaccacaaacccaacaccacccaccacccaccccaaccccggaccaacaccccccacaaacaccaaccgacaccccccaccacaccaccctctaacaaacaccccagcaccgccgcaccagccacccgcaaccacacccacccgcagacccagacaccaaactactgcccaaacactgaccacaccacccccactcacgacaccccaaatcctgtccccccgacgcgcagaacgccccccaacagaaccggaaagcgcaccaacacaagtcaaaactacaggttggtatcaccagcacccaagattcactgggaggcatagtagtgggctcaggatatatgacagggaggagaaatttctcatctcaaatgaaaagaagatattttctgaaaatagtttaaagtctgaagaacctatcctatggaccaagggtgagattcttggaaagggagcctacggcacaaataaactcaaagccggcaatgccctggcatttttgggtcttgagagaaaacaatttgaatga

SEQ ID NO: 4864 - DNA, 759 bp, Homo sapiens
  SIMILAR (756)..(532): 361254mologous to Sphingomonas paucimobilis OH-DDVA meta- cleavage compound hydrolase,accession number AB018415,Smith- Waterman Score=108.
gggaaaatcattttttatttgcacatgaaataatgtactgcttttcagaatgaaaacacttacaaatcatttttattatgaataatttaggatatttgggacattcatttctgagtaaaatagttcaaaataggattttgttgatacctgttgatacatatttagaaacaaaaatgagatatccttttgaaagtttgcctttgtagtaaattcagtcattcaaattgttttctctcaagacccaaaaatgccagggcattgccgagctttgagtttattctttgtttcttcatcaaattcttccatgggactctattagtttcccaggttccagctcacctagtgggaaaggggggtaatcgggttcccaaaatgactttatcctttcctatggacatctggttaacagcttgaggggacagaggatcatgaaccaaagcatctgtgtaaaaggaaccaaggtatttctccgggttcatgggggttgtcctgggcacacagatctgggcgcatgctgaatccatgggagattcttcccactgtgaaggggaaggcaccaccaccatgtgcgaaacacactttcagtttgggaaacttctcaaatactccacccatgatcatggagcaaatggctatggtggtctctgctggcattcctacaagccaagggagccagtatttggccattcgtccatccatctgcatgtccccaggatgcacgaacaaggaacactttagcctttcggctggcgcatagac

SEQ ID NO: 4865 - DNA, 429 bp, Homo sapiens
  SIMILAR (8)..(82): 571254mologous to Homo sapiens p40,accession number U93564,Smith-Waterman Score=73.
atgaggaaaaacaagcacaaaaagccagaacgcctcttctcctccaaaggatcacaactcctcgccagcaagggaacaaaactgatcgagaatgaatttaacgaattgacagaagtaggcttcagaagaataactagcttagagaagaacataaatgacctgatggagctgaaaaacacagcacgagaacttcgtgaagcatacacaagtatcaatagccaaatcaatcaagtggaagaaaggatatcagagattgaagatcaacttaatgaaataaagcatgaagacaagattagagaaaaaagaatgaaaaggaaccaacaaagcctccaagaaatatgggactatgtgaaaagaccaaacctacgtttgattggtgtacctgaaagtgacattgagaatggaaccaagttggaaaatactctttag

SEQ ID NO: 4866 - DNA, 2267 bp, Homo sapiens
  SIMILAR (1235)..(2266): 861254mologous to Homo sapiens putative p150,accession number U93563,Smith-Waterman Score=1521.
atgacaggacagtttcaggatgtggtgagggaagaggccagaccattgccaaatagaataatgagacttcgtttcaatcattttgctacagagtgtagttgggaccatttatatgtttatgatggggactcaatttatgcaccgctagttgctgcatttagatgtgaggtagaaaatcgataccaaggaaaccctctcagaggaacatgttattatactcttcttattgactatcagttcacctttagtctatcccaggaagatgatcgctattacacagctatcaattttgtggctactcctgacgaagagacacctcccatcaggggtcgacagacagctcatacaggagagctccagctgacatctggtggatacccctctgggatgaagcttccagaggaaggaacaggtgaaaggaataggatcaccatcaacaaaaaggacgtccatacagaaaccccatccaaaggtcaccaacatcaaagaccaaaggtagataaatccacgaagataaagaaaaaccagcgcaaaaaggctgaaaattccaaaaacaagaacgcctcttcttctccagaggatcacaactcctcgccagcaagggaacaaaactggatggagaatgagtttgatgaattaacagaagtaggcttcagaaggtgggtaataacaaactcctccaagctaaagaagcatgttctaacccaatgcaaggaagctaagaaccttgaaaaaaggttagggcaattgctaactagaataaccagtttagagaagaatgtgaaagagctgatggagctgaaaaacaaagcacaagaactttgtgaagcatacacaagtatcaatagccaaatcgatcaagcagaagaaagcatatcagagattgaagatcaacttaatgaaataaagcatgaagacaagattagagaaaaaagaatgaaaaaggaacaaacaaagcctccaagaaatatgggactatgtgaaaagaccaaacctgcgtttgattggtgtacctgaaagtgatggggagaatggaaccaagttggaaaacactcttcaggatattgttcaggacaacttccccagcctcgcaaggcaggccaacattcaaattcaggaaatactgaaaacgccacaaagatacttctcaagaagagcaaccccaagaaacataatcatcaccttcaccaaggttgaaattaagggaaaaatgttaagggcagtcagagagaaagaccacagtgcaatcaaattagaactcaggattaagaaactcactcagaactgcacaactatgtggaaactgaacaacctgctcctgaatgaatactgggtacataacgaaattaaggcagaaataaataagttctttgaaaccaatgagaagaaagacacaacataccaggatctctgggacacagctaaagcagtgtttaaagggaaatttatagcattaaatgcccacaggagaaagtgggaaagatctagaatcgacacccttacatcacaattaaaagaactagagaagcaagagcaaacaaattcaaaagctagcaaaagacaagaaataactaagatcagagcagaattgaaggagatagagacacaaaaaacccttcaaaaaattaatgaatccaggagctggttttttgaaaagattaacaaaatagatagactgctagccagaccaataaagaagaaaagagagaagaatcaaatagacacaataaaaaatgataaaggagatatcaccactgaacctacggaaatgcaaactactatcagagaatactataaacacctctatgcaaataaactagaaaatctagaagaaatggataaattcctggacacatacaccctcccaagactaaaccaggaagaagttgaatccctgaatagaccaacaacaagttctgaaattgaggcaataattaatagcctaccaaccaaaaaaagcccaggaccggatggattcacagctaaattataccagaggtacaaagaggaggtggtaccactccttctgaaactattccaaacagtaggaaaagagggacccctccctaactcattttactgggccaacatcatcctgataccaaaacctggcagacacacaacaaaaaaagaaaatttctggccaatatccctgatgaacattgatgcaaaaatcctcaataaaatacgggcaaaccaaatccagcagcacatcaaaaagcttatccgccacgatcaaatgggcttcaaccccgggatgcaagggg

SEQ ID NO: 4867 - DNA, 769 bp, Homo sapiens
  SIMILAR (747)..(430): 471254mologous to Homo sapiens p40,accession number U93568,Smith-Waterman Score=235.
ttagtttggctggatatgaaattctgggttgaaaattctttctttaagaatgttgaatattggcccccactttcttctggcttgtagggtttctgccaagagatctactgttagtctgatgggcttcgctttgtgggttacctgaccttttctctctggctgcccttaacattgtttccttcatttcaaccttggtgaatctgacaattatgtgtcttggggttgctcttctcgaggagtatctttgtggtgttctctgtatttcctgaatttgaatgttggcctatcttgctagttcggggaagttttcctgaatagtatcctgaagtgtgttttccaacttgtttccattctccctgtcattttcaggtacaccaatcaaacgtagttttggtctttttcacatagtcccatatttgttggaggctttgtttgttccttccttctcattcttttttctctaatcttgtcttcacactttatttcattaagttaatcttcaatctctggtatcctttcttccacttgatcgatttgactattgatacttgtgtatgcttcacgaagttctcgtgctgtgtttttcatctccatcaggttatttatgttcttctctaaactggttattccagttagcagttcctataaccttttatccagattcttagcttcctcgcattgggttagaacatgctcctttagcttggaggagtttgttattactcaccttctgaagccgtcgacgcggccgcgaatttagtagtagtag

SEQ ID NO: 4868 - DNA, 412 bp, Homo sapiens
  SIMILAR (250)..(345): 961254mologous to Homo sapiens Gag-Pro-Pol-Env protein,accession number AF164611,Smith-Waterman Score=173.
  misc_feature (1)...(412): n = a,t,c or g
ctctttgggtctgcatgtttctctaatgnnnnnnnnnnnnnnnnnnnnnnnnnnnnnnnnnnnnnnnnnnnnnnnnnnnnnnnnnnnnnnnnnttcaatcaagaaaagacctttgatcaggagaagacttctcgtctcatttctggggacacattcaggatttctccaaagcaggtgaaggtacgctcgagcgtggtcattgaggacaagtcgacgagagatcccgagtacatctacagtcagccttacggagaaaatcagcttcctgtttggatacccactagacatttgaagttctacaatgaacccattggagatgcaaagaaaagggcctccacggagatgtctgcaggtgtacccaacagctccgaagagacagcgaccatcgagaacgggccatgatgacgatggt

SEQ ID NO: 4869 - DNA, 1540 bp, Homo sapiens
  SIMILAR (151)..(696): 771254mologous to Homo sapiens Gag-Pro-Pol-Env protein,accession number AF164611,Smith-Waterman Score=704.
atgccaattcagatgcagtatccacaatataagctggtagaaaataagacccaaccaccagtaatttatcagtactggccgccagccgaccttcagtatcggccacctccagaggttaaatacagacctcaagtggtgtgtcctgtgccaaatagcacggcaccataccagcaacccacggcagtggtgtttaatcctaccgcaccacctagtggacaaggcattattgctcaaaatacagatcttgtggagtggttcttccttcctcatagtacaattaagacttttacattgtacttggatcaaatggctacattaattggtcaggcaagattacgaataataaaattgtgtgaaagtgactcagataaaatcattgttcctttaaacaaggaacaggttagacaagcctttatcaattctggtgcatggcagattggtcttgctgattttgtgggaattattgacaatcattacccaaaaacaaaaatcttccagtttttaaaattgactacttggattttacctaaaattactagacataaacctttagaaaatgctctgacagtgtttactgatggttccagcaatggaaaagcggcttacaccaggccaaaagaacgactcattgaaactcaatatcactgggctcaaagagcagagttggttgctgtcattacagtgttaacaagattttaatcagtctattaacattgtatcagattctgcatatgtagtacaggctacaaaggatgttgagacagccctaatcaaatatagtatagatgatcagttaaaccagctgtttaatatgttacaacaaactgtaagaaaaagaaatttcccattttatgttactcatattcgagcacatactaatttaccagagcctttaactaaagcaaatgaacaagttgacttgctagtatcatctgcattcctggaagcacaagaacttcatgccttgactcatgtaaatgcaacaggactaaaaaataaatttgacatcacatggaaacaggcaaaaaatattgtacaacattacacccagtgtcagattccacacctgcccactcaggaggcaggagttaatcccagagaacaacattttactggtaaaaagaatagcccacatgaaggaaaactgatttggtggaaagacaagaaaaataagacatgggaaatagggaaggtgataacatgggagagaggctttgcttgtgtttcacaaggagaaaatcagcttcctggttggatacccactagaaatttaaagttctacaatgaaccccttggagatgcgaagaaaagcgcctctgcggagacaaaaaaccctcaattgagcatcatcgactcgccagggaaggcaccaggatgtttaatgcctacaacccaaaactggttggtagaagtacctaccgtcagtgccaccagtaaatttacttatcacatggtgtatccaccagctccgaagagacagcgaccagcaagaacgggccataacgacgatggcagttttgtcaaaaagggggatatgtag

SEQ ID NO: 4870 - DNA, 759 bp, Homo sapiens
  SIMILAR (73)..(501): 541254mologous to Homo sapiens thyroid hormone receptor- associated protein complex component TRAP240,accession number AF117754,Smith-Waterman Score=392.
tttcgtatggttatcaggtgccttccacagagggaactggactgcgacagagggaactggactgcgacgtctgctgaactcacgggaatcaaatggcgtaggtacaattttggagggcatggggactgtggacccataatttcagtcccagcccaagatgatccaattctgttaagtttcatccgctgtctgcaagctaacctgctttgtgtatggcgtcgtgatgtctaaccagattgctgagagttatggatattctgttggggagatgaacccaacctagtgggtgtaatacatcatgaactgcaggttgtggaagaaggactctgggaaaatggcctttcctatgaatgtaggacgctgctcttcaaagcgatacacaatctgttagaaaggtgcctaatggataagaacttcgttaggattgggaaatggtttgtccgaccctacgaaaaggatgaaaagccagtcaacaaaagtgagcatttgtcctgtgcctttcacattctttctgccatggagaaagtaatgtatgcacaagtgtggagattgcccagcaccagccaatttatttgatcaatgaggagcatatacacatggctcagtcttcacctgcaccatttcaagtactggtaagtccttatggcttaaatgggacgctaacaggccaagcatacaagatgtcagacccagccactcgtaagttgattgaggaatggcagtatttctacccgatggtgctaaaaaaaaaaaaaaaaa

SEQ ID NO: 4871 - DNA, 1504 bp, Homo sapiens
  SIMILAR (274)..(348): 1001254mologous to Homo sapiens Human secreted protein, SEQ ID NO: 6894,accession number G02813,Smith-Waterman Score=140.
atgaggcatccttgtgatggaaatagtctgtattttgaccatatcagtgtcaatatgctggctgtgatgttgtactacggttttggaagagttagcattgggaaaactgggttaaggggtgttcagcgtcatctctggcccctgccattggatgccagcagtaccaagacagtgtcgtcgagccacagtgataaaggtgaaatcttttcaccttttccttgtagcttaattaattgcaacaattttgaaatgcgaaacaccacaaagtgcctaatggataagaacttcgttaggattgggaaatggtttgtccgaccctacgaaaaggatgaaaagccagtcaacaaaagagttacttctcaggagatctggctgtttgatgagtatgtgtgtgtctctcccctgctttgcagtggaaagatgtgccttgcttcccctttgccttctaccacgattgatgatatccataagctccacgagcagacaaccacagtacataagcagaagaggattaaaagccaagatttcatgggtggtttagtaagctgctggcagcccaaaagggtcacaatgtttttctctgtggaaggttctttgcagtatagtaagcacacaaggattgacattgcccttgtacatatcgtgctgacattcttctttgtggttgtggaagaaggactctgggaaaatggcctttcctatgaatgtaggacgctgctcttcaaagcgatccacaatctgttagaaagaagaatacgaacaaatgcgaaaatgaattacattcttttaagttttgtactggcaatggtagcatgtttctttgtcgagagacaattagaagagcagaaaaactgggagggaggggaaatgcagtattatcagctgtcagatgcatctgaggctgattacggcaggcacatagaactttccagtgctagattcacgaagaacccctgtaccctgaagcttatgttagataaagaggccagtatgcttgctcattgttgggtttgttgctgttacgtacagggactggagtacaggacagggaagggtggtaacaacattgaagctgtaaagaaagtgaaagaactgaagacctcttgggtggtccctggaattctctctcaatgttcttttctgcaagggaagcagcggccaagctggaatgctcacaaagctacagcgtctttttatgggttccatctagctctagagttttatgattcagtaaggtatttcacgttttctcatgaaaacgtttacaacaccaaaataataccttttgatccaagcctattagcgctgtgggcagtgctagagttcatttcaccgctgaagttacattttgccacacagtcttcaacaaagctcaagacatctgacttccttttcctgtatctggctgtctcctccaagcggcattccctacctgaccctctaatggaaagtagtcctgtcccagtcagtcactttctcatctattgctttgtagcagacaact

SEQ ID NO: 4872 - DNA, 1017 bp, Homo sapiens
  SIMILAR (213)..(584): 681254mologous to Mus musculus Pro-Pol-dUTPase polyprotein,accession number Y12713,Smith-Waterman Score=418.
atgaagctggttggttgctcctaagttcagtggacgaagtgatgaaagaaaatgatgaactcagggattctatctcccagcttcagaagcagatactgagtctcaaatctgctaagattgccctgactgagagtcttatctcctttagagaaagagctgaaattgtggaaaaacagacacaagctcttatcatgtgagtggctgacctgcaacaaggaaatgatcagacatttcagggactactggacactggctctgagctgacgttgattccaggggacccaaaacatcattgtggtcctccaggaccaaaagtaagggcttatggagatcaggtaattaacggagttttggctcaggtccaacttatagtgggtccagtgggcccctggactcatcctgtggtcatttccccagtgccagaatgcgtaattggcatagccatacttaacagctggcagaacccccacattggctccctgactggtagggtgagggctattatggtgggaatcagctggcaaggccagcaatatacctttactgtcctacctcaaagatatatcaactttccagctttgtgtcataaaacagcaaaaagacacacagctaggaggtaaccacagattgcactagaagccaggatccagacaagcccctgcagacccaggaactacaactgccacaacatgaggccaaacccagactctagaccagactctgtgttctcagagtccagaagacaaagggtccaggattgccctaacagacccaggatccaggcccatcccagtagacccaaataccaggccagttccccatgcactgaggatccagtaccatccctgaagacccatgctcaaggtcagacaccatggacccaggaccctttcagactcaggctcaagggccaccccaagagcaagccagcccccatggacccaggcttcaggctagctcctgtgaatacagattccaggcccaaccccacccaggtaacacgtccacccacctgct

SEQ ID NO: 4873 - DNA, 1268 bp, Homo sapiens
  SIMILAR (885)..(1193): 721254mologous to Mus musculus Pro-Pol-dUTPase polyprotein,accession number Y12713,Smith-Waterman Score=388.
tccaagtcccaaaactgaagaaccctgactaatacagattttggtattgggagtggttctagaggaacagaatattaaggatggagttctttgattggttttgggctttctggagttggctgcttaatatgattagatcccaaaatgctaaggattctagttctaatagtatggagaacactgatagtccttggtgtgaactgtttagagaattatgcaaaataaatgcacttgacgttcctgattcactgcttgtgagaggcaatgagtttagtgcctctgtacataatacttttgaccatatgtggagaaccaaggaacgatatgaagccggttggttgctcctaagttcagcggacagagtgatgaaagaaaatgatgaactcagagattctgtctcctggcttcagaagcagatactgagcctcaaatctgcgaagattgccctgagtgggagtcttatctcctatagagaaagagctgaaattgtggaaaaacagacacaaactcttatcatgcgagtggctgacttgcaacaaaaggggtatatcaactctccggctttgtgtcataatcttatttggagagaccttgatcacttttcctttccatacgatatcacactgtttcattacattgatgacattatgctcattggatccagtgagcaagaggtagcaaacacactggacatattgaaagggcagaggtttgtcctcactgtaatagatacttactccagatattggtttgcctctcctgaatgcaatgcttctgccagactaccattcatggattcacggaatgcattatccactatcatggtattccacacagcattgcttcttaccaaggcactcactttatggctgaagaaccaggatgggtccaagaatcaaggggtggaagtgacaccattcaccatcacccctagtgatccagtagcaacatttttgcttcctgttcccatgacattacgttctgctggcctagaggtcttagttccagagggaggaacactgccaccaggagacacaacaatgattccattaaactggatgttaagactgccacctggacactttgggctccttctacctttaagtcaacaggctaagaagggagttacagtgttggctgtggtgattgacccagactatcaagatgaaatcagtctactattccataatggagcaattattagcgacggcaatggggttatcttgattggcttgcttcagtggttctcaaccctggatgcaatttag

SEQ ID NO: 4874 - DNA, 2212 bp, Homo sapiens
  SIMILAR (1640)..(2041): 881254mologous to Homo sapiens putative p150,accession number U93569,Smith-Waterman Score=639.
caagcaggatatcaagtccacaaactgctctaagacaaggctgacggcaaagtgcctacagacatcgccacaaagactgcatgagctctgcatcgtgccaatcacacacatcacacctcgtgctaccttcccaacaagccgtggggataaacacgcctatggcttccattttaacggatcaagttggttcacttgttcagcctggccaaactaccccagtcccgcctccgagcaccgcccgctgcggcccggggcgccggagcccccggcccggagcgacgccccttccgcccgccgcgcctccgcggggcccggcgtcccggccgcggccgcccagcgctcagacaatgacggcgcggggacccgcctggccgtcccgggccccgcggggacgccaaccacaaataggggtgttaccatgaaagagccacgcaaccacagggaagcacagctgcccgagcagcaggtctgcgggcacagcagcttcccctggaaggagcgtggccctggcaggcctgctgaggcttgtccagtccagtactatgaacgctgtgacaaagctgacaaagttggctgccctgggacctggttcctatggacttctgcgggctctgagcaggtcagcctgcatcttccaggcagtgatagcttctcccagggcagctgcaaaccaaaattcaaaaaggacaagttgggccgtcaagccccagacagccaggtatacctcatgctaaagcttatgatcttgtctgcggaaagaatatggttttctaggttagaattccaacccttccagcagggtattcctcacagcatgctaattgtcattattattcttgtcaatgtttttttggctaaggaaataacaaggaagcagattctgaaattggacacaggattggtaaaagtcctgtgcacattggcagaaagcttatcaggaagtgagaatgcccttcctattgccttctctgtgtccatgtgttctcattgttcagttcccacttacaagtgtaaggattgcagctcctcaccagcaatggaacaaagctggatggagaatgactttgacaagttgatagaagtacgcttcagaagaataaacagtgcagagaagaccttaaatgacctgatggagctgaaaaccatggcacaagaacttcgtgacacatgcacaagcttcaatagccgatttaatcaagtggaagaaaggatatcagtgattgaagatcaaattaatgaaataaagcaagaagacaagaaatacaaactaccatcagaatactataaacatctctatgcaaataaactagaaaatctagaagaaatggagaaattcctggacacatacactctcccaatactgaaccaggaagaagttgaacctctgaatagaccaatgacaggctctgaaattgaggcaataatttatagcctaccaacaaaaaatgtccagggccagatggattcacagtcaaatactaccagagtatggggcattctggccagggcaatcaggcaagagaaagaaataaaggatattcaattagaaaatgaggaagtcaaattgtccctgtttgcagatgacatgactgtatatttagaaaactccatcgtctcagcccaaaatctcctcaagctgagaataaaatacctaggaatccaacttacaacagatgtgaaggacctcttcaaggagaactacaaaccactgctcaacaaaataaaagaggacacaaacaaatggaagaatattccatgctcatggataagaggaatcaatatcatgaaaatggccatactgcccaaattaatttacagattcaatgccatccccatcaagctaccaatgactttcttcacagaattggaaaaagctactttaaagttcatatggaaccaaaaaagagcccacattgccaagacaatcctaagcaaaaagaacaaagctggaggcatcatgctacctgacttcaaactatactacaaggctacagcaaccaaagcagcatggtactggtaccaaaacagagatatagacaaaaaactcacacaaatttacaagaaaaaaacaaacaaccccatcaaaaagtgggcaaaggatatgaacagacacttgtcaaaagaagacatctatggagccaacagacacatgaaaaaatgctcatcatcactggtcatcagagaaaagcaaatcaaaaccacaatgagatag

SEQ ID NO: 4875 - DNA, 3252 bp, Homo sapiens
  SIMILAR (1086)..(1121): 831254mologous to Homo sapiens putative p150,accession number U93563,Smith-Waterman Score=69.
atggatacattcctcgacacatacactctcccaagactaaaccaggaagaagttgaatctctgaatagaccaataacaggagctgaaattgtggcaataatcaatagtttaccaaccaaaaagagtccaggaccagatggattcacagctgaattctaccagaggtacaaggaggaactggtaccattccttctgcaactattccaatcaatagaaaaagagggaatcctccctaactcattttatgaggccagcatcattctgataccaaagccgggcagagagacaaccaaaaaagagaattttagaccaatatccttgatgaacattgatgcaaaaatcgtcaataaaatactggcaaaacgaatccagcagcacatcaaaaagcttatccaccatgatcaagtgggcttcatccctgggatgcaaggctggttaaatacatgcaaatcaataaatgtaatccagcatataaacagagccaaagacaaaaaccacatgattatctcaatagatgcagaaaaagcctttgacaaaattcaacaacccttcatgctaaaaactctcaagaaattaggtactgatgggacgtatttcaaaatagtaagagctatctatgacaaacccacagccaatatcatactgaatgggcaaaaactggaagcattccctttgaaaactggcacaagacagggatgccctctctcaccattcctattcaacatagtgttggaagttctggccagggccatcaggcagaaggaaataaaaggtattcagttaggaaaagaggaagtcatattgtccctgtttgcagatgacatgattgtatatctagaaaaccccattgtctcagcccagaatctccttaagctgataagcaacttcagcaaagtctcaggatacaaaaccaatgtacaaaaatcacaagcattcttatataccaataacatacaaacagggagccaaatcatgagtgacctcccattcacaattgcttcaaagagaataaaatacctaggaatccaacttacaagggacatgaaggacctcttcaagaactacaaaccactgctcactgaaatgaaacaaagaaatggaagaacattccatgctcatggaattggaaaaaactactttaaagttcataggaaccgaaaaagagcccgcatcgccaagtcaatcctaagccaaaagaacaaagctggaggcatcacactacctgacttcaaactatactacaaggctacagtaaccaaaacagcatggtactgggaccaaaacagagatatagatcaatggaacagaacagagccctcagaaataacgccacatatctacaactatctgatctttgacaaacctgagaaaaacaagcaatggggaaaggaatccctatttaataaatggtgctgggaaaactggctagccatatgtagaaagctgaaactggatcccttccttacaccttatacaaaaattaattcaagatggattaaagacttaaaccttagacctaaaaccataaaaaccctagaagaaaacctaggcattaccattcaggacataggcatgggcaaggacttcatgtctaaaacaccaaaagcaatggcaacacaagccaaaattgacaaatgggagctaattaaactaaagagcttctgcacagcaaaagaaactatcatcagagtgaacaggcaacctacaaaatgggagaaaattttcacaacctactcatctgacaaaggtctaatatccagaatctacaatgaactcaaacaaatttacaagaaaaaaaaacaaccccatcaaaaagattttgcctaccattttacagtatttgtcttctattttggagcctttttattggaagcagcagccacatccctgcatgatttgcattgcaatacaaccataaccgggcagccactcctgagtgataaccagtataacataaacgtagcagcctcactatcacctacctttgcaggtctgggtgaattatctggtggtgtgacccacacactcattcttgaagggtctgaaaccaagacaacagtaactttttcagttatatccaggtggtcttcagattatgacatacaacaggagaattatgccagtcccagtacaaatctgtcaacgtcagatgtggccaatatgatgattcaggcctttcccaaaaatctccttaagctgataagcaacttcagcaaagtctcaggatacaaaatcaatgtgcaaaaatcacaagcattcctatacaccaataacagacaaacagagagccaaatcatgagtgaactcccattcacaattgcttcaaagagaataaaatacctaggaatccaacttacaagggatgtgaaggacctcttcaaggagaactacaaaccactgctcaatgaaataaaagaggatacaaacaaatggaagaacatttcatgctcctgggtaggaagaatcaatattgtgaaaatggccatactgcccaaggtaatttacagattcaataccatccccatcaagctaccaatgactttcttcacagaattggaaaaaactactttcaagttcatatggaaccaaaaaggagcccgcattgccaagtcaatcctaagccaaaagaataaagctggaggcatcacactacctgacttcaaactatactacaaggctacagtaaccaaaacagcaaagtactggcaccaagacagagatacagacgaatggaacagaacagagccctcagcaataatgccgcatatctacaactatctgatctttgacaaagctgacaaaaacgagaaatggggaaaggattccctgtttaataaatggtgctgggaaaactggctagccatatgtagaaagctgaaactggatcccttccttacaccttatacaaaaattaattcaagatggattaaagacttacatgttagacctaaaaccctagaagaaaacctaggcaataccattcaggacataggcatgggcaaggacttcatgtctaaaacaccaaaagcaatggcaacaaaagccaaaattgacaaatgggatctaattaaactaaagagcttctgcacagcaaaagaaactaccatcagagtgaacgggcaacctacagaatgggagaaaatttttgcaatctactcatctgacaaagggctaatatccagaatctacaatgaactcaaacaaatttacaagaaaaaaacaaccccatcaaaaagtgggcaaaggatatga

SEQ ID NO: 4876 - DNA, 1362 bp, Homo sapiens
  SIMILAR (1)..(1359): 911254mologous to Homo sapiens putative p150,accession number U93563,Smith-Waterman Score=2146.
atggataaattcctcgacacatacaccctcccaagactaaaccaggaagaagttgaatctctgaatagaccaataatcggctctgaaattgaggcaataatcaatagcttaccaaccaaaaaaagtccaggaccagatggattcacagccgaattctaccagaggtacaaggaggaactggtaccattccttctgaaactattccaatcaacagaaaaagaggaggccagcatcatcctgataccaaagcctggcagagacacaaccaaaaaagagaattttagaccaatatccttgatgaacatcaatgcaaaaatcctcaataacatactggcacaccgaatccagcagcacatcaaaaagcttatccaccatgatcaagtgggcttcatccctgggatgcaaggctggttcaacatgcacaagtcaataaatgtaatccagcatataaacagaaccaaagacaaaaaacacatgattatctcaatagatgcagaaaaggcctttgacaaaattcaacaacccttcatgctaaaaactctcaatacattaggtattgatgggacgtatctcaaaataataagagctatgtatgacaaacccacagccaatatcatactgaatgggcaaaaactggaagcattccctttgaaaatgggcacaagacagggatgccctctctcaccactcctattcaacatagtgttggaagttctggccagggcaatcaggcaggagaaggaaataaagggtattcagttaggaaaagaggaagtcaaattgtccctgtttgcagatgacatgattgtatatctagaaaaccccatcatctcagcccaaaatctcctcaagctgataagcaacttcagcaaagtctcaggatacaaaatcagtgtacaaaaatcacaagtattcttagacaccaataacagacaaacagagagccaaatcatgagtgaactctcattcacaattgcttcaaagagaagaaaatacctaggaatccaacttacaagggatgtgaaggacctcttcaaggagaactacaaaccactgctcagtgaaataaaagaggatacaaagaaatggaagaacattccatgctcatgggtaggaggaatcgatatcatgaaaatggccatactgcccaaggtaatttacagattcaatgccatccccatcaagctaccaatgactttcttcacggaattggaaaaaactactttaaagttcatgtggaaccaaaaaagagcctgcatcgccaagtcaatcctaagccaaaagaacaaagccggaggcatcacgctacctgacttcaaactatactacaaggctacagtaaccagaacagcatggtactga

SEQ ID NO: 4877 - DNA, 948 bp, Homo sapiens
  SIMILAR (119)..(181): 1001254mologous to Homo sapiens putative p150,accession number U93563,Smith-Waterman Score=115.
atggataaattcctggacacatacaccctcccaagactaaaccaggaagaagctgaatccctgaatagatcaataacaggctctgaaattgaggcaataactaatggactaccaaccaaaaaaaagcccaggaccagacggattcacagccgaattctaccagaggtacaaagaggagctgtgttggaagttctggccagggcaatcaggcaggagaaagaaataaaggctattcaattaggaaaagaggaagtcaaattgtccctgtttgcagatgacatgattgtatatttagaaaaccccatcatctcagcccaaaatctccttaagctgataaggaacttcagcaaagtctcaggatacaaaatcaatgtgcaaaaatcacaagcattcctatacaccaatcacagacaaacagagagccaaatcatgagtgaactcccgttcacaattgcttcaaagagaataaaatacctaggaatccaacttacaagggatgtgaaggacctcttcaaggagaactacaaaccactgctcaacaaaataaaagaggacacaaacaaatggaggaacattccatgctcatggataggaagaatcaatatcgtgaaaatagccatactgcccaaggcaatttatagattcaatgccgtccccatcaagctaacaatgactttcttcacagaattggaaaaaactactttaaagttcatacggaaccaaaaaagagcccatatagccaagacaatcctaagcaaaaagaacaaagctgaaggcatcatgctacctgacttcataccatactacaaggctacagtaaccaaaacagcatggtactggtaccaaaacagagacatagaccaatggaacagaacagagccctcagaaataataccacacatctacaaccatctgatctttgacaaacctgagaaaaacaagaaatag

SEQ ID NO: 4878 - DNA, 984 bp, Homo sapiens
  SIMILAR (1)..(669): 921254mologous to Homo sapiens putative p150,accession number U93569,Smith-Waterman Score=1062.
atgaaggcagaaataaagatgttctttgaaaccaacgagaacaaagacacaacataccagaatctctgggacacatgcaaagcagtgtgtagagggaaatttatagtactaaatgcctacaagagaaggcaggaaagatctaaaattgacaccctaacatcacaattgaaagaactacagaagcaagagcaaacactttcaaaagctaacagaaggcaagaaataactaagatcagagcagaactgaaggaaatagagacagaaaaatcccttcaaaaaatcaatgaatccaggagctggttttttaaaaagatcaacaaaattgatagactgctagcaagactaataaagaaaaaaagagagaagaatcaaatagacgcagtaaaaaatgataaaggggatatcaccactgatcccacagaaatacaaactaccatcagagaatactataaacacctctatgcaaataaactagaaaatctagaagaaatggataaattcctcgacacatacactctcccaagactaaaccaggaagaagttgaatctctgaatagaccaataacaggctctgaaattgaggcaataattaacagcttaccaaccaaaaaaagtccaggaccagatggattcacagccaaattctaccagaggtacaaggaggagctgaattggaaaaactacttaaagttcagatggaaccaaaaaagagcccacatcgccaagtcaatcctaagccaaaagaacaaagctggaggcatcacgctgcctgacttcaaactatactacaaggctacagtaaccaaaacagcatgcttcctgaaatatgaacacggtgggaagagcttgagcagccacaccagaacaggatgtaagctgtgcactgaggatggtggtgcagaaagctgggagtctggctccctgatgacaggttatagccatcattacagcccctactccccacctttggatctagagaaataa

SEQ ID NO: 4879 - DNA, 3750 bp, Homo sapiens
  SIMILAR (2113)..(3645): 991254mologous to Homo sapiens IL-4 Stat,accession number U16031,Smith-Waterman Score=2606.
atggataaattcctggacacatacaccctcccaagactaaaccaggaagaagttgaatccctgaatagaccaataacaggctccgaaattgaggcaataattaatagcctatcaaccaaaaaaagtccaggaccagatggattcatagcccaattctaccagagaaccaaagataaaaaccacatgattatctcaatagatgcagaaaaggcctttgacaaaattcaacagcacttcatgctaaaaactctcaataaactaggtattgatgggacatacctcaaaataatcagagctgtttatgacaaacccacagccagtatcatactcaatgggcaaaaactggaagcattccctttgaaaactggcacaagacagggatgccctctctcaccactcctattcaacatagtgttggaagttctggccagggcaatcaggcaggagaaagaaataaagggcattcaattaggaaaagaggaagtcaaattgtccctgtttgcagatgacatgattgtatatttagaaaaccccatcgtctcagcccaaaatttccttaagctgataagcaaattcagcaaagtctcaggatataaaatcaatgtgcaaaaatctcaagcattcctacacgctaataacagacaaacagagagccaaatcatcagtgaactcccattcacaattgctacaaagagaataaaatacctaggaatccaacttacaagggatgtgaaggacctcttcaaggagaactacaaaccactgctcaatgaaataaaagaggacacaaataaatggaagaacattccatgttcatggagaggaaaaatcaatatcgtgaaaatggccatactgcccagggtaatttatagattcaatgccatacccatcaagctaccaattactttcttcagagaattggaaaaaactactttaaagttcatgtggaaccaaaaaagagcccacattgccaagacaatcctaagccaaaagaacaaacctggaggcatcatgctacctgacttcaaactatactacaaggctacagtgaccaaaacagcatggtacttgtaccaaaacaaatatatagaccaatggaatagaacagagccctcagaaataatactacacatctacaaccatctgatctttggcaaacctgacaaaaacaagaaatggggaaaggattccctatttaataaatggtgctgggaaaactggctagccatatgtagaaagctgaaactggatcccttccttataccttatacaaaaattaattcaagatggattaaagacttaaatgttagacctaaaaccataaaaatcctacaagaaaacctaggcaataccattcaggacataggcatgggcaaggacttcatgactaaaataccaaaagcaatggcaacaaaagccaaaattgacaaatgggatctaattaaactaaagagcttctgcacagcaaaggaaactaccatcagagtaaacaggcaacctacagaatgggagaaaatttttacaatctacccatctgacaaaggggcagaggagcctcaacctgcagccaccaccaccccaggccacagggagtactgccagacaactatcgatgttcccttaaggcccaacatctcttcaatcagcttgtgtgcctcttttagcaatatgaaattaaaaccaggaatctccctggcctctgagctgggtgatggcagctgtcctctaaggagcgtccctctgccttcagtctggctccccacactcacagccactgggctccctgcaaacaaagcaatcaatgatctccctttccccaaaaggaacaggattcatcactcggtgtttgatgtgaagtcccttcagctctccaagccccagtgtcctcgtgaatcaagcggagatcatcttaaagccctcaacagggacaagtgtgaaggaaccactggctcaccacctgcctctcccagtatgagcacagaaggtagtacaggccctggaggaccaccaggtagagccacatggctttgcagaggacagacccaggaaaggttggctgagcagtgggagctggcatattgtttgtaccaggcaacctccaagtcccagatcatgtctctgtggggtctggtctccaagatgcccccagaaaaagtgcagcggctctatgtcgactttccccaacacctgcggcatcttctgggtgactggctggagagccagccctgggagttcctggtcggctccgacgccttctgctgcaacttggctagtgccctactttcagacactgtccagcaccttcaggcctcggtgggagagcagggggaggggagcaccatcttgcaacacatcagcacccttgagagcatatatcagagggaccccctgaagctggtggccactttcagacaaatacttcaaggagagaaaaaagctgttatggaacagttccgccacttgccaatgcctttccactggaagcaggaagaactcaagtttaagacaggcttgcggaggctgcagcaccgagtaggggagatccaccttctccgagaagccctgcagaagggggctgaggctggccaagtgtctctgcacagcttgatagaaactcctgctaatgggactgggccaagtgaggccctggccatgctactgcaggagaccactggagagctagaggcagccaaagccctagtgctgaagaggatccagatttggaaacggcagcagcagctggcagggaatggcgcaccgtttgaggagagcctggccccactccaggagaggtgtgaaagcctggtggacatttattcccagctacagcaggaggtaggggcggctggtggggagcttgagcccaagacccgggcatcgctgactggccggctggatgaagtcctgagaaccctcgtcaccagttgcttcctggtggagaagcagcccccccaggtactgaagactcagaccaagttccaggctggagttcgattcctgttgggcttgaggttcctgggggccccagccaagcctccgctggtcagggccgacatggtgacagagaagcaggcgcgggagctgagtgtgcctcagggtcctggggctggagcagaaagcactggagaaatcatcaacaacactgtgcccttggagaacagcattcctgggaactgctgctctgccctgttcaagaacctgcttctcaagaagatcaagcggtgtgagcggaagggcactgagtctgtcacagaggagaagtgcgctgtgctcttctctgccagcttcacacttggccccggcaaactccccatccagctccaggccctgtctctgcccctggtggtcatcgtccatggcaaccaagacaacaatgccaaagccactatcctgtgggacaatgccttctctgagatggaccgcgtgccctttgtggtggctgagcgggtgccctgggagaagatgtgtgaaactctgaacctgaagttcatggctgaggtggggaccaaccgggggctgctcccagagcacttcctcttcctggcccagaagatcttcaatgacaacagcctcagtatggaggccttccagcaccgttctgtgtcctggtcgcagttcaacaaggtcattctcctgccctttggacctcccacccccaagctcttcatccctggggcactcagggcctgctcagcctccatgcagggaccttccactggattctccacagtgccccctcaggtcctttag

SEQ ID NO: 4880 - DNA, 1878 bp, Homo sapiens
  SIMILAR (1)..(1038): 891254mologous to Homo sapiens putative p150,accession number U93563,Smith-Waterman Score=1577.
atgggagactttaacacccctctgtcaacattagacagatcaatgagacagaaggttaacaaggatatccaggaatttaactcagctttacaccaagcagacttaatagacatctacagaactctccactccaaatcaacagaatgtacattcttctcagcaccacatcgcacttattccaaaattgaccacatagttgtaagtaaagcactccttagcaaaagtaaaagaaaagaaattataacaaactgtctctcagactacagtgcaatcaaactagaacttaggattaagaaactcacgcaaaaccactcaactacatggaaactgaagaacttgctcctgaatgactgctgggtaaataatgaaatgaaggcagaaataaagatgttttttgaaaccaatgagaacaaagacacaatacaccagaatctctgggacacatttaaagcagtgtgtagagggaaatttatagcactaaatgcccacaagagaaagcaggaaagatctaaaattgacaccctaacatcacaattaaaagaactagggaagcaagagcaaacacattcaaaagctagcagaaggcaaaaaataactaagatcagagcagaactgaaggagacagagacacaaaaaacccttcaaaaaatcaatgaatccaggagctggttttttgaaaagatcaacaaaattgatagaccactagcaagactaataaagaagaaaagagagaagaatcaaatagactcaataaaaaatgataaagaggatatcaccacccatcccacagaaatacaaactaccatcagagaatactataaacatctctacacaaataaactagaaaatctagaagaaatggataaattcctggacacatacaccctcccaagactaaaccaggaagaagttgaatctctgaatagaccaataacaggctctgaaattgaggcaataattaattgcttaccaaccaaaaaaagtccaggaccagacggactcacacccgaattctaccagaggtacaaggaggagctgggatgtgaaggacctcttcaaggagaactacaaaccactgctgaacaaaatgaaagaggacacaaacaaatggaagaacatgccacgctcatggataggaagaatcagtattgtgaaaatggctatactgcccaaggaaaaaacctgctcaactatccaattagcagccctgctggcagcccaggcaatggttctcagaagccaacagcaggaaatctggagagaagccactgtttatgtagcagaataaaggatgcaacttgtctgtttataactcatgaccttggcaggttttatacaaagtcttacttccttaaccaattgcaaataaaaaaaatctctaaatctacctcttgtgtccggaattggttccttccgtgggttcttggtctcgctgacttcaagaatgaagccgcggaccctcgtggaatgaagccgcagactttcgcagtgagtgttacagctcttaaacgtggcacacttctggcacgctttgctcctcccggtgggttgctggtctcgctgactgcaggagtgaagctgcagaccttcgcgtgtcagataccacaggctgtgggctcagtccccaagactgccccccttccttcagacaccaatcgcaagtctgggcctacagaacttccgaccaatcagcttcaagttgaagttcccatgaacccctctgtgggttcaattaatttgctggagtggctcacagaactctggggaacacttacgttgactggtgtattaaaaggatttaatgaagaggtgtataggaaattggcagttggggctgaaagtcccaaccctctaatcctgccttggtcattccagtga

SEQ ID NO: 4881 - DNA, 2241 bp, Homo sapiens; identical to SEQ ID NO: 3056
  SIMILAR (628)..(2232): 911254mologous to Homo sapiens putative p150,accession number U93563,Smith-Waterman Score=2478.

SEQ ID NO: 4882 - DNA, 3927 bp, Homo sapiens; identical to SEQ ID NO: 334
  SIMILAR (193)..(2223): 921254mologous to Homo sapiens putative p150,accession number U93572,Smith-Waterman Score=3267.

SEQ ID NO: 4883 - DNA, 1071 bp, Homo sapiens
  SIMILAR (61)..(888): 761254mologous to Homo sapiens putative p150,accession number U93563,Smith-Waterman Score=1036.
atggcagatttgatgactgattggaaggaagaaatacaaactaacatcagagaatactataaacacctctacacaaataaactagaaaatctagaagaaatggataaattcctggacacatacaccctcccaagactaaaccaggaagaagttgaatctgtgactagaccaataacaagttctgaaattgagggagtaattaatagcccaccaaccaaaaaaagctcaggaccagatggattcacagccgaattctaccagaggagctggttttttgaaaagataaacaaaattgatagaccactagcaagactaataaagaagaaaagagagaagaatcaaatagatgcaataaaaaatgataaaggggatatcaccactgatcccacagaaatacaaactaccatcagagaatactataaacacctctatgcaaataaactagaaaatctagaagaaatggataaattcctggagacatacaccctcccaagactaaaccaggaagaagttgaatctctgaatagaccaataacaggctctgaaattgaggcaataattaatagcttaccaaccaaaaaatgtccaggaccagatggattcacagccaaattctaccagagatacaaggaggagctggtaccattccttctgaaactattccaatcaacagaaaaagagggaatcctccctaactcattttatgaggccagcatcatcctgataccaacgcctggcagagacacaacaaaaaaagagaattttagaccaatatccctgatgaacattgatgcaaaaatcctcaataaaatactggcaaaccgaatccagcagcacatcgaaaagcttatccaccatgatcaagtgggcttcatccctgggatgcaagacgttgtatgttatcacctaaggtctaacccggaagacagtaaggacactgacagcagtggaaaatcaatggtggatgaggctgtgctgtcccgtgagaagagcaaacgaagagccctgatggggccctgccagttggcaactgtggccctgaacactttcggtgctgttgcatatttttga

SEQ ID NO: 4884 - DNA, 389 bp, Homo sapiens
  SIMILAR (129)..(248): 451254mologous to Deinococcus radiodurans citrate lyase, beta subunit,accession number AE002053,Smith-Waterman Score=92.
gcaacaagttaacaggagtgatgcacctctgatgtcaggcccccaatcacgtgtcttgcaggaaagcgtctctagcagctgatatccccagacttggatatagttcctcatcccatcacaagtacatcccccggagggcagtgctttatgtacctggaaatgatgaaaagaaaataaagaagattccatccctgaatgtagattgtgcagtgctcgactgtgaggatggagtggctgcaaacaaaaagataagagtcaatcctacaccagctcacgtggggaggagaggaggctctcgcggctgtcctggggatgaccgtcccggggatgaccgtccccaggatgaccgagagatgcctgcgctgtgcttgagcattgcctgggtttga

SEQ ID NO: 4885 - DNA, 3969 bp, Homo sapiens
  SIMILAR (2461)..(3924): 871254mologous to Homo sapiens putative p150,accession number U93572,Smith-Waterman Score=2326.
atggccacagagtgctggaatgtggctggtctgaactgcaatgtgctggaaaggcatgaagggtggggcctgaaaccttatccaatcaggggccgtggactagaaactggccaatcaggcgtgcagctggagagaccaggacgcttccgtattcgcagatttatggctgaaagaccgggatcccctggaagccgagaaatggtgagtgctgggtctgtcatcgtgagaggggcgggagacggttggaaccggctgaaagtggcttgtagcaggacccaaacttcctcgcagtcagctctggagtctgaggacccaaatcctccttgtcccagctcggcttttagtcccctcgaaccggctggtgaattaccagatctcctcaagtgcagcaaccagatccagttggaagtgcatcttttggaggcagaaaacaaagccatggccactggggcctttactcagggccagctgaaggtgcggctgactgcacagacgtcactggggcctttgtctgacttctacacactccctgtggggatccgcactgtggctgtcactgagagccagttcttcatcaacgggaaacctttttatttccacagcatcaacaagcacgaggatgcggacctgcgtttgtgctcctgggtcctcgttggggctgcttctggtcaccttccacttttgccttccatcctagggaagggcttcaactggctgctgctggtgaaggacttcaacctgcttcactggcttggtgccaacgccttctgcaccagccactacccctacgcgggggaagtgctgcagatgtgtgaccgctatgggattgtggtcattgatgagtgtcccgctgtgggcctggtgctggcagcttttcaacaatgtgtctgtgcatcaacacatgtgggtgatggaggaactggtgtgcagggacaagaaccaccccgccgtggtgatgtggtctgtggccaacaagcctgcatcctacctggaacctgccggctactacttcaggatcacagcctcttgccagcaacagaacaaagctggatggagaatgactttgacgagttgacagaagtaggcttcagaagatcagtaataacaaacttctccgagctaaaggaggatgttcgaacccattgcaaggaagctaaaaaccttgaaaaaagattagatgaatggctaactagaataaacagtgtagagaagaccttaaataaccggatggagctgaaaaccatggcactagaactatgtgacgcatgcacaagcttcagtagccgattcaatcaagtgaaagaaaggtaccacatcacacttattccaaaaattcaccacatagttggaagtaaagcactcctcagcaaatgtaaaagaacagaaatcacaacaaactgtctctcagaccacattgcaatcaaattagaactcaggattaagaaactcactcaaaaccgctcaactacatggaaactgaacaacctgctcctgaatgactactgggtacataacgaaatgaaggcagaaataaagatgttctttgaaaccaatgagaacaaagacacaacataccagaatctctgggacacatttaaagcagtgtgtagagggaaatttatactactaaatgcccacaagagaaagcaggaaatatctaaaatcaacaccctaatatcacaattaaaggaactagagaagcaagagaagacaaattcaaaagctagcagaaggcaagaaacagctaagatcaaagcagaactgaaggagatagagacacaaaaaacccttcaaaaaatcaatgaatccaggagctggctttttgaacagatcaccaaaattgatagaccactagcaagactaataaagaataaaagagagaagaatcaaatagacacaataaaaaatgataaaggggataccaccaccgatcccacagaaatacaaactaccatcagagaatactataaacacctctacacaaataaactagaaaatctagaagaaatggataaattcctggacacatacaccctcccaagactaaaacaagaagaagttgaatccctgaatagaccaataacaggctctgaaattgaggcaataattaatagcctaccaaccaaaaaaagtccaggaccagatggattcacagccgaattctaccagaggtataaagaggagctgataccattacttcttaaactattccaatcaatagaaaaagagggaatcctccctaactcattttatgaggccaacatcatcctgataccaaagcctggcagagacacaacaaaaaaagagaattttagaccaatatccctgatgaacatcgatgcgaaaatcctcaataaaatactggcaaaccgaatccagcagcacatcaaaaagcttatccaccacgatcaagtcagcttcatctctgggatgcaaggctggttcaacatacacaaatcaataaacctgataagcaacttcagcaaagtctcaagatacaaaaccaatgtgcaaaaatcacaagcattcctatacaccaataacagacaaacagagagccaaatcatgagtgaacttccattcacaattgctacaaacagaataaaatacctaggaatccaacttacaagggatgtgaaggacctctttaaggagaacttcaaaccactgctcaatgaaataaaagaggacacaaacaaatggaagaacattccatgctcatggataggaagaatgaatattgtgaaaatggccatactgcccaaggtaatttatagattcaatgccatccccatcaagctaccaatgactttcttcgcagaactggaaaaaactactttaaagttcatatggaaccaaaaaagagcccacattgccaagacaatactaagccaaaagaacaaagctggaggcatcacactacctgacttcaaactatactacaaggctacagtaaccaaaacagcatggtactggtaccaaaacagagatatagaccaatggaacagaacagagccctcagaaataacaccacatatctacaaccatctgatctttgacaaacctgacaaaaacaagaaatggggaaaggattccctattcaataaatggtgctgggaaaactggctagccatatgtagaaagctgaaactggattccttccttataccttatacaaaaattaattcaagattgattaaagactcaaatgttagatctaaaaccataaaaaccctagaagaaaacctaggcaataccatacaggacataggcatgggcaaggacttcatgactaaaacactaaaagcaatagcaacaaaagccaaaatggacaaatgggacctaattaaactaaagagcttctgcacagcaaaggaaactaccatcagagtgaacagacaacctacagaatgggagaaaatttttgcaatctacccatctgacaaagggctaatatctggaatctacaaagaacttaaacaaatttgcaagaaaaaatcaaacaaccccatcaaaaactgggcaaaggatatgaacagacacttctcaaaagaagatatttatgcagccaacagacatgtgaaaaaatgctcatcatcactggtcatcagagaaatgcaaatcaaaaccacaatgagataccatctcacaccagttagaatggtaatcattaatacatcaggaaacaacagctgctggagaggatgtggagaaataggaacacttttacactgttggtgggactgtaaactagttcaaccattgtggaagacagtgtggcgattcctcaaggatctagaactagaaataccatttgatccagtgatcccattactgggtatatacccaaaggattataaatcatgctactataaagacacatgcacatgtatgtgtattgcagcactactcaacaatagtaaagacttggaaccaacccaaatgtccataaagaatagactggattaa

SEQ ID NO: 4886 - DNA, 1475 bp, Homo sapiens
  SIMILAR (774)..(1472): 521254mologous to Homo sapiens NAG13,accession number AF194537,Smith-Waterman Score=517.
atggcagtgagcaccacagtgagagtggacatgccctgctgtgcagtgatgctatactgctggggaaggtcagggaaggaacaacagccagatgaggccctcaagggaaaaggatttacagtgtgctttgaaggtctaagatttggacaaaagccggggtcttatttcagtctggaccagattggccatgtggagatacaaatgataacacccccctggagggggaccacactctcaacaaagcgggggggaagaaaaagagggaaaacagagagcgaccgcgaacacaatttggccccccccaaggggcgggacaccccaaaaaaagagggcgcccatgtgcgggggggccctctctcgggaacccccccgacggaaaaaaaagggaaagcgcggtcacctcgctatggcgacacccacaggggagaggggctaaataaaactcaccgcgccccccaaaatttttcggagagcccggagccaacgatcaacaaaattgatagaccactagcaagactaataaagaaaaaaagagagaagaatcaaatagacacaataaaaaatgataaaggggatatcaccaccaatcccacagaaatacaaactaccatcagagaatactacaaacacctctatgcaaataaactagaaaatctagaagaaacggataaattcctggacacatacactctcccaagactaaaccaggaagaagttgaatccctgaatagaccaataacaggctctgaaattgaggcaataattaatagcctaccataccaaaaaaagttccaggaacagacggattcactgccaaattctaccagaggtataaggaggagctggtaccattccttctgaaactattccaatcaatagaaaaagagggaatcctccctaactcattttatgaggccagcatcatcctgataccaaagcctggcagagacacacaaaaaaaagagaattttagaccaatatccctgatgaacatcgatgcaaaaatcgtcagtaaaatactggcaaaccgaatccaggtgcacatcaaaaagcttatccaccatgatcaagtgggcttcattcctgggatgcaaggctgtgttggaagttctgccagggcaatcgggcaggagaaagaaataaagggtattcaattaggaaaagaggaagccaaattgtccctgtttgcagatgacacgattgaatgtttagaaaaccccatagtctcagcccaaaatctctttaagctgataagcaacttcagcaaagtctcaggatacaaaatccatgtaccaaaatcagtatcatttttatacaccaataacatccaagctgagagccaaatcaagaatgcaatcccattcacaattgcttcaaagagaataaaatacctaggaatacagctaaccctggaggtgaaagagctctacaacaagaattacaaaacactgctgaaagaaatcagagatgaataa

SEQ ID NO: 4887 - DNA, 1005 bp, Homo sapiens
  SIMILAR (440)..(487): 561254mologous to Homo sapiens putative p150,accession number U93569,Smith-Waterman Score=44.
tttcgtgtcgggaagatggcgctacgtctgctgcggagggcggcgcgcggagctgcggcggcggcgctgctgaggctgaaagcgtctctagcagctgatatccccagacttggatatagttcctcatcccatcacaagtacatcccccggagggcagtgctttatgtacctggaaatgatgaaaagaaaataaagaagattccatttctgaatgtagattgtgcagtgctcgactgtgaggatggagtggctgcaaacaaaaagaatgaagctcgactgagaattgtaaaaactcttgaagacattgatctgggccctactgaaaaatgtgtgagagtcaactcagtttccagtggtctggactgaagaagacctagagacccttttgtcaatcccgggtccttccttccagccttgatgctaccaaaggtggaaagtcctgaagaaatccagtggaccgctagcaagactaataagaaaagagagaagaatcaaatagacgcaataaaaaatgataaaggggatatcaccaccgatcccacagaaatacaaactaccatcagagaatactataaacatctttacataaataaactagaaaatctagaagaaacggataaattcctggacacatacaccctcccaagactaaaccaggaagaagttgaatccctcaatagaccaataacaggctctgaaattgaggcaataattaatagcttacaaaccaaaaaaagtccaggaccagacggattcacagccaaactctaccagaggtacaaggaggagctggtaatttatagattcaatgccatccccatcaagctaccaatgactttcttcacagaattggaaaaaactactttaaagttcatatggaaccaaaaaagaatccgcatcgccaagtcaatcctaagccaaaagaacaaagctggaggtatcacgctacctgacttcaaactatactacaaggctacagtaaccaaaacagcatggtactggtag

SEQ ID NO: 4888 - DNA, 2505 bp, Homo sapiens
atgttctttgaaaccaatgagaacaaagacacaacataccagaatctctgggacacattcaaagcagtgtgtagagggaaatttatagcactaaatacccacaagagaaagcaggaaagatccaaaattgacaccctaacatcacaattaaaagaaccagagaagcaagagcaaacacattcaaaagctagcagaaggcaagaaataactaagatcagagcagaactgaaggagatagagacacaaaaaacccttcaaaaaatccttcaaaaaatcaatgaatccaggagctggttttttgaagagatcaacaaaattgatagactgctagcaagactaataaagaagaaaagagagaagaatcaaatagatgcaataaaaaatgataaaggggatatcaccactgatcgcacagaaatacaaactaccatcagagaatactataaacacctctacgcaaataaactagaaaatctagaagaaatggataaattcctggacacatacaacctcccaagactaaaccaggaagaagttgaatcccttcagtagactaataacaggctctgaaattgaggcaataattaatagcttaccaaccaaaaaaagtccaggaccagacggattcacagccaaattctaccagaggtacaaagaggagctggtaccattccttctgaaactattccaatcaatagaaaaagagggaatcctccctaactcattttatgaggccaacatcatcttgataccaaagcctggcacagacacaacaaaaaaagagaattttagaccaatatccctgatgaacatcgatgtaaaaattctcaataaaatactggcaaacagaatccagcagcaaatcaaaaagcttatccaccacgatcaagtgggcttcatcccagggatgcaaggctggttcaacatacacaaatcaataaatgtaatccagcatataaacagaaccaaagacaaaaaccacatgattatctcaatagatgcagaaaaggcctttgacaaaattcaacagcccttcatgctaaaatctctcaataaattagtgttggaagttctggccagggcaatcaggcaggaaaaagaaatgaagggtattcagttaggaaaagaggaagtcaaactgtccctgtttgcagatgatatgattgtatatttagaaaaccccatcatctcagcccaagatctccttaagctgataagcaacttcagcaaagtctcaggatacgaaattaatgtgcaaaaatcacaagcatccttatacaccaataacagacaaacagagagccaaatcatgagtgaactcccattcacaattgcttcaaagagaataaaatacctaggaatccaacttacaagagatgtgaaggacctcttcaaggagaactacaaaccactgctcaacgaaataaaagaggacacaaacaaatggaagaacattccatgctcatgggtaggaagaatcaatattgtgaaaatggccatactgcccaaggtaatttatagattcaatgccatcctcatcaagttaccaatgactttcttcacagaattggaaaaaaactactttaaagttcataaggaaccaaaaaagagcctgcattgccaagtcaatcctaagcaaaaaggaagaaagctggaggcatcatgctacctgaattcaaactatagtacaaggctacagtaaccaaaacagtatggtactggtgccaaaacagatatatagaccaatggaacagaacagagccctcagaaataataccacacatctacaaccatctgatctttgacaaacctgacaaaaacaagaaatggggaaaggattccctatttaataaatggtgctgggaacactggctagccatatgtagaaagctgaaactagatcccttccttacaccttatacaaaaattaattcaagatggattaaagacttaaatgttagacctaaaaccataaaaactctagcaggacacctaggcaataccattcgggacataggcttgggcaaggacttcatgactaaaacaccaaaagcaatggcaacaaaagccaaaatagacaaatgggatctaattaaactaaagagcttctgcacagcaaaagaaacggccatcagagtgaataggcaacctacagaatgggagaaaatttttacaatctacccatctgacacagggctaatacccagaatctacaaagaacttaaacaaatttacaacaaaaaaataaacaaccccatcaacaagtgggcgatggatatgaacagacacttctcaaaagaagacatttatgcagccaacagacacatgaaaatattgtcatcatcagtggccatcagagaaatgcaaatcaaaaccacaatgagataccatctcacaccaattagaatgacaatcattaaaacgtcaggaaacaacagttgctggagaggatgtggagaaacaggaacactgttacactgttggtgggactgtaaacttgtttaa

SEQ ID NO: 4889 - DNA, 4189 bp, Homo sapiens
  SIMILAR (2975)..(3577): 851254mologous to Homo sapiens putative p150,accession number U93570,Smith-Waterman Score=860.
atgggagattttaacaccccactgtcaacattagacagatcaatgagacagaaagttaacaaggatagccaggaattgaactcagctctgcaccaagcggacctaacagacatctgcagaactctccaccccaaatcaacagaatatacattcttcgcagcaccacatcacacttattctaaaattgaccacatagttggaagtaaagcactcttcagcaaatgtaaaagaacagaaattataacaaactgtctctcagaccacagtgcaatcaaactagaactcaggattaagaaactcactcaaaaccgctcaactacatggaaactgaacaacctgctcctgaatgactactgggtacataatgaaatgaaggcagaaataaagatgttctttgaaaccaatgagaacaaagacacaacataccagaatctctgggacacatttaaagcagtgtatagagggaaatttatagcatttaaagcagtgtgtagagggaaatttatagcactaaatgcccaaaacagaaagcaggaaagatctaaaattgacaccctaacatcacaattaaaagaactagagaagcaagagcaaacacattcaaaagctagcagaaggcaagaaataactaagatcagagcagaactgaaggagatagagacacaaaaaacccttcaaaaaaatcagtgaatccaggagctggttttttgaaaagaccaacaaaattgatagaccgctagcaagactaataaagaagaaaagagagaagaatcaaatggacgcaataaaaaacgataaattgggatatcaccactgatcccacagaaatacaaactaccatcagagaatactataaacacctctatgcaaataaactagaaaatctagaagaaatggataaattcctggacacatacaccctcccaagactaaaccaggaagaagttgaatctctgaatagaccaataacaggctctgaaattgaggcaataactaatagcctaacaaaccaaaaaaagtccaggaccagacggattcacagccaaattctaccagaggtacaaggaggagctggtaccattccttctgaaactattccaatcaatagaaaaagaggggatcctccccaccgcattttatgaggccagcatcatcctgataccaaagcctggcagagacacaacaaaaagagagaattttaaaccaatatccctgatgaacatcgatgcaaaaatcctcaataaaatactggcaaaccaaatccagcagcacatccaaaagcttatacaccatgatcaagtgagcttcatccctgggatgcaaggctggttcaacatatgcaaatcaataaacataatccagcatataaaaagaacggatgacaaaaaccatatgatcatctcaatagatgcagaaaaggcctttgacaaaattcaacagcccttcatactaaaaactctcaataaattaggtattgatgggaagtatctcaaaataatgagagctatctatgacaaacccacagccaatatcatactgaatgagcaaaaactggaagcattccctttgaaaactgccacaagacagggatgccctctctcaccactcctattcaacatagtgttggaagttcttgccagggtaatcaggcaggagaaagaaataaagggtattcaattaggaaaagaggaagtcaaattgtccctgtttgtagatgacatgattgtatatctagaaaaccccatcgtctcagcccaaaaatctccttaagctgataagcaactttggtaaactctcaggatacaaaatcaatgtacaaaaatcacaagcagtcttatacaccaataacagacaaacagagagccaaatcatgagtgaactcccattcacaattgcttcaaagagaataaaatacctaggaatccaacttacaagggacgtgaaggacatcttcaaggagagctacaaaccactgctcaaacgaaattaaaagagtatacaaagaaatggaagaacattttcattccatgcttatgggtaggaagaaatcaatatcatgaaaatggccatactgcccaagggtatttaatagattcaatgccatcccccatcaagctacccaatgactttccttccacagaattgggaaaaaactactttaaagttcactactggaaccaaaaaagagcccgcatcgcccaagtcaatccctaagcccaaaagaacaaagttggaggcatcacgctacctgacttcaaacttatacttacaaggcttacagttaaccaaaacagcatggtatggtacttggttaccaaaacagagatatagatcaatggaacagaacagatccctcagaaataatgccacattatctacaactatctgatctttgacaaacctgagaaaaacaggcaatggggagaggattccctatttaataaatgggtgctgggaaaactgggctagccatatgtagaaagctgaaactggatcccttccttacactttatgcaaaaattaactgaagatggattaaagacttaaacgttagacctaaaaccataaaagccctagaagaaaacctaggcattaccattcaggacataggcatgggcaaggacttcatgtctaaaacatcaaaagcaatggcaacaaaagccaaaattgacaaatgggatctaattaaactaaagagcttctgcacagcaaaacaagctaccatcagagtgaacaggcaacctacaaaatgggagaaaattttcgcaacctactcatctgacaaagggctaatatccagaatctacaatgaactcaaacaaatttacaaaaaaaaaaaaaaaacaagcccaccaaaaagtgggtgaaggacgtgaacagacacttctcaaaagaagacatttatgcagccaaaaatcacatgaaaaaatgctcaccatcactggccatcggggaaatgcaaatcaaaaccacaatcaccaaaattgacagaccgctagcaagactaataaagaagaaactagagaagaatcaaatagacgcaataaataatgacaaaggggatattaccactgatcccacagaaatacaaactaccatcagagaatattataaacacctctacacaaataaaccagaaaatctagaagaaatggataaattcctcgacacatacaccctcccaagactaaaccaggaagaagttgaatctctgaatagaccaataaaaggctctgaaattgaggcaataattaatagcttactaaccaaaaaaagtccagggccagatggattcacagccaaattctaccagaggtacaaggaggagctggtaccattccttctgaaactattccaatcaatagaaaaagagggaatcctccctaactcattttatgaggccagcatcatcctgatactaaagcctggcagagacacaaccaaaaaagagaattttagaccaatatccttgatgaacattgatgcaaaaagcctcaataaatactggccaaccgaatctagcaactcatcaaaagcttatccacatgatcaagtgggcttcatccctgggatgcagacggtatacgagccgggaagcttcacgccgctcatccgggtcgagacagagaacggcgagcgggaaaaagcgcagcggcgcagcctggcagagacgctccagcaggaagggagtgagaacggccacggcgtggtgttcccggctgaactggtgcggctgctggacaggctggaggaagaaatccgggcagaccgcgtgagcagtgaaagccgggcgtggcttgcgcagtgcgggctgacggtggagcaactggccagacaggtggagccggaatacacaccggcgcgaaaagctcatctttatcactgcgaccaccggggactgccgctggcgcttatcagcgaagacggcaatacggcgtggagcgcggaatatgatgaatggggcaaccagcttaatgaggagaacccgcatcatgtgtatcagccgtaccgtctgccagggcagcagcatgatgaggaatcagggctgtactataaccgtcaccggtactacgatccgttgcagggtcggtatattactcaggacccgatggggttgaaagggggatggaatttatatcagtatcctttaaatccactacaacaaattgaccctatagggatcctgtag

SEQ ID NO: 4890 - DNA, 2077 bp, Homo sapiens
  SIMILAR (64)..(810): 901254mologous to Homo sapiens dJ1049G11.2 (novel protein similar to KIAA0884),accession number AL078634,Smith-Waterman Score =1130.
atgtcatccaggggcccttgcacactggagacactcatcaatcccagccctagtgtagctgatgacatcccccatttgagaccaaagcctgtgtacattactaccactcgagacaatgagaacatttacagtacaaagattccatatatggcagctcgtgttgtttttattaagtggattgtaaccttctttttggaaaaaaagtatctaactgcaacacaaaacactaaaaatggagttgatgtattgcctaaaatcatccagactgttggtggtggtgctgtgcaggagagagcgcctgagctggatggtggtgggcccacggagcaggacaaaagccattctaacagcagcaccttgtcggaccgaagactcagcaactccagcctctgtagcattgaagaagagcaccgaatggtgtatgaaatggtacagcggattctcttgtcaacacgaggttatgtcaacttcgtgaatgaagtatttcaccaggcatttttgttgccttcctgtgagatagctgtaacaagaaaagtagttcaagtgtacagaaagtggattctccaggacaaacctgtgttcatggaggagccagatagaaaagatgttgcccaagaagatgctgaaaaattaggattttccgagactgatagcaaggaggcctcatctgaaagttctggtcataaacgatcttccagttgggggacgcacatactccttcacaagtgcaatgagcagagggtgtgtgacagaggagggaaaatacaaatgttgaaagccggcgtccaggctttgttgcagcctgtcctttgtgtgttccctctcattccactgccacccttgtgcaatcaagctgcccgcccagctgtggtcagcatccccctaggtgatcttctgccttggttatcagtccttggaggccctgcagaccagtggcacctttcctacctgaaaccagaagggtcctctgcctatgcctgtattctggaggcccttgaatcagcaggaaaggggctttggaaagtgtctgcagttggtaggaaaccatggacacgaggcaggtctgatcggaaaggaactgtaggccaccaagtccaattcttgttcttcaaagatgagggaagggtggactcaagaatcttgacgctcatggtagcttggatccgaccaaaccctctgtgtgtacatttctcgagagctctgggatgactttcttggtgtgctgtccctccctcacggaatgggaggaacttataaacgagtgggccaacattatggactccttgacagcagtgcttgcaagaaccgtttatggagttgagatgacaaacctacctctggataaattaagtgaacaaaaggaaaagaagcaacgaggcaaaggctgtgttctagatcctcagaaaggaaccaccgtggggaggtccttttctctcagctggcggagccacccagatgtgaccgaaccgatgcgatttaggagtgccaccacgtctggagcaccgggagtggaaaaggcaagaaatattgttcgccaaaaagcaactgctaagcgaagccagtctatcagcaactgtgtccacctttctgaggctttgcctgccactaaaagcgtcccgctcctccttcacaccctttataaaaacaaagccttaaaagctgcattaggccagcctgttgggaaggcagaccagctggtggtggcaggctctccgtccgtctgctgtgttgaggaccagtggggacgctctaatttggaagcaatggtgctgtggctatattgcatcccaccagatggcgatgttctttatctttaggaagatgctgccagtgttggctcagctcttatttgctcctgctcatagcccagaaaccaacatctatctgtttttggcatcaggcttcagagactaactcttcccactatccataaaaaatggcatttgccaattatagtttagaaagttaggaagctcttgggctcccccttctgacactggattaaccagtagattcattaacaaatataaactgttcccagaaggtttcaacatcttgcataattagaataaacaat

SEQ ID NO: 4891 - DNA, 300 bp, Homo sapiens
  SIMILAR (263)..(298): 831254mologous to Mus musculus Pro-Pol-dUTPase polyprotein,accession number Y12713,Smith-Waterman Score=61.
  misc_feature (1)...(300): n = a,t,c or g
ggaacactaccacctggagacacaacaatgattccattaaactggaagttaagattgccacctggacattttgggcttctcctacctttaagtcaatggctaagaagggagttacagtgtcggctggggtgattgacccagactatcaaaatgaaatcagtttactactccacaatggagttactgangaacatgcatggaatacaggagatgcattagggcatttnttgctattaccatgccctgtgattaaggtcaatgggacccttcaggaatgaagntttgggtcactccaccagg

SEQ ID NO: 4892 - DNA, 327 bp, Homo sapiens
  SIMILAR (1)..(144): 811254mologous to Mus musculus Pro-Pol-dUTPase polyprotein,accession number Y12713,Smith-Waterman Score=211.
aagttaagattgccacctggacactttggactcctcttacttttaagtcaacaggctaagaagggagttacagtgttggctggggtgattgacccggactatcacaatgaaatcagtctactactccacaatggaggaaaaaaaaaaacacgacctgctgagatgcttgctgaaggcaaagggaatacagaatgggtaggagaagaagttagtcatcaataccagctatgaccacatgaccagctgcagaaacgaggactgtaattgtcatgagtatttcctccttctgttcttaaagacatgtttgtgcatgtgtacacttctact

SEQ ID NO: 4893 - DNA, 385 bp, Homo sapiens
  SIMILAR (2)..(88): 751254mologous to Mus musculus Pro-Pol-dUTPase polyprotein,accession number Y12713,Smith-Waterman Score=134.
ccactttatggctaaagaagtgtgacagtgggctcatgctcatggaatttactggtcttaccatgatccctatcatcctgaagcagcttttgaatggccttttgaagtcacgattacaatgccaactaggtgacaatactttgcaggcctggggcaaagttctccagaaggctgtgtatgctctgaatcagtgtccaatatatggtactgtttctcccatagacaggattcacgggtccaggaatcaaagggtggaagtggaagtggaagtggcaccactcaccatcacccatagtgttccactagcaaaatttttgcttcctgttcccatggcattatgttctgctggcttagaggtcttagttccagagggaggaacactgcc

SEQ ID NO: 4894 - DNA, 2349 bp, Homo sapiens
  SIMILAR (727)..(1443): 1001254mologous to Homo sapiens bA62C3.4 (novel protein),accession number AL136097,Smith-Waterman Score=1234.
atgtatgctctgaatcagcatccaatatatggtactgtttcttccatagccaagattcatgggtccaggaatcaaggggtggaagttgaagtggcaccactcaccaacacccctagtgatctactggcaaaatttttgcttcctgttcctgcgacattacattctgctggcctagaggtcttagttccagagggaggaacgctgcctccaggagacacaacaaagatctcattaaactggaagttaagattgccacctggacactttgggctcctcctacatttaagtcaacaggctaagaagggagttacagtgttggctgggatgactgacccagactatcaagatgaaatcattctactacttcacaatggaggtaaggaagaatatgcatggaatagcagagattcattacggcttctcttagtattaccaagccctgtaagtaaggttaatgggaaactacgacagcccaatccaaacaggactacaaatggcccagatccttcaggaatgaagcctgcagacggcctattacgggaccttgtgatcatattggcccaagagagagaagcagcaaaagctaagaaagaagaatcaacaacaggtaacgccaacttgttagaaaagacaggaggagtggatttccatatgaaagctgtgccagggacagaagtgccagggcataagcttgtaaccctggtgtcagtcagtaaggggaacagtagcagcctgacttgggaattagaaggagggaatgaccctatgagtaagaaacggcgaggagagttctctgactttcatggccctcccaagaagataataaaagtgcagaaggatgagagttccactgggtctctggccatgagtacaaggcccaggagggtaatagagagaccacccttaacacagcaacaggctgcacaaaaaagaacttgtgattccattactccttctaaatcatctcctgtacctgtttctgatactcagaaacttaaaaatctaccttttaagacttctggcttggaaactgccaagaagagaaacagcatttctgatgatgatactgattctgaagatgaattgagaatgatgattgcgaaagaggaaaacttacagagaactacacaaccctcaataaatgaatctgaaagtgatccttttgaagttgtaagggatgatttcaaatcaggcgttcacaaactgcattctttaataggtttaggtatcaaaaatcgtgtctcttgccatgatagtgatgatgatattatgagaaatgatcgtgagtatgactcaggagatacagatgaaattattgcgatgaaaaaaaatgttgctaaggtcaaaaacagtacagaattttcacaaatggaaaaatctacgaagaaaacttctttcaaaaatagagaaaactgtgagctttctgatcactgtattaaactacaaaaaagaaaaagcaatgtagagttcaaggagaggcagtgtttgaagggtcccaatgaagatactaagagggagggcccagaacccccccccccatgcaagtttgacagaggctccaagagccccaagactcccactggcctccgcagaggccgacagtgtattcgtcctgcggagattgtggcttccctgttagaaggagaggagaacacctgtggcaaacagaaaccaaaggaaaacaatttaaagccaaaatttcaggctttcaagggagtaggctgtctatatgaaaaggagtcaatgaaaaaatccttgaaagacagtgttgcctctaacaataaagatcagaattccatgaaacatgaggatcccagtatcatatccatggaagatgggtccccatatgttaatggctcattaggtgaagtgactccatgccaacatgcaaagaaggcgaatggcccaaactatattcagcctcaaaaaagacagaccacttttgaaagccaggatcgcaaggcagtgtcccctagcagttctgaaaagagaagtaagaatcctatttctaggccattagaaggtaagaagtccttaagtcttagtgcaaagactcacaacataggctttgacaaagacagctgccatagtaccacaaagacagaagcttcacaggaagagcggtctgattcaagcggcctcacatctctcaagaaatcaccaaaggtctcatccaaggacactcgggaaatcaaaactgatttctcactttctattagtaattcgtcagatgtgagtgctaaagataagcatgctgaagacaatgagaagcgtttggcagccttggaagcgaggcaaaaagcaaaagaagtgcagaagaagctggtgcataatgctctggcaaatttg

SEQ ID NO: 4895 - DNA, 561 bp, Homo sapiens
  SIMILAR (234)..(560): 781254mologous to Mus musculus Pro-Pol-dUTPase polyprotein,accession number Y12713,Smith-Waterman Score=447.
ctaccctgtgtgaatgtgaggatgtagacatccatcagtgcaactcgagctccatcctcctccgatttctaaggttccagttttcttaatttgggtgggcacaatataatcagctgccagtgcagagtgagtccagtgggttaccggactcatgctgtggtcatttccccagtgccagaatgcagatttggcatagacatacttagcagctggcagaacccccacattggatccctggaaccaggaaagatgcacaatgcctagtgggtctatttggattttggagacaacacattcctcatttgggtgggttactgtggcccatttatcgagtgacccaaaaggctgccagttttgagtggggtccagaataggagaaggctctgcaacagatccagccttctgtgcaagctgctctgccacttggaccataagacctagcagatccaatggtgcttgaggtgtcaatggctgataggtgtgctggttggagcctttggcaggcccccataggtgaattacagcagaagcctctaggattttggagcaaggccctgccat

SEQ ID NO: 4896 - DNA, 1716 bp, Homo sapiens
  SIMILAR (1298)..(1333): 911254mologous to Mus musculus Pro-Pol-dUTPase polyprotein,accession number Y12713,Smith-Waterman Score=55.
atgagtacaacacaattagatacaatgggagcagaaagcttgtgcaacatggagacagtacaggtggaagatgaagggatccaaaagcttaaggagattcggatggtggagtggattactccctttagacctactcatcccagctgtgagggtccagaagatatacccttgactaatgccttgcaaaatacatttgtgagggcagcacctgcatctttgaagagccctgtggttgctcttctcttgagtccagtgggttaccggactcatgctgtggtcatttccccagtgccagaatgcagatttggcatagacatacttagcagctggcagaacccccacattggatccctggctggtagggctcaccagaagcaatttgtcggcagctggcaaggccagcaatatgcctttactgtcctacctcaggggcatatcaactctctggctttgtgtcataatcttatttggagggaccttgatcactttttgctttcgcaaggtatcacactggtccattacactgatgacattatgctgattggatccaacctagcagatccaatggtgcttgaggtgtcaatggctgataggtgtgctggttggagcctttggcaggcccccataggtgaattacagcagaagcctctaggattttggagcaaggccctgccatcttctgcagataactattctccttttgagagacagttctttgcctgttactgggctttggtggaaactgaatgtttgcctacgggtcatcaactcaccatgcaacctgaactgcctatcatgaactgggtgctttcagacccatctagccataaatgggtccatggacaaagtggccatggtggcagagatagcggttactcatggactcagcaacatggacttccactcaccaagggtgacctatctatgaccactgctgagtgccaaattttccagcagcagagaccaatactgagccctcgatatggcaccattccttggggtgatcagccagctacttggcggcagaaatggcagaggtttgtcctcactggaatagacacttattccagatatgagtttgcctatcccgcatgccatgcttctaccaagactaccatccatggactcatggaattcctcatccaccatcatggtattccacacagcattgcctctgaccaaggcactcaccttatggctaaagaagtgcggcagtgggctcatgctcatggaattcactggtcttaccatgttccccatcatcctgaagtagctggattgatagaacggtggaatgaatggccttttgaagtcacaattacaacaccaactagtcaacaggctaagaagggagttacagtgttggctggggtgattgacccggactatcacaatgaaatcagtctactactccacaatggagaatccaagttcttcagttttggactggctctccttgctcctcagcctgcagatggcctattgcgggaccttgtgatcaggtgtttaaatcatgtgtccagcagccctattaatgaggaagtaggagagaagaactctttggttaccactagcagtttttgtcataagacagcaacaagctataaagaaagcaaattgagatatttgttaaaaactggaaccttagaaatcggaggaggatggagctcgagttgcactgatggatgtctacatcctcacattcacacagggtag

SEQ ID NO: 4897 - DNA, 324 bp, Homo sapiens
  SIMILAR (220)..(303): 481254mologous to Homo sapiens Human metallothionein Class I amino acid sequence,accession number Y57810,Smith-Waterman Score= 61.
attaattgcctaaggaattgcaaaacctatcaagccagaaacctttgtggttttataacacttccctcaagtttttccttaataagccgagcttgccgatgttgtcttcgaaattcaaggtacgacagtgccagcccacagggccatcctggtggccgttgtgaagtgatggcagccatgtttaatgctggcatattccaggccatgtgtctcctgatctgtgccgagtgtaccaagtgtccagactgcagcacatctgtgagctgttcatcattaccagctgcagagcatgccaagcagggaactggcatccatgaaccttga

SEQ ID NO: 4898 - DNA, 4163 bp, Homo sapiens
  SIMILAR (4162)..(3878): 751254mologous to Homo sapiens PRO2550,accession number AF130089,Smith-Waterman Score=361.
cagctgccagccgaggaggcgcggcggagaggggactgcggtcagctgcgtccacttggggctgtgcggcggtcccgcgcccggcgatgttcccgggcactccctgagtagcggcagcttatcccccgcccgctagcccgccctggtccccggctcgctcgctggctggcgcggccccggccccgctctgcgtcggccccgccgcggtggaggcgcgcgagggggacgcggccggggatgagcggattgcgggtgaactcgccgcccgggggccccgcgaagccgtgagccgctgcttttctccgagtcgccgccctgcccttggatttgagatcatgtccatccacatcgtggcgctggggaacgagggggacacattccaccaggacaaccggccgtcggggcttatccgcacttacctggggagaagccctctggtctccggggacgagagcagcttgttgctgaacgcggccagcacggtcgcgcgtccggtgttcaccgagtatcaggccagtgcgtttgggaatgtcaagctggtggtccacgactgtcccgtctgggacatatttgacagtgattggtacacttctcgaaatctaattgggggcgctgacatcattgtgatcaaatacaacgttaatgacaagttttcattccatgaagtaaaggataattatattccagtgataaaaagagcattaaattcagttccagtaattattgctgctgttggtaccagacaaaatgaagagttaccttgtacatgcccactatgtacctcagacagagggagctgtgttagtacaactgaagggatccaacttgcaaaagaactaggagcaacctatcttgaactccacagccttgatgacttctacataggaaagtattttggaggagtgttggagtattttatgattcaagccttaaatcagaagacaagtgaaaaaatgaagaaaagaaaaatgagcaactcctttcatggaattagaccacctcaacttgaacaaccagaaaaaatgcctgtcttaaaggctgaagcgtcacattataactctgacttaaataacttgctgttctgctgccagtgtgtggacgtggtattttataaccccgatttaaagaaagttgtagaggcccacaagatcgttctctgcgctgtaagccatgttttcatgctgcttttcaatgtgaagagtcccactgacattcaggattccagtatcatccgaactacccaggatctttttgctataaacagagatactgcatttccaggtgctagccatgaatcttcaggcaacccaccattacgagtcattgttaaagacgccctcttctgttcttgtttatcagacatccttcgcttcatttattcaggtgcttttcagtgggaagaattggaagaagatatcaggaagaagttgaaagattctggggatgtttcaaatgtaatcgagaaagttaaatgcattttaaaaacaccaggaaagattaattgcctaaggaattgcaaaacctatcaagccagaaaacctttgtggttttataacacttccctcaagtttttccttaataagccgatgcttgccgatgttgtcttcggaaattcaagggtacggacagtgcccagcccacagggccatcctgggtggccccttgtgaagtgatgggcagccatgtttaatggtaatttacatgggaaggcaaagagtgtcctgattcccgtttatggtgtttccaaagagactttcttgtcatttttagaatacctgtacacagactcctgctgcccagcttggcatattccaggccatgtgtctcctgatctgtgccgagatgtaccaagtgtccagactgcagcacatctgtgagctgttcatcattacccagctgcagagcatgccaagcaggggaactgggcatccatggaaccttgatattagttggacctgctttaaaaagggccaagttttcaccactcctggattgccttttcaacctgggcttactttcattttcattgctacttaacttacctcatctttcagttcaaaaggcctggaattttcagggatcttttcagtggggaaggaacggcagttttttgtttggaaaaaggcacaggtggggcccttcgaatatgttacttggaaggcagcttgcgggaattacagggaagtattatttcacttccccgggaaatgtcggttgcttaggtaatggtaaacctgggagccttttatacactacatttcttttttattattatgaagaatgggatacctccaggttccagtaaaattcttctgaccgaaaccaatgtgggtgttagaaaaattaccatatagcttaatatgtttattagttctctttggaaaaaaactaccactgtggtcttaaaagggaacaaaatataccataggctaaaactaaggctttcactctagaatgcaaagctgttttgcagctgttttcccttaaagatgtcctgttgctttagtgatatttagacccctctcagttaagaaatgcttagattaaaaaaaaaaaattacgtaggattaatacagaaatttaatcatgtctgattaattgctctattaaaataaggggcatttaaagacccagcataaccatttgtataatgagaaatctaggggaaaaccaatcagtccaacatgagattttaggaatagaaatttgccggccatttggaaagtgaaatgccacttagttctcaattgatgacagtgtttgaatcatcataaaaaaaatacctgcttttcatctggacaacccaattgagccactttatctccttttggcaatctgagtaggcggggaacctaggcagggctggctttcttagcgtgtaacttgtgtagcagcacagggcccacacttagaaggaccccacacttggttcaaggctctgctatagcggaaattcttaataatgtttgaagaagggccccatgatttcattttgtgctgagccctcaaaattatgtctgtttcgtggtgggaaatatcctatgttttcttgctcaaacacctttctctctgaaagcagaaaaaggcactgatataaagggaagagaaggaggctcaccggagggaagagaacatagtgaagattcccgcctttggggaggtctggaccacccagggcctccactgccaccttggctggcaagggagaaatgtgttgtgttgtcttagctttaaaacagtcacagttcttgctctatcatagatgaacaaatactttcttgatcattctgtaagaccaggaggttggtaagagtgactaaccagcctaactttaatacacatgtataaagatgttcacagagaaagatgctctgtagagaatttgctaccgaagttggctcaagaatttgtttttagtgttatttaccaagattaggacgtcagtggcttaaattctttgaattcttttcaaggactgcaagattatttgataaagagtagcatgaatcttgtgctctaatattacacagtaagttcaaagaaaggatgtaagtcaaagacttgttacatagagggaaaatggactgggatagaggacagactgatagtttctttctttcatatcacatgtatagagaaataattatatcagaaactcacaaacctagacatggaaaaacagattactgtctattgtcagcatcattttcatctgtaagtcactactggaatatatttttcttttaatttccagtgactttagaatacacacagtttttccgacttttcaaaaatttgattaaatggttttatagtataatattgggaccccataccgttagcccttgtatgtataccaacactgccaaagtaaaacattaggtcaggcatggtggctcaggcctgtaatcccagcattttgggaggctgaggcaagtggataacttgaggtcatgagttcgaaaccagcctggccaaaacagtgaaaccccgtctctactaaaaatacaaaattagccagatgtggtggcgcacacctgtaatcccagctactcaggaagctgaggcaggaaaatcgcttgaacctgggaggtggaagttgcagtgagccgagatcgcaccactgcactccagcctgggtgacaagagcgaaactccatctc

SEQ ID NO: 4899 - DNA, 3117 bp, Homo sapiens
  SIMILAR (2305)..(2814): 881254mologous to Escherichia coli K12 Mg2+ transport ATPase, P-type 1,accession number AE000495,Smith-Waterman Score=785.
atggagacgcgtatgacaccgcctggcctggataaagtacccgaagccgtagaacgccacacgggcagtctgaatgatgaatggctgatggcggcagatctgattgtcgccagtcccggtattgcactggcgcatccatccttaagcgctgccgctgatgccggaatcgaaatcgttggcgatatcgagctgttctgtcgcgaagcacaagcaccgattgtggcgattaccggttctaacggcaaaagcacggtcaccacgctagtgggtgaaatggcgaaagcgccgggggttaacgttggtgtgggtggcaatattggcctgcctgcgttgatgctactggatgatgagtgtgaactgtacgtgctggaactgtcgagcttccagctggaaaccacctccagcttacaggcggtagcagcgaccattctgaacgtgactgaagatcatatggatcgctatccgtttggtttacaacagtatcgtgcagcaaaactgcgcatttacgaaaacgcgaaagttacgtgtaagcgcctgcaatacacgggcggttgtacttttccccaccgcgacactgccagcaatactgataatgtaaggaatgcgttgcccgttggtaccaagaaactgttccagaactgcctgacggcgcagattcgagcttatatagaagttcagcaaacaccaaagccggaagataaagtcaaagcggtgaccgagctgaatcaacatgcgccgctggcgatggtcggtgacggtattaacgacgcgccagcgatgaaagctgccgccatcgggattgcaatgggtagcggcacagacgtggcgctggaaaccgccgacgcagcattaacccataaccacctgcgcggcctggtgcaaatgattgaactggcacgcgccactcacgccaatatccgccagaacatcactattgcgctggggctgaaagggatcttcctcgtcaccacgctgttagggatgaccgggttgtggctggcagtgctggcagatacgggggcgacggtgctgggaccgaagcacgtaccctgtcccaatcgtcgtgatgaagagaacatgccgggttcccgccgcgaagtgaaaaacgcgcgggaagaaggcgtagagttcaaattcaacgtccagccgctgggtattgaagtgaacggtaacggcaaagtcagcggcgtaaaaatggtgcgtaccgaaatgggcgaaccggacgccaaaggccgtcgccgcgcggagatcgttgcaggttccgaacatatcgttccggcagatgcggtgatcatggcgtttggtttccgtccacacaacatggaatggctggcaaaacacagcgtcgagctggattcacaaggccgcatcatcgccccggaaggcagcgacaacgccttccagaccagcaacccgaaaatctttgctggcggcgatatcgtccgtggttccgatctggtggtgaccgctattgccgaaggtcagctggagcaacaaggttttaccggcgatacggcgacaagttatgccgatcgtctgacaatgtcgaccgacaacagtatttaccaacttctccccgatgcggtggtatttccgcgttcaaccgcagatgtggcgctgatcgcccgtcttgccgcgcaggaacgctattcatcgctgatctttaccccccgcggcggcggcaccggcactaacggtcaggcgctcaaccaggggattattgttgatatgtcccgccatatgaaccgcatcatcgaaattaaccctgaagagggctgcatgacagctgcctgcgtgaagccatcagtttctcagtcaatggcccctcgccaagggctcttcgaggatctcccgtcatcacagtgccgtttattggcgcttaaacacgttctcctgaacctactaagggaccgttacgatgaccgccagtcagcattattcaccacgacaaatcccgcgctggccgcagatagacgaatctcgctggaaggagaaactcgcgaaatcacaagttacttcccgatgcagtttgttcgctacagcctgctgatccacgcggctgcgggtatctcgctgatccacgccatcctgatccataggtatatggcattttgggtgaaaggatcgattaaagggatgatcgaagggaagacacccacgccgttatccagtttcaggtcgttgccaaccatcgaaatctgctgcatggtttcgataccggaaccaatcaacgttgcgcctttcaccggcttcgttactttaccgttttcaatcagatatgcttctgaagtggagaaaacgaatttgccggagaacctgctgtacgatgtgtcacaggtggcgatcccgtttgataacgtcgacgacgagcaaattcaaaagccgcagcgttggaatccggcggatctggggcgctttatgatcttcttcggaccgatcagctcgatcttcgatattttgacgttttgcctgatgtggtgggtattccatgccaacacgccggaaacgcaaacgctgttccagtcgggatggtttgtggtgggcttactgtcgcaaacgctgattgtgcatatgatccgcacccgccgtgtgccgtttattcagagctgtgcatcgtggccgttaatgatcatgaccgtgatcgtgatgattgtcgggatcgcattgccgttttcaccgctggccagttatctgcaattacaggcgctgccgttaagctatttcccgtggctggttgcgattctggcaggcgttttcgtggtggccaccgatcatgcagcagaagccattaccggattcttcactaaatatggtgacgtcggtacggacattaatccgctgtatcgtctcaacaaacgtcagggtaaacagttactggcggcattagcttgcccggaacacctttataagaaagcgccaacggccgatctggaagatgatcgcccttctctgccagatgaagtggcactcggcgtgacctatgacaatatcgacgactatctggaagggaaaaacgtacctcaacaggtcgccagaacaatagagaactggtatctgaaaaccgaacataaacgccgtccgcccattaccgttttcgatgatttctggaaaaagtaa

SEQ ID NO: 4900 - DNA, 1860 bp, Homo sapiens
  SIMILAR (616)..(1071): 961254mologous to Escherichia coli No definition line found,accession number U00039,Smith-Waterman Score=708.
atgcgcgtatgcgcgcgcgcgtgtgtacgcacgcgtacgcgcatgtgtgtgtatgcgcacacatgcgtgtgcgtacgcacgtacgcgtatgtgcgcgtgcgtgtgcgcgtgcatgtacgcgcgcgcgtacgcgtgtgcgcgtacgcgcgtacacgcgtgcgcaactcgctgtcaatcctgccattcatccagctcacccttgccactcctattcatcatatacatcaggaagaatttaatatccgcggcattgttcccgtattacgccgtgtaaaacctgacctggcgattggtattgatatcactccatcgtgtgacacccctgatttacacgattattccgaggtcaggattaatcagggcgttgggatcacctgcctgaactaccatggtcggggaacgctggccggattaatcacgcctcctcgcctgatacggatgttggaacagacggctcttgaacacaacattccggtgcagcgagaagtggctcccggcgtgataacagaaaccggttatatccagcttttcttacccggctgggagattggtttttcaccgttggcgctgctgctggcgtttctctgctcgacgtcaccgggatttggggatcccgacggccttggggtcattgcgtaccaggataccgtgcgcccgaatgcggcaactgccatcagtgaactgaacgcgctggccgtcaaaggggtgatcctcaccggcgataatccacgcgcagcggcggcaattgccggggagctggggctggagtttaaagcgggcctgttgccggaagataaagtcaaagcggtgaccgagctgaatcaacatgcgccgctggcgatggtcggtgacggtattaacgacgcgccagcgatgaaagctgccgccatcgggattgcaatgggtagcggcacagacgtggcgctggaaaccgccgacgcagcattaacccataaccacctgcgcggcctggtgcaaatgattgaactggcacgcgccactcacgccaatatccgccagaacatcactattgcgctggggctgaaagggatcttcctcgtcaccacgctggatgaccgggttgtggctggcagtgctggcagatacgggggcgacggtgctggtgacagcgaatgcgttaagattgttgcgcaggagataaggcaaaccgatcgcaacattgagcgcgatcggtcccctcgcccctctggggagagggttagggtgaggggaaaaggcggcatcgaagccaatcagcccctatcaaccgcctttacgaatcaaataacgataaggcagtccatccgtctctttagcaaccagttcgtgttccataaaggaatatcgcgggtagtggccggatcgtcggcgataatcagcaacgtttcgccaggctgcatattgcgcacgccgaactgccgtcgcggttttcctatttcttgtactggcgaaggaaaagcggcttacggctggcagcgtgacggcggtcatgccgaatacttgctggcggaagaaaaagatctgatcctcctgccggatgcgctgagctacgaagatggtgcgtttatcagttgcggcgttggtacagcgtatgaaggaattttgcgcggcgaagtttccggcagtgataacgtgctggtggtcggtctggggccagtcggcatgatggcgatgatgctggcgaaaggtcgcggtgcaaaacggatcatcggcgttgatatgctgccggaacgtctggcgatggcaaaacagttaggggtgatggatcacggctatttagccaaccaccgaaggtctgccgcagattatcgccgaactcacccacggtggcgcggatgttgcgctcgattgttccggtaa

SEQ ID NO: 4901 - DNA, 3390 bp, Homo sapiens
  SIMILAR (3390)..(2749): 981254mologous to Escherichia coli formylglycineamide ribonucleotide synthetase (EC 6.3.5.3),accession number M19501,Smith-Waterman Score=1123.
atggataaattcctcaacacatacaccctcccaagactaaaccgggaagaagttgaatctctgaatagaccagtaacagcctcgggacttgaggtgataattaatagcttaccaatcaaaaaaagtccaggaccagatggattcacagctgcattctatcagaggtacaaggaggacgctggggaaagagaaggagaggggggaaatcagcaggtggctgttagaggcaaaagaaagaccacagagaggaaaaagaaactaggagaagacgtcaaagtaaaagagagcaaaaacagtggtgcatatgaagtcaaacagcatcgattcttccgttctttagactggaacagtttgctgagacagaaggcagaatttattccccaactggaatctgaggatgacacaagttattttgatactcggtctgagaagtatcatcatatggaaacggaggaagaagatgacacaaatgatgaagactttaatgtggaaataaggcagttttcttcatgttcacacaggttttcaaaagctgcagaggtatccactcgattgctttccactcgggttaccgaaatcgaagggtggttgatcgttcagagaaatcagaagctgctgcagagtaatctgaagcaacgtagcggcgaaccattgatactggatgatgattctcacgtgccaccggaattacgtgcggggtatcgcttgctgaagaatgccggttgcttaccgccagaacttgagcaacggagagaagcaattcagcttctggatattctcaaaggtatccgtcacgatgatccgcaatatcaagaggttagccgtcgattgtcattactggaattgaagctgcgacaagctggattgagtaccgattttttacgcggcgattatgctggcgcccagcagggtaatcggcacgcccagtttcaaattgcatgggattataacgctggcgaaggggtggtccaggactataagcaagcgatgtactggtatctgaaggctgccgctcaggggagcgtcggcgcttacgtcaacatcggttatatgtataaacacggacaaggcgttgagaaagattatcaggctgcctttgaatggtttacgaaagccgctgaatgcaatgacgccactgcctggtataacctggccattatgtatcattacggagaaggaagacctgtcgatctccgacaggctctcgacctgtatcgtaaagttcagtcatccggaaccagagatgtcagtcaggaaattcgtgagactgaatatttacggggttatgtggacaataaaggcatctcttttaaatcctgcttactgaacggttctgttgaagtcgccccgcgtgccggactggcggatgcgatttgcgatctggtttccaccggtgccacgctggaagctaacggcctgcgcgaagtcgaagttatctatcgctcgaaagcctgcctgattcaacgcgatggcgaaatggaagaatccaaacagcaactgatcgacaaactgctgacccgtattcagggtgtgatccaggcgcgcgaatcaaaatacatcatgatgcacgcaccgaccgaacgtctggatgaagtcatcgccctgctgccaggtgccgaacgcccaactattctgccgctggcgggtgaccaacagcgcgtagcgatgcacatgcgacgggaaaaagctgataatgatatggctccgctccagcaaaagctggtggtggtgagcaacaagcgggaaaaaccgattaacgatcgccgttcgcgccagcaggaagtgactccggcaggcaccagtatacgctatgaggcaagcttcaaaccgcaaagcggaggaatggagcagacgtttcgcctcgacgcccagcagtaccacgccctgacagtgggcgataaagcagttcaaacacgccgaaaaggaaaatccgtaccttttcggcggtggtcatctgcgggccatctttcggtaaagtggatttcaatagcgccagctgcataccatgcattggggcgcgtcgaacaggccgaacatccatggcgcaaccatctacgcgagcacagttgcgaactcccattcccccgccgattcacacgggctctggtcgggtctggcatgaagcccaggcttaacggtgagcgcgtattgatttgcgctgccgggaaacatcccgctgatgcatttactggtttaattaacgaactggaaagcgccgggcaaacggtagtgctggtagtacgtaacgatgacgtgcttggtgtcattgcgttacaggataccctgcgcgccgatgctgcaactgccatcagtgaactgaacgcgctgggcgtcaaaggggtgatcctcaccggcgataatccacgcgcagcggcggcaattgccggggagctggggctggagtttaaagcgggcctgttgccggaagataaagtcaaagcggtgaccgagctgaatcaacatgcgccgctggcgatggtcggtgacggtattaacgacgcgccagcgatgaaagctgccgccatcgggattgcaatgggtagcggcacagacgtggcgctggaaaccgccgacgcagcattaacccataaccacctgcgcggcctggtgcaaatgattgaactggcacgcgccactcacgccaatatccgccagaacatcactattgcgctggggctgaaagggatcttcctcgtcaccacgctgttagggatgaccgggttgtggctggcagtgctggcagatacgggggcgacggtgctgttcttcccacggctgttcgaagccaggaattcgcaggttggaaacggagaaaccaaccagacccgctttcggctttgcgccgcgcccggtggcaccttcatcgcggatttcaccgccggaaccggtcgccgcgcccggccacggagaaatcgccgtcgggtggttgtgagtttcgactttcatcagaatatgcgccggttcctgatggaaatcgtagcggcccgtttcgtggtcagcaaagtagcggcccacttcagaaccttccattacggcggcgttatctttataagcagagagaacgtgatctggcgtggtttcgaaagtatttttgatcatcttgaacagcgatttcggctgctgttcaccatcgataacccagtcggcgttaaaaattttgtggcggcagtgctcggagttcgcctgggcaaacatatacagttcgatgtcgttcgggttacgaccaagctttgtgaaagcatcctgcagatagtcaatttcatcttccgccagagccaagccaagacgcaggttagcgtcgatcagcgcctgacggccctgccccagcaaatcaacgctggtaaccggagtcggttgatggtgggcaaacaactgctctgcatcatctaa

SEQ ID NO: 4902 - DNA, 2104 bp, Homo sapiens
  SIMILAR (1562)..(2101): 921254mologous to Escherichia coli Dimethylsulfoxide reductase (EC 1.8.-.-) chain B,accession number D90801,Smith- Waterman Score=931.
atgcgttatgatgatatcgatttgctgcgtctctccgcacgcgaacggcgcaaactggttggccataacgtgtcgatgattttccaggaaccgcagtcgtgtcttgacccttcagaacgtgtgggccgccagttgatgcaaaacatcccagcctggacctataaaggccgttggtggcagcgttttggctggcgcaaacgccgtgccattgaactgctgcaccgcgtggggattaaagatcacaaagatgcgatgcgcagttttccctatgagttgaccgaaggtgaatgtcagaaagtgatgatagccattgcactggcgaatcaaccgcgtctgctgattgctgacgaaccgaccaactcaatggagccaacaacccaggcgcaaatctttcgcctgctgacgcgtctcaaccaaaacagcaataccactattttgcttatcagccatgacttacaaatgcttagccatggaaatatcgccgaggcacgagttggtgacgatgccacatcatcctatacccaggccctgatcgcgcgttacaaaattcgaaacccgatgcgcataacatccctcaatagctcccgcgctatcccctgtgaacagtaccgatggtgtctctggggcacgtgcggaagttcaggagtggaatttacccttcattacggattggaacttgggcatttttttcaaacggggatgcacggcttttcaggtttaattcggctgaatagccagttgttgcacacctttacgtccaatgacaggattgtcccagatgttccggcggcgcagtgcatcctgaaggcgttccagcaaacatgtggaataacctgcacgctgtatccgtccctcggcatcgtatacgggcgtttccagggaccggtgataatatgttcagggcatcatcaaggatgcgctttttcgaaccattcagttctgccagataatgaatcgcagccagtacatgttacctgccggtgccgcacggaaatgcaggtcccgcaacaccgccggaagaaaacgtttaacccgaccgtactgctcaaccatttcgtcatggaaattattgttctgtggacgagcaagttcattaaccttgcttacagattctgccagtctgtttttggcgcttcattaaaatccggtcacgctgcaggtcgatctacaggcaaccccgttgaaaacaccttcggggaaaatcgaaatttattctgaacgactggcgaagattgcagatacctgggaattgaaaaaagatgaaattattcatccccttcctgcgtataccccaggttttgatggctgggacgatcccctgcggaaaacctatccactgcagttaacgggcttccattacaaagcgcgtacccactccagctgcggcaatattgatgtgttacagcaggcctgcccacaagaggtgtggatcaaccccattgatgctcaggcacgcggtatccgtcatggcgataccgtgcgggtatttaacaataatggagaaatgctgattgccgcaaaagtgactccgcgtattctgcctggcgttaccgccatcgggcaagattttaaagatcttggcccggaagtcagtttccgccgtatttatgaatacgctggcggcgactggcaggaagataatggcgtctggcaccagaacgtgttcgcttattatctctccatctcctgtaaccattgcgatgaccccgcatgtacaaaagtctgccccagcggcgcaatgcataagcgtgaagatggctttgtggtggttgatgaagatgtttgtatcgcgtgccgctactgccacatggcttgtccgtacggcgcgccacagtacaatgctgaaaaagggcacatgacgaagtgcgatggttgttattcgcgcgtcgccgaggggaaacaacccatatgtgtcgaatcctgcccgctgcgtgcacttgagttcggtccaattgaagagtgcgccagaagcacggcactcttgctgccggtcgccactgcgcgcgcgcatttcacaaaacccaatatcgttatcaaacctaacgccaacagccgcccgaccggcgataccactggttatctggctaatccggaggaagtgtaa

SEQ ID NO: 4903 - DNA, 1215 bp, Homo sapiens
  SIMILAR (849)..(292): 631254mologous to Escherichia coli No definition line found,accession number U00039,Smith-Waterman Score=452.
atgcaggccaatagggcgcgtacccactacaggtccggcaatattaatgtgttacagcaggcctgcccacaagaggtgtggatcaaccccattgatgctcaggcacgcggtatccgtcatggcgataccgtgcgggtatttaacaataatggagaaatgctgattgccgcaaaagtgactccgcgtattctgcctggcgttaccgccatcgggcaagcgccacgtctgtgccgctacccattgcaatcccgatggcggcagtttcatcgctggcgcgtcgttaataccgtcaccgaccatcgccagcgcatgttgattcagctcggtcaccgctttgactttatcttccggcaacaggcccgctttaaactccagccccagctccccggcaattgcgcccgctgcgcgtggattatcgccggtgaggatcacccctttgacgcccagcgcgttcagttcactgatggcagttgcagcatcggcgcgcaggggtatcctgcgcaaatcaatacgcgctcaccgttaacctgcgcttcaatgccagacccgaccagcgcccgctgtggattcggcggtgggaatggcgagttcagcaacctgtgcttcgcgtacgatggcttgcggcagtggatgcgtcgcgccttgctcgaccgccgccgccagtgtcagcagttcagattcactaatacccgttgccggatgaatcgcggtaacgcgcggtttaccgacggtcagcgtaccggttttatcaaacgccacctgagtaacacgacccagctgttccagcgccgctccgcctttaatcaacgccccacgacgcgctgccgccgccagcccggagctggcggcaaacagcagcggtggcaccagcgtcaccagcagagcgacggccataatcgcgggcgtatagatacggctgaaacggtcgataaaccgctcaatgggagcgcgacgctcttcggcttcttcgatcagtttcagaatccgcacttccaacgtcaccagacggtctacgctggtggcaccagcagggactttatcgcccgttgcgcgctccaccggaatggattcgccggccagggcgctttcatcaaagagcgaccagcaggattcacacagttgcccccccccccctgcgctaagtgccgtggagcaaatagctttattgaggacgacataatgttccggccagttaaatgcactcccccactctaa

SEQ ID NO: 4904 - DNA, 268 bp, Homo sapiens
  SIMILAR (55)..(267): 1001254mologous to Escherichia coli PufY' protein,accession number Y00544,Smith-Waterman Score=352.
actacgaattcaatcgtccgtacccggagatccagcgcagtggtataagcatagctgctggagccattgttgtttgccgctaccagcgacagccagttaagcaaaacggaaatcagtagcatcaagataaatagtgaaactgttcctgtttatcagttgcgctataacggcaataacgccctgatgttcgcgacttatcaggacaagatgctggtgttttccagcacggatatgttgtttaaagatgatcagcaggataccgaagcca

SEQ ID NO: 4905 - DNA, 1725 bp, Homo sapiens
  SIMILAR (991)..(1695): 941254mologous to Escherichia coli K12 putative inner membrane component for iron transport,accession number AE000162,Smith-Waterman Score=1065.
atggctaattcaatatgttgtatgtcaggaataggaggcctgagagaggaacaggtatgggaaacagctggcggtattcgcgaaatcgaattgatctgtgcagagtgtttccatgcttcattcgcgggtgtacgcgaacctgtcgcgtgcaaatcgcgcatctgtacgttgcaactgctcacgctgccattgccagaggctgcagtcgtgcatttgctgagaaatcgaatgtctgaatcaagtgtgcgagctggtcctaatctgattcctgacggtgcgctctgcgagctaggcgttagggcgagtggacgcgtttggctgagcgtgggccgtcgaactgagccgtgggctggctgcaccgtcagcactactgagccaactgatgcgaccgggttggtattcactgaagtcgactgtggccgatcgaatggaaagttgaacagcgtcaagcaagtaagatccgctgtgatccggaaccagagtgaccgcttgacgcgctggtggacacggaagtgccgtcagcacggaaaccgggaacgcgcattgggcagccattcgaggacatcgggccacagaccgtacgaacggaagaccgctgaggcagacgaatcgcccccaaggggaaaccggtcccgagacagggaacccgacacacggtgcccacacccaggcggacccgaaaaccgaaaatgtatgcagattgtttgtagaggcactgatagactcattgtttatctcctcgttttcgcttatttcgccaacaccgactgctgccgctttcgcgaactgggcatctgggctccgggtaaacaaaacgcccacggcacaataattgccatccacaacaacgcccttagtttcacgacgccccagcgcggcggtacgcgctttctcctggggagatataagccgcaatcggcgcgcaatcgtccatgcgacttaacgccagcagatgaccgccgtcatcggcaacagcatggaaacagaccaggtgtggtgaaagagtatcagggggttatcgatccccagcgcctggcgcagtatggcatcagtctcgccgaagtaaaaagcgcgctggatgcttcaaaccaggaagcgggcggttcgtcgatcgaactggcggaagcggaatatatggtgcgcgccagcggctatctgcaaacgctcgacgactttaatcacatcgttttaaaagccagtgaaaatggcgtgcccgtttatctgcgcgatgttgcgaaggtccagattggcccggagatgcgccggggcattgccgaactaaacggcgaaggcgaagtggcgggcggggtggtgatcctgcgatccggcaaaaacgcccgagaagtgatcgccgccgtgaaggacaaactggaaacgctgaaaagtagtctgccggaaggcgtggagatagttacaacatacgatcgcagccagctcattgaccgcgccatcgacaacctcagcggcaagttgctggaagagtttattgtggtggcggtagtctgtgcgctgtttctctggcatgtgcgctcggcgctggtggcgactatatcgttgccgctggggatgggtattgctttaattgtcatgcacttccagggactgaatggcaatattatgtcgatgggtggcattgacaatggcgaccgggcgatggtcgatgctgctatcgccatgatcgagaatgccataaagggtgggagaatggcagacccggcatactga

SEQ ID NO: 4906 - DNA, 1440 bp, Homo sapiens
  SIMILAR (7)..(666): 991254mologous to Escherichia coli K12 sialic acid transporter,accession number AE000401,Smith-Waterman Score=1137.
atggcgaatatcccgtggtatcgccatctcaccggtgcacaatggcgcgcattttccgctgcctggttgggatatctgcttgacggttttgatttcgttttaatcgccctggtactcaccgaagtacaaggtgaattcgggctgacgacggtgcaggcggcaagtctgatctctgcagcctttatctctcgctggttcggcggcctgatgctcggcgctatgggtgaccgctacgggcgtcgtctggcaatggtcaccagcatcgttctcttctcggccgggacgctggcctgcggctttgcgccaggctacatcaccatgtttatcgctcgtctggtcatcggcatggggatggcgggtgaatacggttccagcgccacctatgtcattgaaagctggccaaaacatctgcgtaacaaagccagtggttttttgatttcaggcttctctgtgggggccgtcgttgccgctcaggtctatagcctggtggttccggtctggggctggcgtgcgctgttctttatcggcattttgccaatcatctttgctctctggctgcgtaaaaacatcccggaagcggaagactggaaagagaaacacgcaggtaaagcaccagtacgcacaatggtggatattctctaccgtggtgaacatcgcatagccaatcagcttggcccaatggggggaaaaccccttttttttttaaaaatcccaaaaaatggcctagtgggggaagtctgggaccacggtcccactcgtatcgtcggtctgattattagtctgggaccacggtcccactcgtatcgtcggtctgataatcagactgggaccacggtcccactcgtatcgtcggtacagggtaagctgcctgcgggagtcagcgccgagctggggccagatgccacgggtgttggctggatctatgaatatgcactggtggatcgcagcggtaagcacgatctggccgatttacgctcattacaggactggtttctcaaatatgagctgaaaaccatccctgacgttgcccaagtggcgtcggtgggcggtgtggtgaaagagtatcaggtggttatcgatccccagcgcctggcgcagtatggcatcagtctcgccgaagtaaaaagcgcgctggatgcttcaaaccaggaagcgggcggttcgtcgatcgaactggcggaagcggaatatatggtgcgcgccagcggctatctgcaaacgctcgacgactttaatcacatcgttttaaaagccagtgaaaatggcgtgcccgtttatctgcgcgatgttgcgaaggtccagattggcccggagatgcgccggggcattgccgaactaaacggcgaaggcgaagtggcgggcggggtggtgatcctgcgatccggcaaaaacgcccgagaagtgatcgccgccgtgaaggacaaactggaacaatattaa

SEQ ID NO: 4907 - DNA, 1198 bp, Homo sapiens
  SIMILAR (35)..(559): 911254mologous to Escherichia coli K12 putative inner membrane component for iron transport,accession number AE000162,Smith-Waterman Score=817.
tcaatgtccgtacccgtacatcgctgcgactggcaggatcttagttgttacccaccttatttgtcttgcaccacaaatcgttgaaaatcaggtgacttatccgctaaccaccaccatgttgtcggtgcctggcgcgaagactgtgcgcggtttctcacagtttggcgactcttatgtgtatgtcattttcgaagatggcaccgatccgtactgggcgcgttcgcgggtgctggagtacctcaaccaggtacagggtatgctgcctgcgggagtcagcgccgagctggggccagatgccacgggtgttggctggatctatgaatatgcactggtggatcgcagcggtaagcacgatctggccgatttacgctcattacaggactggattctcaaatatgagcttgaaaccattccttgcgtttcggaagtggcgtcggtgggcggtgtggtgaaagagtatcaggtggttatcgatccccagcgcctggcgcagtatggcatcagtctcgccgaagtaaaaagcgcgctggatgcttcaaaccaggaagcgggcggttctgtcgatctgaactggcggaagcggaatatatgggcgggacttgctccgcacacggaagagccctatcccggggggtcctttggtgccgattctccgcgattgttcgggggcctccaaggggcatgttttgcggcgcaggtgctgcgccgaatcttatacgagcgccaccgtcattataaacacacctttgcgagaggggcgccgcccacttgggctgccgccggcacactagggactagttgtcctaaccggtggaacttcgaagagtccggcaatatcccctggggcagaaccagcgtaccgcgactggtagcctctctcaacatagctggatcccgtcaccagatgccttccccggctgcgaactgggaaaggcattcccggtcatcgttttacaagctctcaccggccgggaaaccccgagccagctctattgactgggtatactcccgaccaagcctaccagctggccccgtggccttactcaaggccatgacagtctcaacagcttatctgcaagcacccggaatctgcgcccgcattccgacccaagtgcggtcgcacaaagcgaaagcagctcgctcgaacacccatgtactcgacatggtgtgcgattcgataaaactggccgtcgcctaa

SEQ ID NO: 4908 - DNA, 681 bp, Homo sapiens
  SIMILAR (681)..(118): 661254mologous to Escherichia coli K12 selenopolypeptide subunit of formate dehydrogenase H,accession number AE000481,Smith- Waterman Score=604.
ttaatggtaatcaacgattttacgatactcttcaaagccttctgtacgtgaagcgacgaacgctttgtcgtacagattttcttcaataatgacatggcccatcgcattcaacagcgcgatgttcgagccgtttttcagtgcaatgtgcatgtcagcaatgcgcgcggtttcaattttgcgcggatcgcagacgataattttcgccccgttacgtttagcgttaattacgtgattcgccacgattgggtgggaatccgccgggttgtacccgaaaacgaacactaaatcggtattatcaatttcgttaatagcattgctcattgcgccattaccgaccgattggtgcagaccacgcgaggagccggtcgtctggatggcatccggaccgtacttctctttgatggcgctcaggcgctcggcaacgtaattcagtgcctcatcccaggaaacaggttcgagtttgccgccacgctggcgacggatcatgggggttttcaggcgcggggtcaggatctgggtatcgttaatgaagtcccagccataataacccttcagacacagggtaccctggttggttttcccctgcgctgcctccgcccggacgattttgccgttatcgacgaccaggttgattttgcaacctgatgcgcaataggggcaaaccgtgacgacttttttcat

SEQ ID NO: 4909 - DNA, 609 bp, Homo sapiens
  SIMILAR (607)..(2): 991254mologous to Escherichia coli formate dehydrogenase,accession number M13563,Smith-Waterman Score=1039.
tgatatcttcaaccgactccggcgtgtagccttcaacgattttacgatactcttcaaagccttctgtacgtgaagcgacgaacgctttgtcgtacagattttcttcaataataacatggcccatcgcattcaacagcgcgatgttcgagccgtttttcagtgcaatgtgcatgtcagcaatgcgcgcggtttcaattttgcgcggatcgcagacgataattttcgccccgttacgtttagcgttaattacgtgattcgccacgattgggtgggaatccgccgggttgtacccgaaaacgaacactaaatcggtattatcaatttcgttaatagcattgctcattgcgccattaccgaccgattggtgcagacctgcaaccgatgggccgtgtcagacacgagcgcagcagtcaacgttattggtaccaataacggcgcgcgcaaatttttgcattacatagttggtttcgttacccgtaccacgcgaggagccggtcgtctggatggcatccggaccgtacttctctttgatggcgctcaggcgctcggcaacgtaattcagtgcctcatcccaggaaacaggttcgagtttgccgccacgctggcgac

SEQ ID NO: 4910 - DNA, 528 bp, Homo sapiens
  SIMILAR (1)..(297): 831254mologous to Escherichia coli 3-(2,3- dihydroxyphenylpropionate)1, 2-dioxygenase,accession number Y09555,Smith-Waterman Score=399.
ttaggcgtggaagccacggccaattggtgatttcggcaagagcggcagaaaagctgcccgtgccctgtggagctggcgcaggcctgtgcgcatgccgtcatgaagagcgggatcgatcttgccgtttcttactgtatgcaggtgaaccacgggttcgcccagccgctggagttcctgctcggtgggctggataaggtgccagttctgcttgtgttcatcaacggtgtcgccacgccgctgcccggtttccagcgtacccgcatgttgggtgaagccattggacgtttcaccagcactcctcagtatgccggcgacacggttaatgatgaagatatcagtaataccattcgcgctctgtttgctaccggcaactttgaggatgttcgcgtccttcgtgatggtgagctgagaaagttcccaacctgtgaatcagacgataattttcgccccgttacgtttagcgttaattacgtgattcgccacgattgggtgggaatccgccgggttgtacccgaaaacgaacactaa

SEQ ID NO: 4911 - DNA, 2772 bp, Homo sapiens
  SIMILAR (1447)..(2079): 1001254mologous to Escherichia coli ribonucleoside triphosphate reductase,accession number L06097,Smith-Waterman Score =1093.
atggcaccgctttctgcctactcgtctaccgaatggacctatggttcaccgcgactggaacgctacaacggcatcccgtcaatggagattttaggtgaagcggcggccgggaaaagtaccggtgacgccatgaaatttatggcagacctggtcgctaaacttccggcaggcgtcggctactcatggaccggactatcgtatcaggaagcgttatccgcaaatcaggctcctgcgctgtatgcgatttcactggtcgtggtgttcctttccctcgccgcactctatgagagctgcgtcgttggcgcattactggccaccgatctgcgcggcttaagtaatgacgtctacttccaggttggtttgctgaccaccatcgggctttccgccaaaaacgccatcctgattgtcgaatttgccgttgagatgatgcagaaagaagggaaaacgccgatagaggcaatcatcgaagcggcgcggatgcgtttacgcccaatcctgatgacctctctggcctttattctcggcgtgctgccgctggttatcagtcatggtgccggttctggcgcgcaaaacgcgcaattcgtcatcattttgtaccaacacatactgacccctgaaacggacaaaatccatacgccacgcatcgttccgcaaaaactggagcgcacgcatctgacaccagtcgctctcgcggttgccactgtttttatgctggctggctgtgaaaagagtgatgaaacagtgtctctctatcaaaatgctgacgactgttcagctgcaaacccaggcaaaagcgccgaatgtaccaccgcgtacaacaatgcgctgaaagaagccgaacgtactgcgccgaaatacgccacccgtgaagactgtgttgctgaatttggtgaaggtcagtgccagcaggcaccagcccaggctggcatggcaccagaaaaccaggcgcaggcccagcaatccagcgggagtttctggatgccgctgatggccggttacatgatggggcgtctgatgggcggcggcgcgggatttgcacagcagccgctgttctcctcgaaaaacccagccagtccggcttacggtaaatataccgacgcgacgggcgttcacttccaccattttgtggatcagtgtacgacgggtaatttcggttggttccggctggtttttcagtttacgcagggtgcgggcgatcacttccgggttgctggcagcttcgcctttcggcgaaatgctgtggtattgctcggcggtgttggccaggttcaggaactgactaaacgcacgcgcaacgggcacgcagctcgtcgttcgacaaattttgtaaggtgtttatcagcaaaatgtgatctctggtacaatccgggtggttatacggttcaagactccagtgttccctttattccgccaacaattgggaagttaaagcgttgcaagtcctttagcgagcagatgcagggccgcaaccaggtggatatcaatgagatccagaccgcagttgaaaatcagctgatgtcaggtccatacaaacaactggctcgtgcttacatcgagtaccgtcacgatcgcgacattgaacgtgaaaaacgcggtcgcctgaaccaggagatccgtggtctggtcgagcagaccaacgcctcgttactcaacgaaaacgccaacaaagacagcaaggtgattccaacccagcgcgacctgctggccgggatcgtggctaaacactatgcacgtcagcacctgctgccgcgtgacgtggtgcaggcacatgagcgtggcgatattcactatcacgatctcgattactcaccgttcttcccgatgttcaactgcatgttgatcgacctgaaaggcatgctgacccagggctttaaaatggggaacgccgagattgaaccgccgaagtcgatctctacggcaaccgcggtaactgcgcagattattgctcaggttgccagccatatttatggcggcaccaccattaaccgtatcgatgaagtgctggcaccgtttgtcactgccagctacaacaaacatcgcaagaccgcagaagagtggaacatcccggacgccgaacggaaaatccaggtttctccaaccaagcctctggcaacacagcgcgatctggcgctggcctactcaccaggcgttgccgcaccttgtcttgaaatcgaaaaagacccgttaaaagcctacaaatataccgcccgaggtaacctggtggcggtgatctctaacggtacggcggtgctggggttaggcaacattggcgcgctggcaggcaaaccggtgatggaaggcaagggcgttctgtttaagaaattcgccgggattgatgtatttgacattgaagttgacgaactcgacccggacaaatttattgaagttgtcgccgcgctcgaaccaaccttcggcggcatcaacctcgaagacattaaagcgccagaatgtttctatattgaacagaaactgcgcgagcggatgaatattccggtattccacgacgatcagcacggcacggcaattatcagcactgccgccatcctcaacggcttgcgcgtggtggagaaaaacatctccgacgtgcggatggtggttccggcgcgggtgcgcagcaatcgcctgtatgaactgctggtagcgctgggtctgcaaaacataacatcgtggttttcgattcaaaaggcgttatctatcagggcggtgagccaacatggcggaaacaaagctgcatatcggtggtggatacggcaacgtacgtcgatgatgtga

SEQ ID NO: 4912 - DNA, 684 bp, Homo sapiens
  SIMILAR (136)..(462): 921254mologous to Escherichia coli ribonucleoside triphosphate reductase,accession number L06097,Smith-Waterman Score =537.
atgacaccgcatgtgatgaaacgagacggctgcaaagtgccgtttaaatcagagcgcatcaaagaagcgattctgcgtgcagctaaagcagcggaagtcgatgatgccgattattgcgccactgttgccgcggttgtcagcgagcagatgcagggccgcaaccaggagatccgtggtctggtcgagcagaccaacgcctcgttactcaacgaaaacgccaacaaagacagcaaggtgattccaacccagcgcgacctgctggccgggatcgtggctaaacactatgcacgtcagcacctgctgccgcgtgacgtggtgcaggcacatgagcgtggcgatattcactatcacgatctcgattactcaccgttcttcccgatgttcaactgcatgttgatcgacctgaaaggcatgctgacccagggctttaaaatggggaacgccgagattgaaccgccggaagtcgaatctcgtacgggcaaaccgcggcgcctgggtgaggcccggagctttggtatccggcgcaacaatctggctggcgtgggcgtgatcagcggtgactatgaccagcgtgttaccctcctttttagcgaattccagcgcccgttgtacggcttcatcgagatcgaccgtctcgccaatttgcccacaaggattcgcagcatgatcctgtctatcgattga

SEQ ID NO: 4913 - DNA, 1233 bp, Homo sapiens
  SIMILAR (983)..(1054): 581254mologous to Escherichia coli K12 anaerobic ribonucleoside-triphosphate reductase,accession number AE000495,Smith-Waterman Score=60.
tctccggcacccgcggtacctgcgcagattattgctcaggctgccacccatatttatggcggcaccaccattacccgtatcgatgaagtgctggcaccgtttgtcactgccagttacaacaaacatcgcaagaccgcagaagagtggaacatcccggacgccgaaggttacgctaactctcgaaccatcaaagagtgctacgatgccttccagtcactggagtacgaagtaaacaccttgcacaccgccaacggtcagacgccgtttgtaacctttggttttggcctgggcaccagctgggaatcgcgcctgattcaggaatcgatcctgcgtaaccgtatcgcaggcctcggtaaaaaccgtaaaactgcggtgttcccgaaactggtgtttgcgattcgcgatggcctgaaccataaaaaaggcgatccgaactacgacatcaaacagctggcgctggagtgcgcaagcaagcgcatgtatccggatatcctgaactacgatcaggtagtgaaagtcaccggttcgtttaaaactccgatgggctgccgcagcttcctcggcgtgtgggaaaatgaaaacggcgagcagatccacgatggtcgtaacaacctcggcgtgatcagcctgaacctgccgcgtattgctctggaagcaaaaggcgatgaagccaccttctggaagctgctggatgaacgtctggtgctggcacgtaaggcgctgatgacccgtatcgctcgtctcgaaggcgtgaaagcgcgcgtggccccgatcctctatatggaaggtgcttgtggcgtgcgtctcaatgctgacgatgatgtttctgaaatcttcaaaaacggtcgtgcgtctatttcgctgggttacatcggcatccacgaaaccattaacgcgctgttcggcggcgagcatgtttacgacaacgagcagcttcgcgcgaaaggtatcgccattgttgaacgtctgcgtcaggcagtggatcagtggaaagaagaaacggcccaacaggtttccacccctcgatgtggagaagaaggtgaacccgtacgacagcagcggggcgaccggcagcatacggaagcccagtatgccgcaccagggggaatggcaaacccgaacacgtacgaaagtgcggtgcagccacaaaccaggggggacccggcggttaaaaaaaattggaaaacgaagggggcaaaaaagactgtcacgttgcgccctcctctgtcatga

SEQ ID NO: 4914 - DNA, 777 bp, Homo sapiens
  SIMILAR (256)..(651): 951254mologous to Escherichia coli K12 anaerobic ribonucleoside-triphosphate reductase,accession number AE000495,Smith-Waterman Score=674.
atgctacggaccagtgatcgtcctccatatcaatatccgaagcgctgcattcctctatcagtgttagaggtcttgcgatgcgcacgtcgatggtcgttacgtccatacaaacaactggctcgtgcttacatcagagataccgtcacgatcgcagacattgaacgtgaaaaacgcggtcgcctgaaccaggagatccgtggtctggtcgagcagaccaacgcctcgttactcaacgaaaacgccaacaaagacagcaaggcacatgagcgtggcgatattcactatcacgatctcgattactcaccgttcttcccgatgttcaactgcatgttgatcgacctgaaaggcatgctgacccagggctttaaaatggggaacgccgagattgaaccgccgaagtcgatctctacggcaaccgcggtaactgcgcagattattggctcagtccatatttatggcggcaccaccattaaccgtatcgatgaagtgctggcaccgtttgtcactgccagctacaacaaacatcgcaagaccgcagaagagtggaacatcccggacgccgcaggctacgctaactctcgaaccatcaaagagtgctacgatgccttccagtcactggagtacgaagtaaacaccctgcacaccgccaacgtcgagggcttgacaggcgatgatggaatagccgtcgaagcgctaaagaagaactcccagaaaccacgcatgagtgcaagtcacaattgtgaacttgtcagtcttcgtggtcgacaatatacgtag

SEQ ID NO: 4915 - DNA, 1281 bp, Homo sapiens
  SIMILAR (1)..(885): 851254mologous to Escherichia coli Acriflavin resistance protein D,accession number D90845,Smith-Waterman Score=1231.
atgggcgatatcgtcgggcgactgttccgcgaatttgctattaccctggcggtagcgattttgatctcagcggtggtgtcgctgaccctgacaccgatgatgtgcgcgcggatgctcagccaggagtcgttgcgtaaacagaaccgcttctcccgtgcctcggaaaaaatgttcgacaggataatcgccgcctatggtcgtggactggcgaaagtgctgaatcatccgtggctgaccttaagcgtggcactcagcacgctgctgcttagcgtgctgctgtgggtgttcattccgaaaggtttcttcccggtacaggacaatggcattattcagggcactttgcaggcaccgcaatccagctcctttgccaatatggcccagcgacaacgccaggtcgcggacgtgattttgcaggatccggcagtgcaaagcctgacctcatttgttggcgttgatggcactaacccgtcgctgaacagtgcacgtttacaaatcaacctcaaaccgttggatgaacgtgatgatcgggtgcaaaaagtcatcgcccgtctgcaaacggcggttgataaagtgccgggcgtcgatctctttctgcaaccaacgcaggatctgactattgatactcaggtcagccgcacccagtaccaatttaccttgcagggcccgtcactggatgcgctcaatacctgggtgccacagttgatggaaaaacttcagcaacttggccagctttttgaagttttccacgactgggcaggacaaaaggctgcgccagcccgttgggggatcagcatggcggatgtcgataacgccccttgtgcaacgcgtttgggcctcgcggcgctggataccattcgcctgaccagcagcgacggcggcgtggtgccgctaagctcaattgccaaaattgagcagcgttttgcgccgctctccatcaaccatctggatcagttcccggtaacgaccatctcctttaacgtgccggataactattcgctgggcgatgcggtgcaggcgattatggacaccgaaaagacgctgaatctgccggtggatatcaccacgcagttccagggcagcaccctcgccttccagtcggcgctgggcagcactgtctggctgattgtcgcggcggtggtggcgatgtatatcgtgctcggcattctgtacgagagctttattcacccgatcaccattctctcgacgctacccaccgcaggggttggcgcactgctggcgttgctgattgctggtataatatacagtgtagccatcatctaa

SEQ ID NO: 4916 - DNA, 1002 bp, Homo sapiens
  SIMILAR (523)..(978): 941254mologous to Escherichia coli Acriflavin resistance protein D,accession number D90845,Smith-Waterman Score=710.
ctacgatttcacccacgaactgttaaccacactggaagttgacgatccggcgatggtagcaaagcagatggaactggtgctggaaggctgtttaagccgaatgctggtgaatcgtagccaggcggtcgtttcccggaaggctatccggtcgcggttgtctcttccgtaaaactcgatacccagcgcgcttatactgtgattcaggcgcgtccgactgcagggctgcaacgtttgcgttatctgctgctgctgtggggggcagatcgtaacggcgctaacccgatgacgccggaagaggtgcatcgtgttgctaatgaacgtctgatgcagatgatgccgcagacgcgatggggccaaagttacctgaaccggcaacggggatcgctcagccgactccgcagcatccggcgacaggaaatgcagctactgcgcctgctgcgccgacacagcctgctgctaatcgctctccacaaagggctacgccgccgcaaagtggtgctcaaccgcctgcgcaggatccccctgctgcttatcgtgctgctgtgggtgttcattccgaaaggtttcttcccgggacaggacaatggcattattcagggcactttgcaggcaccgcaatccatctcctttgccaatatggcccagctacaacgccaggtcgcggacgtgattttgcaggatccggcagtgcaaagcctgacctcatttgttggcgttgatggcactaacccgtcgctgaacagtgcacgtttacaaatcaacctcaaaccgttggatgaacgtgatgatcgggtgcaaaaagtcatcgcccgtctgcatacggcggtagataaagtgccgggcgtcgatctctttctgcaaccaacgcaggatctgactattgatactcagggcagccgcacccagtaccaatttaccttgcatgccacgtcactggatgctctcaacacctgggtgccacagttgatggaaaaaattccagcaactgccaaaactttctga

SEQ ID NO: 4917 - DNA, 291 bp, Homo sapiens
  SIMILAR (71)..(289): 951254mologous to Escherichia coli Respiratory nitrate reductase 1 b chain (EC 1.7.99.4),accession number D90810,Smith- Waterman Score=367.
atgaacccggttgatcgtccactattagatattggcttaacgcgattagaattcttgcgtatatcaggaaaaggccttgcatggtctaacaattgcccctgcgttactgtcacttttgggttgcaaacaggaagatattgatagcggcacagtagggttgataaatacccccaaaggggtgctggtgacccagcgagcgcgatgcacgggttgccaccgctgtgaaatctcttgtaccaacttcaacgatggctcagtagggacattcttctcccgcatcaaaccccatct

SEQ ID NO: 4918 - DNA, 306 bp, Homo sapiens
  SIMILAR (1)..(285): 961254mologous to Escherichia coli K12 putative GTP-binding protein,accession number AE000349,Smith-Waterman Score=472.
atgaaaaattttgaagttctgcagccactacagaactccctttccggtctaccgctatgggtatctgaacgtatattgcagcagataaatcagttaacccactacgagccagtgatcggcatcatgggtaaaactggggcgggaaagagtagcctttgcaatgccctgtttgccggtgaagtatcgccggtcagcgatgtagcgggctgtacacgtgatcctttacgctttcgcctgcagattggagaacactttatgaccatcgtggatctggccgggcgtgggcgaaagtggggttcgggataa

SEQ ID NO: 4919 - DNA, 2775 bp, Homo sapiens
  SIMILAR (708)..(97): 971254mologous to Escherichia coli K12 putative transport protein,accession number AE000114,Smith-Waterman Score=1066.
ctatatacagacactaaggacataatccccgcctcggcagaggcgcgatatctgtcgggaggagttcattaggatagaggctctgccaattacacggcccgcacagaaaaaggcatactccgcaaagaccatcactaccagccagatccccatatccgggattagccccaaaaccgcgagcgccagcgtcatcatggcaaagctgccaatcaccaatggacgccgtccggcagtgtttaaccacagcatcggcggaatacagccgagcataaagaacaggctaatcaccacattccctagtgccgcgtttttgccaacccccaatcccaacaaaccaacgatttgcgggccaaaggtgtaaatggcgaacattgggatcacctggcaggtccagatggcggcaacaaacagaacaaaaggaaaatggcggcgattaaacagatcgcgaaaacgggtttgctgcggctgctcttcatcgaaagccaccggttcgccaaacagtttgatcatcatctcttcgcactcttttactcgccctttgcgtaataaccagcggggagattcaggcagttcgaatcgaccaatcaaaatcaacaaacaggggatcgccgcgctacccagcatccagcgccagccgccttccacatcataaagccagtagccgaccagatcggcacaggtcgcgccgacataccacatcgcggcaatagaccatcgctgcagtggatttggatccagacattcgctaactgtaaaatcgcgtcctacgatcgatacgcgccaacgaaatcgttctgttgtcgcatcatcttgttgcataattagaccgtagcctaagccctgctcgtcctgtgagtatccaatagtcaccgcggccaatttatagcgaacctgtccctggcgagtcaggaagggcctcgatgctgccgaaacctggaaattgttcacccgaccatcttcttccgtcactttgacatccagcgtgccctgaacagactgattgaggtcatcaataataaacgggcctggcgggacttttttctggtaaatgacgcggcctgattgactgatcgtcaccgtggcattggtctgtgcaataccgctaatttgtggggcgtagccacgcagctcccacggtaacattcgatcgtcactcgccagtgccgcgccggtataagaaaaaccatcgaaaatattggaactgaaatcggtttcgccgagggttaacttagagccacgcgaggagccggtcgtctggatggcatccggaccgtacttctctttgatggcgctcaggcgctcggcaacgtaattcagtgcctcatcccaggaaacaggttcgagtttgccgccacgctggcgacggatcatgggggttttcaggcgcggggtcaggatctgggtatcgttaatgaagtcccagccataataacccttcagacacagggtaccctggttggttttcccctgcgctgcctccgcccggacgattttgccgttatcgacgaccaggttgattttgcaaccgcttaacacatcgacgctaacatcagtcaacagcaagggttcttcttcagtccacggataacgcccttgcaaatcagccgtaatatttttcgctgtcaccagattaatcacttcggcaattcgcaacgtaacggggccgcgagtccccagatgccaggctccatcggcaaaacggaaaggcaggacaaaatcgacaccgttaacctgattatctggcatccaggcactaccgcctttcaacacgccgtgtcctcccgcgcggaatccttgttcaggcgcagcagaaaatgcaacctgagcatacagttcaccatcgcgtaagttcatcttccagtcgggtggcaccagcggctggaatacggtcagtgattgtttaggccaccaggcgttaccgcgcagacgaataccgtcccagcgaccatttacccgaaccgggccaatctcaccagcatgtaaatcgcctttaaagaggaaataggtaggatcgcgcccatcgacgctaaattttaaggttgatggcggtaacacactgccgccagtgaacagcgtttgcccggcgtccagtgacagcgcgccgctaaaggagggatgctgtgcgtcacgtacccagacgatgggctttcgagctttagcgctcgagtgcgcttgatagcaggccaatcttgtacttaactgtttcgcaacttgataggagacttcggtcatgttgccgtagttgccagagaatttgatgctgtcgaacgggaccatcatcgctgcggtcgctttgttcagttcttcgactttagtgccatccgggagcgtgacggtgtaacgcccgctttttgatgactgggtttcaaagaagcgaccgacttcagaacttggtgatgcggtagtcgcaacacccgggatctcaactttcttcgcggcttcgccaccggcagccagagctgcacgtcctgcttcggaatctgccgggatcacatccgggctctggacgatacgtttcttagcatcttttttatagatgaatgcagtaatacgctggttgccgccctggttggcatcgatttgacgaacgatgtagaaagagtaggcacctttcgcttttgccgctttggtgatggcatcattgacttctggctggctacgatagaagcctgtcgtgctcgagagccgtggcgcgcatagccgcttcgacttcccggatcgtgatgatgaaaactggctgtgccactccctgtatctgccagagtcggaatccat

SEQ ID NO: 4920 - DNA, 308 bp, Homo sapiens
  SIMILAR (142)..(306): 751254mologous to Escherichia coli succinate dehydrogenase large subunit,accession number J01619,Smith-Waterman Score=184.
tcacttgaggtgatctggacggttccagacacagggctttcctttgtcacctccctgtggagttgaagacagcgctgatgttcccggtgacgttgacacgagcactgatggaaacggcgtatgaacggctgtttctgccaattccgtaccgaaagccgtggcgcgcatagcgcttcgacttcccggatcggatgatgaaaactggctgtgcactccctgtatctgccagagtcggaatccatgacgcgccgaagcgtcaacatgaacccgaaactgcgcccggcattcccgccgaagattcgtactta

SEQ ID NO: 4921 - DNA, 1132 bp, Homo sapiens
  SIMILAR (343)..(1131): 981254mologous to Escherichia coli Helicase (EC 3.6.1.-) IV,accession number D90734,Smith-Waterman Score=1349.
atggcgagcactactacgcaccatcacagcgactcgctccttgcagtcagcaacaaccgtcgagtgtatagtctcatctcgtgccgtgacacagtgtacgtcacacgcaggctgtcagagacatacaggacagattatggtggctccttcacagcgaagacagctgcgagacgtacgttgcacaatgtagagtacgggcggcaaaacacgtggcccggaaaacggcttatttgggcggggaaaaatgaacctttgcctttaaccccggaggatttggattaccgcttcccttggcaaatcgccgaaaattctggggtgctgacttgcttgattgaggcccagaagcagtgcagcaaaaaagttccgatagtcagcaaactggaaaatgataccgctgcccgtcatgaactctttattgctgagtggcgcaagcaatgcagcgaaaagaaagcgcaggcgaagggctggcggcaatggctgacggaagaaatgcagtggtcagtgccagaaggtaacttctgggatgatgaaaaattacagcgtcgccttgcctctcgcctcgatcgctgggtaagtctgatgcggatgcacggtggtgcacaagcagaaatgattgccagtgcacccgaagagattcgcgatctgttcagtaaacgtatcaagttgatggccccgttattaaaagcctggaaaggtgcgctgaaggcagaaaacgctgtcgatttttcgggccttaatcatcaggcgattgtgattctggagaaaggtcgctttatcagcccgtggaagcatattctggttgatgaatttcaggatatctcgccgcagcgggcagcgttgttagcggcattacgcaagcaaaacagtcagacgacgttgttcgctgttggtgatgactggcaggcgatttaccgattcagcggtgcgcaaatgtcgctcaccaccgctttccatgaaaactttggtgaaggcgaacgctgtgatttagacacgacttaccgttttaacagtcgtatcggtgaggtggcaaaccggtttattcagcagaacccaggccagctgaaaaagccgctaaacagcttaaccaatggagacaaaaaagccgtcacgttattggatgagagtcaacttg

SEQ ID NO: 4922 - DNA, 1602 bp, Homo sapiens
  SIMILAR (1102)..(1599): 951254mologous to Escherichia coli GLYCINE BETAINE-BINDING PERIPLASMIC PROTEIN PRECURSOR,accession number D90891,Smith- Waterman Score=832.
aaaattggggggttaaggtgggtttaacccccccggggggaccccaaaaaagggccccgggtttctttgaaaaaaatttagagggtgggcccgattttccccccggggaaaaagggaatccattgcggtgggtctccggcgggttctgtggttgtttcgggtaatctccgtcaaaaagatggcagatacagcttttactgtgcggttatcgttaagaaagttgacgcgaaaactcgcgccaaagtcggcattaacgaactggtgcgtaccatcgactaaaagtatgcacacgggcagcacgacgctgcccgatttttttgcagggatgagcgatgatttcacgccgccgatttttgcaggctactgccgcgacgatagccacgagctcaggtttcggttatatgcattactgtgagccaggctggtttgaattaatccgtccccgcctcgccttttttaaagacaacgcagcaccattcaaaattctttttctggccgatctccattactctcgttttgttcctttaagcctgatttctgacgcgattgctcttggcatagaacaaaagcccgatttgatattactgggcggcgattacgtattatttgatatgtcgctgaatttttcggcgtttagtgacgtactctccccccttgccgaatgtgcgccgacgtttgcctggttcggcagccacgatacagccgtggttggtacagaaaaaatatccattaattggcgagtcgttgaactcaccgggcctaacggggttgtttacccagggtacggtgatcgcctacgccaacaggccattcgaactggtaggcactggtgacttatggagcggacaatgcaaatcggcttccgccagcgaaaccaatctgtcaagactggtgctggcgcataactcctgcagcaaagaagtcatgcgtgatgaaccctgcgatctgatgctgggcagtcatactcaccgctggcaactgagcgtaccgatggctggagaacctttttgccatgtcgcagatgaacgttacgttctcggattaaatgccttttgcgaaagacacatatacacaatccccagggggggcaagaggatcccccaaacttttgctgccgatctgccgggcaaaggcattactgttaatccagttcagagcaccatcactgaagaaaccttccagacgctgctggtcagtcgtgcgctggagaaattaggttataccgtcaacaaacccagcgaagtagattacaacgttggctacacctcgcttgcttccggcgatgcaaccttcaccgccgtgaactggacgccactgcatgacaacatgtacgaagctgccggtggcgataagaaattttatcgtgaaggggtatttgttaacggggcggcacaaggttacctgatcgataagaaaaccgccgaccagtacaaaatcaccaacattcgacaacttgaagatcccgagatcgccaaacttgtcgataccaacggcgacggaaaagcggatttaaccggttgtaaccctggcttgggcttcgaaggtgcgatcaaccaccaacttggcgcgtatgaactgaccaacaccgtgacgcataattag

SEQ ID NO: 4923 - DNA, 312 bp, Homo sapiens
  SIMILAR (1)..(213): 1001254mologous to Escherichia coli spheroplast protein y,accession number Y07714,Smith-Waterman Score=363.
atgcgtaaattaactgcactgtttgttgcctctaccctggctcttggcgcggctaacctggcccatgccgcagacaccactaccgcagcaccggctgacgcgaagccgatgatgcaccacaaaggcaagttcggtccgcatcaggacatgatgttcaaagacctgaacctgaccgacgcgcagaaacagcagatccgcgaaatcatgaaaggccacgcgtgaccagatgaaacgtccgccgctggaagaacgccgcgcaatgcatgacatcattgccagcgataccttcgataaagtaaaagctgaagcgca

SEQ ID NO: 4924 - DNA, 726 bp, Homo sapiens
  SIMILAR (245)..(724): 1001254mologous to Escherichia coli No definition line found,accession number U00039,Smith-Waterman Score=819.
ataaagaccatataaagggggttttagaggcacaaaattccctttccacccaggtttccttgtttttttgatcgttttttggctaaaattccaatatgcgaaacttgattcaaatatatcgttcacttttacaaaggcaatctgattgatgaatttcaaaagacataaaaatcaattggttataaattatctgtcgagatcgtgaactacggcacactttgcgctaccatcaggacgcgacaaaatggggaaagaagtgatgggaaaaaaagagaacgagatggcgcaggaaaaagagcgtccagccggaagccagagtctgtttcgcgggttgatgctgattgagattttgagcaactatccaaacggttgtccgttggcgcatctttcggagctggctggtttaaataagagtaccgtccatcgcttattgcagggattacagtcctgcggctatgtgaccaccgcgcctgccgcagggagttatcgcctgaccaccaaatttattgccgtcgggcagaaggcgctgtcttcgctgaatatcattcatatcgccgctccgcatcttgaggcactgaacatcgccactggtgaaaccattaacttctccagccgcgaagacgatcacgctattttgatttataagctggaacccacaaccgggatgctgcgaacccgtgcctatattggccagcatatgccgctctactgttccgcaatgggcaa

SEQ ID NO: 4925 - DNA, 915 bp, Homo sapiens
  SIMILAR (881)..(913): 901254mologous to Homo sapiens NAG13,accession number AF194537,Smith-Waterman Score=48.
atgacgggcgtggccaccgcgcgggccagggggttgcggcggcccctttctgtgggacaagttcccccctttgcccggctgtggaagggtgtccaaacagtagagcggcatatgctggccaatataggcacgggttcgcagcatcccggttgtgggttccagcttataaatcaaaatagcgtgatcgtcttcgcggctggagaagttaatggtttcaccagtggcgatgttcagtgcctcaagatgcggagcggcgatatgaatgatattcagcgaagacagcgccttctgcccgacggcaataaatttggtgaaatacaaactaccatcagagaatactataaacacctctatgcaaataaactagaagatctagaagaaatggataaattcctggacacatacaccctcccaagactaaaccaggaagaagtcgaatccctgaatagaccaataacaggctctgaaattgaggcagtagttaatagcctaccaaccaaaaaaagcccaggaccagagagactgacagccgaattctaccagaggtacaaagaggagctggtaccattccttctgaaactattccaaacaacagaaaaagagggactcctccctaactcattttatgaggccagcgtcctcctgataccaaaacctggcaaagacacaacaaaaaaagaaaatttcaggccaatatccctgatgaacatcgatgtgaaaatcctcaataaaatattggcaaaccgaatccagcagcacatcaaaaagcttatccaccacaatcaagttggcttcatcattggggtgcaaggctggttcaacatatgcaaatcaacaaacgtaatctatcacgtaaacagaaccaatgacaaaaaccacgattatctcaatagatacagaaaaggccttcgatga

SEQ ID NO: 4926 - DNA, 1341 bp, Homo sapiens
  SIMILAR (298)..(1164): 891254mologous to Homo sapiens putative p150,accession number U93572,Smith-Waterman Score=1336.
atgaaaagaaatgaacaaagcctccaggaaatatggaactatgtgaaaagaccaaacctacgtttgattggtgtatctgaaagtgagggggaaattggaaccaagttggaaaacactcctcaggatattatccaggagaacttccccaacctagcaagacaggtcaacattaaaattcaggaaatacagagaacaccacaaagatactcctcaagaatagcaaccccaagacacataatcatcagattcaccaaagttgaaatgaaggaaaaaatgttaagtgcagccagagagaaagaaatacaaactaccttcagagaatactataaacacctctatgaaaataaactagaaaatctagaagaaatggataaattcctggacacatacaccctcccaagactaaaccaggaagaagttgaatctctgaatagaccaatgacaagttctgaaattgaggcagtaattaatagcctgccaaccaaaaaaagcccaggaccagatggattcacagccgaattctaccagaggtacgaagaggagctggtaccattccttctgagactattccaaacaatagaaaaggagggaatcctccctaactcattttatgaggccagcatcatcctgataccaaaacctggcagagacacaacaaaaaatgaaaatttcaggccaatatccctgatgaacattgatgcgaaaaccctcaataaaataatggcaaaccgaatccagcagcacagcaaaaagcttatccaccacaatcaggttggctttatttctgggatgcaaggctggttcaatatatgcaaatcaataaacataatccatcacataaacagaaccaatgacaaaaaccacatgattatctcaatagatgcagaaaaggcctttgacaaaattcaacaccccttcatgctaaaagctctcaataaactaggtattgatggaacacatctcaaaataataagagctatttttgacaaacccacagccaatatcatactcaatgggcaaaagctggaagcattccttttgaaaaccgacacaagacaaggatgccctctctcaccactcctattcaacgtagtattggaagttctggccagggcaatcaggcaagaaaaagaaataacgggtattcagataggaaaagaggaagcaccacagaagcagcagaggcttttctgtaggtactaccatggcaagagggctccacagcttctcatcactcacttggaagaggatgatgagtgggacatcatcaggtattataatgtcatgtctgaggaggaaatcaaaaggatgaaggagattgtgaagcccaaaattatataa

SEQ ID NO: 4927 - DNA, 3312 bp, Homo sapiens
  SIMILAR (1183)..(1632): 941254mologous to Homo sapiens putative p150,accession number U93574,Smith-Waterman Score=721.
cctccgctggtgatacacaggcaaacagggtctggagaggacctccagcaaactccaacagacctgcagctgagggtcctgactattagaaggaaaactaacaaacagaaaggacatccacaccaaaaccccatctctagcagaagacatgaaataactaagatcagagcagaactgaaggagacagagacacaaaaaacccttcaaaaaaaatcaatgaatcccaggagctggtttttttgaaaggatcaacaaaattgatagactgctagcaagactaataaagaaaaagagagagaagaatcaaatagacggcaataaaaaacgataaattgggatatcacccaccggatccccacagaaatagaaactatcatccagagaatacttataaacacctctacacaaataaacttagaaaatcctagaagaaatggataaattccttgacacatacaccctccccaagactaaacccaggaagaagttgaatcccttcagtagactaataacaggctctgaaattgaggcaataactaatagcctaacaaaccaaaaaaagtccaggaccagatggattcgacgagccgaattctaccagaggtacaaagaggagctggtaccattccttctgaaactattccagtcaatagaaaaagagggaatcctccctaattcattttaatgaggccagcatcatcctgatatcaaagcctggcagagacacaacaaaaaaagagaattttagaccaatatccctgatgaacatcgatgcaaaaatcctcaataaaatactggcaaaccaaatccagcagcacatcaaaaagcttatccaccaccatcaagttggcttcatccctgggatgcaaggctggttcaacatactcaaatcaataaacgtaatccatcatataaacagaaccaaagacaaaaaccacatgattatctcaatagaagcagaaaaggcctttgacaaaattcaacagccctttatgctaaaaactctcaataaactaggtattgatgggacatatctgacatatctcaaaataataagagctgtttatgaaaaacccacagccaatatcatactgaatgggcaaaaactggaagcattccctttgaaaactggcacaagacaaggatgccctctctcaccactcctattcaacgtagtgttgggaagttctggtcggggcaatcaggcaagagaaagaaataaagggtattcaattaggaaaagaggatgtcaaattgtccctgtttgcagatgacatgattgtatatttagaaaaccccatcgtctcagcccaaaatctccttaagctgataagcaacttcagcgaagtctcaggatacaaaatcaatgtgcaaaaatcacaagcattcctatacaccaataacagacagacagagagccaaatcatgagtgaactcccattcacaattgcttcaaagagaataaaatacctaggaatacaacttacaagggatgtgaaggacctcttcaaggagaactacaaaccactgctcaatgaaataaaagaggacacaaacaaatggaagaacattccatgctcatggataggaagaatcaatattgtgaaaatggccatactgcccaagactctcaatcagaaattctcatactggttcagagtcaacaaacactacattcaccagaggacttttcccctcaaagagacagaattcaacaccatagcaacgctttataatggtgcttctccagcacagcaccaaaaagcactggaaccaatggccatcaagcatcaggattgccacggttctgaagaattgccttttgcagtgctcttgtcaagtctaaacgaaaactctatcagggttatttgcctggtcagacagataggagggaagagggagtttcttggtgtccaggtggtccttaagacaaagccagaactggcatttccagtggagggaggactacaaggtcaaaggtggataagcaattacctctatgaaggaaacgggcagggagatgaaaaggagaaaagcaacacggaggataggaaaagcctttccatggagatgatgttccagccaagacaggaaggggtagaacgagccagcgaggccaagggcaggatgggggtgggcaaggatactgagaaacagctcctggaggaggagtcggccagggcacaggcctggaggcggaaatgtgctgggtgcatggtcacagaatccaggatgttattttggctttctggagacaagggcccacagttcgtcaccatgggtccagcagaaggcccagctagatctaagaatcaacacaaaaagattgaaagctttaaacacctgagtttggataattctagccaggaagagaccccaggaccaggccagtgtcattaccacctccagcaactcccctcagctccccacaaggaggcgaaagcaacccaacacaaacgtgtgtgcccaagcatctcctctcagtccttgaccccttcatctttactctctaaagatattactacagcaccttgcaaattgaatttaacaaaggacctatgtttgatgaatgaacagccatacagaaatgtgattggacacaaaggatctggcctaacggtgaaggacggagtggggaaacccagcaaaaccacagaattttttactgagtacttcagttacaagaaaagctatccaaaaaaaccctacaaatgcatccaaagacagcttctgctcatccagagccaagaagaactagcaggcaatcatgtgcagaggcctttagctttagagtttggggcgcttttttctcctggaggtgccagctggggttttggggacttgaaaagttacctggggctacagaacacagtgtccacgcacttggacaagctgcctcttctgggtgaaaggcacatgtcccaccagacacccatgagccatccttggcccctctctggaaccttacccctcacatcccataaatccccaaggactgtgcatccacctgctgaacatcaccaaagtccacttccaattccactcccagtgactgcaaagggggcctttgcctcggtgccaccattactattccctgctccacaaggattatcgaatgagggcagaagatgtcatgggtatattttgataaatatttcaggcattacaaacaatactgaaatatatgccagtcttgtaaccatcacactgcaacattttctgctgccttctgaagactgtggaaaagcccccttgcaagggagggtggaaggaagagagggagtttctcagaaagagaagagaaaaacctaa

SEQ ID NO: 4928 - DNA, 237 bp, Homo sapiens
  SIMILAR (2)..(235): 711254mologous to Cloning vector pZC320 SopB,accession number U26464,Smith-Waterman Score=253.
tcaaccggttgaagatacttggttatcgacaccagctgccccgatggtggattcattaattgcgcgcgtaagagtaatggctcgcggtaatgccattactttgcctgtatgtggacgggatgtaaagttactcttgaagtgctccggggggatagtgttgagaagacctctcgggtatgggtcaggtattgaaacgtaccaggagcttgttactgaggacgccctggatgatctcat

SEQ ID NO: 4929 - DNA, 1755 bp, Homo sapiens
  SIMILAR (1)..(888): 981254mologous to Cloning vector pZC320 SopA,accession number U26464,Smith-Waterman Score=1526.
atgaaactcatggaaacacttaaccagtgcataaacgctggtcatgaaatgacgaaggctatcgccattgcacagtttaatgatgacagcccggaagcgaggaaaataacccggcgctggagaataggtgaagcagcggatttagttggggtttcttctcaggctatcagagatgccgagaaagcagggcgactaccgcacccggatatggaaattcgaggacgggttgagcaacgtgttggttatacaattgaacaaattaatcatatgcgtgatgtgtttggtacgcgattgcgacgtgctgaagacgtatttccaccggtgatcggggttgctgcccataaaggtggcgtttacaaaacctcagtttctgttcatcttgctcaggatctggctctgaaggggctacgtgttttgctcgtggaaggtaacgacccccagggaacagcctcaatgtatcacggatgggtaccagatcttcatattcatgcagaagacactctcctgcctttctatcttggggaaaaggacgatgtcacttatgcaataaagcccacttgctggccggggcttgacattattccttcctgtctggctctgcaccgtattgaaactgagttaatgggcaaatttgatgaaggtaaactgcccaccgatccacacctgatgctccgactggccattgaaactgttgctcatgactatgatgtcatagttattgacagcgcgcctaacctgggtatcggcacgattaatgtcgtatgtgctgctgatgtgctgattgttcccacgcctgctgagttgtttgactacacctccgcactgcagtttttcgatatgcttcgtgatctgctcaagaacgttgatcttaaaggtagccaatttgatcaagtggaagaaagggtatcagtgattgaagatcaaatgagtgagatgaagcgaaaagagaactttagagaaaaaagagtaaaaagaaatgaacaaagcctccaagaattatggcactatgtgagaagaccaaatctacgtcggattggtgtgcctgagagtgacggggagaatggaaccaagttggaaaacactcttcaggatattgtccaggagaacctccccaacctacctggcagagacacaacaaaaaaagagaattttagaccaatatccctgatgaacattgatgcaaaaatcctcaataaaatactggcaaaccaaatccagcagcacatcaaaacgtttatccaccgcgatcaagttggcttcatccctgggatgcaaggctggttcaacatacacaaatcagtaaacgtaatccatcatataaacagaaccaaagacaaaaaccacatgattatctcaatagatgcagaaaaggccttcgacaaaattcaacaacacttcatgctaaaaactctcaataaactaggtattgatggaatgtatctcaaaatagtaagagctatttatgacaaacttacagccaatatcatactgaatgggcaaaaactggacgcattccctttgaaaactggcacaagacagggatgccctctctcaccactcctattcaacacagtgttggaagttctggccagggcaatcaggcaggagaaagaaataaagggtattcaattaggaaaagaggaagtcaaattgtccctctttgcagatgacatgactgtatatttagaaaatcccatcgtctcagcccaaaatctccttaagctgataagcaacttcagcaaagtctcaggataa

SEQ ID NO: 4930 - DNA, 1449 bp, Homo sapiens
  SIMILAR (1030)..(1296): 961254mologous to Cloning vector pZC320 SopA,accession number U26464,Smith-Waterman Score=440.
  misc_feature (1)...(1449): n = a,t,c or g
atgaaactcatggaaacacttaaccagtgcataaacgctggtcatgaaatgacgaaggctatcgccattgcacagtttaatgatgacagcccggaagcgaggaaaataacccggcgctggagaataggtgaagcagcggatttagttggggtttcttctcaggctatcagagatgccgagaaagcagggcgactaccgcacccggatatggaaattcgaggacggcgacgtgctgaagacgtatttccaccggtgatcggggttgctgcccataaaggtggcgtttacaaaacctcagtttctgttcatcttgctcaggatctggctctgaaggggctacgtgttttgctcgtggaagaagacagatggatcttgagaatgacagtggactattgtaagcttaaccaagtggtgattccaattgcagctgctgtatcagatgtggtttcattgcttgagcaaattaacacatctcctggtacctggtatgcagccattgacttggcaaatgcctttttctccattcctgtccataaggcccagcagaagcaatttgccttcagctggcaaggccagcaatatacctttactgtcctacctcagtggtatatcaactctccagctttgtgtcataatcttattcggagagaccttgattgcttttcgcttccactagatatcacactggtccattacattgatgacattatgctgattggatccanagctccggtgccttctctggtgtctttttctgcggggctcacccagaagcctttccccagtgatgggggcgttgtcctctttaacaaagtgctggtgaacgacggggatgtttacaaccccagcaccggtgagtgtttgaacggaactggtactgtgtcctcctcctaccccaacgcagcgtcccgtgggctcagggaggacgccaccctggagcagatgcccgagtgggcctgcactcctctgcccgactctgtgggctttcacgtagaacgtgtcccagctcgagggctgcaggctgcatgggctatcagagatgccgagaaagcagggcgactaccgcacccggatatggaaattcgaggacgggttgagcaacgtgttggttatacaattgaacaaattaatcatatgcgtgatgtgtttggtacgcgattgcgacgtgctgaagacgtatttccaccggtgatcggggttgctgcccataaaggtggcgtttacaaaacctcagtttctgttcatatagatcaggatctggctctccaggggctacgtgttttgctagtggaaggggagaccaactgtttcttcgaaaaagcccctttatctaagctcaccccgggcccatttagcaccacaagcgacagtttctttgaattttctgatgagtccagcatttctcatgcttcagtccgtgatggtatggggttatttcccaggaactag

SEQ ID NO: 4931 - DNA, 1704 bp, Homo sapiens
  SIMILAR (721)..(1485): 791254mologous to Cloning vector pBACe3.6 levansucrase,accession number U80929,Smith-Waterman Score=1019.
atgaaactcatggaaacacttaaccagtgcataaacgctggtcatgaaatgacgaaggctatcgccattgcacagtttaatgatgacagcccggaagcgaggaaaataacccggcgctggagaataggtgaagcagcggatttagttggggtttcttctcaggctatcagagatgccgagaaagcagggcgactaccgcacccggatatggaaattcgaggacgggttgagcaacgtgttggttatacaattgaacaaattaatcatatgcgtgatgtgtttggtacgcgattgcgacgtgctgaagacgtatttccaccggtgatcggggttgctgcccataaaggtggcgtttacaaaacctcagtttctgttcatcttgctcaggatctggctctgaaggggctacgtgttttgctcgtggaagccctgtggctgcaggagcgccaggcccagtttcggcactcgctgcccctgcagagcttcctgctgaaacctgtccagcgcattctcaagtcccatttgctgctgcagaccaagacttgggccaccacttgtccaataaagtacatcccagacgccacacctgctgtgtcccgagagtctccagatgggggcatcagggctttgcagaactttcagcggtataccggcatacagcatgtgcatcgcataggaatggcggaacgtatgtggtgtgaccggaacagagaacgtcacaccgtcagcagcagcggcggcaaccgcctccccaatccagaccgttcagctggatattacggcctttttaaagaccgtaaaggggggtatcctctagagaaggacgtggggttcatgccccaagatgtggttcggcacctttcatctgacgaaaaatccgtttattctacactgactattccgaacgttcagcagtttatcgatgaaggcaattatacatccggcgacaaccatacgctgagagaccctcactacgttgaagacaaaggccataaataccttgtattcgaagccaacacgggaacagaaaacggataccaaggcgaagaatctttatttaacaaagcgtactacggcggcggcacgaacttcttccgtaaagaaagccagaagcttcagcagagcgctaaaaaacgcgatgctgagttagcgaacggcgccctcggtatcatagagttaaataatgattacacattgaaaaaagtaatgaagccgctgatcacttcaaacacggtaactgatgaaatcgagcgcgcgaatgttttcaaaatgaacggcacatggtacttgttcactgattcacgcggttcaaaaatgacgatcgatggtattaactcaaacgatatttacatgcttggttatgtatcaaactctttaaccggcccttacaagccgctgaacaaaacagggcttgtgcttcaaatgggtcttcccccaaacgatgtgacattcacttactctcacttcgcagtgccgcaagccgaggtaatggtaagtggccaacactgctacagctttgcccatcgactcctgccagggtctgtgaagatggtgcaagtgtggagaggtatccccctgacctcaatcgagctcctggaggacttggagaacagcagcagcgccgggggtattgccgagtgcttcgtgcagaggagcgaggattttgacatctacacattgtactgcatgaactacccgaggtga

SEQ ID NO: 4932 - DNA, 2232 bp, Homo sapiens
  SIMILAR (1)..(639): 991254mologous to Cloning vector pZC320 SopA,accession number U26464,Smith-Waterman Score=1117.
  misc_feature (1)...(2232): n = a,t,c or g
atgaaactcatggaaacacttaaccagtgcataaacgctggtcatgaaatgacgaaggctatcgccattgcacagtttaatgatgacagcccggaagcgaggaaaataacccggcgctggagaataggtgaagcagcggatttagttggggtttcttctcaggctatcagagatgccgagaaagcagggcgactaccgcacccggatatggaaattcgaggacgggttgagcaacgtgttggttatacaattgaacaaattaatcatatgcgtgatgtgtttggtacgcgattgcgacgtgctgaagacgtatttccaccggtgatcggggttgctgcccataaaggtggcgtttacaaaacctcagtttctgttcatcttgctcaggatctggctctgaaggggctacgtgttttgctcgtggaaggtaacgacccccagggaacagcctcaatgtatcacggatgggtaccagatcttcatattcatgcagaagacactctcctgcctttctatcttggggaaaaggacgatgtcacttatgcaataaagcccacttgctggccggggcttgacattattccttcctgtctggctctgcaccgtattgaaactgagtttatgggcaaatttgatgaagataacaacgcaggaatggtccgggttctgcaaccctttacatctgacgagaaaaaatccgttatttctacactgacctttcccggtaaacatttacggcgagacaaaagcctgacaacagcgcagggctgtgacaaaattaacaataaaactagcccagaaccaaccagcccggatctggctctgaaggggctacgtgttttgctcgtggaaggtaacgacccccagggaacagcctcaatgtatcacggatgggtaccagatcttcatattcatgcagaagacactctcctgcctttctatcttggggaaaaggacgatgtcacttatgcaataaagcccacttgctggccggggcttgacattattccttcctgtctggctctgcaccgtattgaaactgagttaatgggcaaatttgatgaaggtaaactgcccaccgatccacacctgatgctccgactggccattgaaactgttgctcatgactatgatgtcatagttattgacagcgcgcctaacctgggtatcggcacgattaatgtcgtatgtgctgctgatgtgctgattgttcccacgcctgctgagttgtttgactacacctccgcactgcaatttttcgatatgcttcgtgatctgctcaagaacgttgatcttaaagggttcgagcctgatgtacgtattttgcttaccaaatacagcaatagtaatggctctcagtccccgtggatggaggagcaaattcgggatgcctggggaagcatggttctaaaaaatgttgaacctgaaaacggtgaagttggtaaagnaggatccccgcagttgataaatcaagaaaaaaaaatgtttagaatcaggaacagatcatatattgaccgagattctgagtatctcttgcaagaaaatgaaccagatggaactttagaccaaaaattattggaagatttacaaaagaaaaaaaatgaccttcggtatattgaaatgcagccttttcccttagtctcctcttcccggtgggtggtaaaaagaggtgaattgacagcctatgttgaagacactgtgcttttctcaagaaggacatccaaacagcaagtctacttctttctctttaacgatgtgctcattatcaccaaaaagaagaggaggagcgactcaagccttcgcgaaggagataaccaaaaagcatacaaagaaacgtacggcgtctctcatattacacgccatgatatgctgcagatccctaaacagcagcaaaacgaaaaataccaagtgcctcaattcgatcaatcaacgattaaaaatattgagtctgcaaaaggacttgatgtatcagacgcaggaatggtcccggttctgcaacctttacatctgacggaaaaatccggttattctacactgactattccggtaaacttacggcaaacaagcctgacacagcgcaaggtaatgtgtcaaaatctggtgacacacttaaaatcaacggagtgggaaaaacacaaaacgattgttgacggagaacggaaaacatatcagaaacgttcagcagtttttcggatgaagggaattttacattcggcgacaaccatacgctga

SEQ ID NO: 4933 - DNA, 1545 bp, Homo sapiens
  SIMILAR (344)..(385): 921254mologous to Cloning vector pZC320 SopA,accession number U26464,Smith-Waterman Score=60.
atgaaactcatggaaacacttaaccagtgcataaacgctggtcatgaaatgacgaaggctatcgccattgcacagtttaatgatgacagcccggaagcgaggaaaataacccggcgctggagaataggtgaagcagcggatttagttggggtttcttctcaggctatcagagatgccgagaaagcagggcgactaccgcacccggatatggaaattcgaggacgggttgagcaacgtgttggttatacaattgaacaaattaatcatatgcgtgatgtgtttggtacgcgattgcgacgtgctgaagacgtatttccaccggtgatcggggttgctgcccataaaggatctggctctgaaggggctacgtgttttgctcgtggaagtcaggcaccgtgtatgaaatctaacaatgcgctcatcgtcatcctcggcaccgtcaccctggatgctgtaggcataggcttggttatgccggtactgccgggcctcttgcgggatatcgtccattccgacagcatcgccagtcactatggcgtgctgctagcgctatatgcgttgatgcaatttctatgcgcacccgttctcggagcactgtccgaccgctttggccgccgcccagtcctgctcgcttcgctacttggagccactatcgactacgcgatcatggcgaccacacccgtcctgtggatctacccactagggaaagataaagccgacctacagatttcggacctcctggcccacgccttcttccgcgaggagcgcggtgtgcacgtggaactagcggaggaggacgacggcgagaagccgggcctcaagctctggctgcgcatggaggacgcgcggcgcggggggcgcccacgggacaaccaggccatcgagttcctgttccagctgggccgggacgcggccgaggaggtggcacaggagatgaaccagggcctccccctgcggcgacaccactcagatctctactcgcactactttgggggtcttgcggaaacggtgctggtcgtcagatctatgtccaccttgctcaactatgactatgtgtgggatacggtcttccaccccagtggggccatagaaatactattctatgccacgggctacatcagctcggcattcctctttggtgctactgggaagtacgggaaccaagtgttagagcacaccctgggcacggtccacacccacagcgcccacttcaaggtggatctggatgtagcaggtgatgctcttcaaaaagcctttacagataaagaggaattacttaagcagcaggcatctaaccttcatgagcagaaaaaagctggggtgatatttgaagctgaagaagttatcactcttttaacttctgtgcttaaaacgtcatctgcatcaagaactagtttaagctcacgacatcagtttgctcctggagcgacagtattgtataagggcgataaaatggtgcttaacctggacaggtctcgtgttccaactgagtgtatagagaaaattgaggccattcttaaggaacttgaaaagccagcaccctga

SEQ ID NO: 4934 - DNA, 1377 bp, Homo sapiens
  SIMILAR (1)..(876): 951254mologous to Cloning vector pZC320 SopA,accession number U26464,Smith-Waterman Score=1470.
atgaaactcatggaaacacttaaccagtgcataaacgctggtcatgaaatgacgaaggctatcgccattgcacagtttaatgatgacagcccggaagcgaggaaaataacccggcgctggagaataggtgaagcagcggatttagttggggtttcttctcaggctatcagagatgccgagaaagcagggcgactaccgttcccggatatggaaattcgaggacgggttgagcaacgtgttggttatacaattgaacaaattaatcatatgcgtgatgtgtttggtacgcgattgcgacgtgctgaagacgtatttccaccggtgatcggggttgctgcccataaagtttctgttcatcttgctcaggatctggctctgaatgggctacgtgttttgctcgtggaaggtaacgacccccagggaacagcctcaatgtatcacggatgggtaccagatcttcatattcatgcagaagacactctcctgcctttctatcttggggaaaaggacgatgtcacttatgcaataaagcccacttgctggccggggcttgacattattccttcctgtctggctctgcaccgtattgaaactgagttaatgggcaaatttgatgaaggtaaactgcccaccgatccacacctgatgctccgactggccattgaaactgttgctcatgactatgatgtcatagttattgacagcgcgcctaacctgggtatcggcacgattaatgtcgtatgtgctgctgatgtgctgattgttcccacgcctgctgagttgtttgactacacctccgcactgcagtttttcgatatgcttcgtgatctgctcaagaacgttgatcttaaaggctggcagcctgataggcagattccatttcatgatgtcagattcccacctcctgtaggttataataaagatataaatgaaagtgatgaagttgagatgtgtccggagttttttccttctggtgggttcgttgtctcactgacttcaggagtgaagccgcagaccctcgcagtgagtgttacagctcttaaaggcagcgcgtccggagttgttcatttctcccggtgggtttgtggtctcgctggcttcaggagtaaagctgcagaccttcagagaagctcagccagcctcacctctcactggcattcaccacgggactttgaggcacctagcctgagggagctcatccagacagcagcccagcagccgagagggctccagagggctccagcagcccagagggagctcatcccagacaatcaagaggaaaagaggggaagtgagaaagagacggagacctgctatcgtggccaacggtcccacgaggagggaacagtggtccacatgcaggatccagctctctga

SEQ ID NO: 4935 - DNA, 2262 bp, Homo sapiens
  SIMILAR (1)..(405): 1001254mologous to Cloning vector pZC320 SopA,accession number U26464,Smith-Waterman Score=691.
atgaaactcatggaaacacttaaccagtgcataaacgctggtcatgaaatgacgaaggctatcgccattgcacagtttaatgatgacagcccggaagcgaggaaaataacccggcgctggagaataggtgaagcagcggatttagttggggtttcttctcaggctatcagagatgccgagaaagcagggcgactaccgcacccggatatggaaattcgaggacgggttgagcaacgtgttggttatacaattgaacaaattaatcatatgcgtgatgtgtttggtacgcgattgcgacgtgctgaagacgtatttccaccggtgatcggggttgctgcccataaaggtggcgtttacaaaacctcagtttctgttcatcttgctcaggatctggctctgaagggctacgtgttttgctcgtggaagtgcataaacgctggtcatgaaatgacgaaggctatcgccattgcacagtttaatgatgacagcccggaagcgaggaaaataacccggcgctggagaataggtgaagcagcggatttagttggggtttcttctcaggctatcagagatgccgagaaagcagggcgactaccgcacccggatatggaaattcgaggacgggttgagcaacgtgttggttatacaattgaacaaattaatcatatgcgtgatgtgtttggtacgcgattgcgacgtgctgaagacgtatttccaccggtgatcggggttgctgcccataaaggtggcgtttacaaaacctcagtttctgttcatcttgctcaggatctggctctgaaggggctacgtgttttgctcgtggaagaaccccccagcgcgcctaacctgggtatcggcacgattaatgtcgtatgtgctgctgatgtgctgattgttcccacgcctgctgagttgtttgactacacctccgcactgcagtttttcgatatgcttcgtgatctgctcaagaacgttgatcttaaagggttcgagcctgatgtacgtattttgcttaccaaatacagcaatagtaatggctctcagtccccgtggatggaggagcaaattcgggatgcctggggaagcatggttctaaaaaatgttgtacgtgaaacggatgaagttggtaaagctgccccgatggtggattcgttaattgcgcgcgtaggagtaatggctcgcggtaatgccattactttgcctgtatgtggtcgggatgtgaagtttactcttgaagtgctccggggtgatagtgttgagaagacctctcggtgtgacaatctaaaaacttgtcacacttcacatggatctgtcatggcggaaacagcggttatcaatcacaagaaacgtaaaaatagcccgcgaatcgtccagtcaaacgacctcactgaggcggcatatagtctctcccgggatcaaaaacgtatgctgtatctgttcgttgaccagatcagaaaatctgatggcaccctacaggaacatgacggtatctgcgagatccatgttgctaaatatgctgaaatattcggattgacctctgcggaagccagtaaggatatacggcaggcattgaagagtttcgcggggaaggaagtggttttttatcgccctgaagaggatgccggcgatgaaaaaggctatgaatcttttccttggtttatcaaacgtgcgcacagtccatccagagggctttacagtgtacatatcaacccatatctcattcccttctttatcgggttacagaaccggtttacgcagtttcggcttagtgaaacaaaagaaatcaccaatccgtatgccatgcgtttatacgaatccctgtgtcagtatcacccccttaccattgaaaaagtaatgaagccgctgatcacttcaaacacggtaactgatgaaatcgagcgcgcgaatgttttcaaaatgaacggcaaatggtacttgttcactgattcacgcggttcaaaaatgacgatcgatggtattaactcaaacgatatttacatgcttggttatgtatcaaactctttaaccggcccttacaagccgctgaacaaaacagggcttgtgctgcaaatgggtcttgatccaaacgatgtgacattcacttactctcacttcgcagtgccgcaagccaaaggcaacaatgtggttatcacaagctacatgacaaacagaggcttcttcgaggataaaaaggcaacatttgcgccaagcttcttaatgaacatcaaaggcaataaaacatccgataaactaccgcattaa

SEQ ID NO: 4936 - DNA, 1753 bp, Homo sapiens
  SIMILAR (1)..(888): 1001254mologous to Cloning vector pZC320 SopA,accession number U26464,Smith-Waterman Score=1548.
atgaaactcatggaaacacttaaccagtgcataaacgctggtcatgaaatgacgaaggctatcgccattgcacagtttaatgatgacagcccggaagcgaggaaaataacccggcgctggagaataggtgaagcagcggatttagttggggtttcttctcaggctatcagagatgccgagaaagcagggcgactaccgcacccggatatggaaattcgaggacgggttgagcaacgtgttggttatacaattgaacaaattaatcatatgcgtgatgtgtttggtacgcgattgcgacgtgctgaagacgtatttccaccggtgatcggggttgctgcccataaaggtggcgtttacaaaacctcagtttctgttcatcttgctcaggatctggctctgaaggggctacgtgttttgctcgtggaaggtaacgacccccagggaacagcctcaatgtatcacggatgggtaccagatcttcatattcatgcagaagacactctcctgcctttctatcttggggaaaaggacgatgtcacttatgcaataaagcccacttgctggccggggcttgacattattccttcctgtctggctctgcaccgtattgaaactgagttaatgggcaaatttgatgaaggtaaactgcccaccgatccacacctgatgctccgactggccattgaaactgttgctcatgactatgatgtcatagttattgacagcgcgcctaacctgggtatcggcacgattaatgtcgtatgtgctgctgatgtgctgattgttcccacgcctgctgagttgtttgactacacctccgcactgcagtttttcgatatgcttcgtgatctgctcaagaacgttgatcttaaagggttcgagcctgatggtatcggcacgattaatgtcgtatgtgctgctgatgtgctgattgttcccacgcctgctgagttgtttgactacacctccgcactgcagtttttcgatatgcttcgtgatctgctcaagaacgttgatcttaaagggttcgagcctgatgtacgcgcattgttttcggcgggcagcggcttaggtgatccgatcgaggcgcaggcgctgatcgccacctacggccgtgatcgtgatcctggccggccgttgtggttggggtcggtcaagtcgaacatcggtcatacgcaagcggcggcgggtgtggctggtgtgatcaagatggtgatggcgatgcggcacgggcagctgccacgcacgttgcacgtggaatcgccgtcgccggaggtggattggtcggcggggacggttcaactccttacggagaacacgccctggcccaggagtggtcgtgttcgtcgggtgggggtgtcgtcgttcgggatcagtggtactaacgcgcacgtcatcctcgaacagcccccgggagtgccgagtcagtctgcggggccgggttcgggttctgtcgtggatgttccggtggtgccgtggatggtgtcgggcaaaacacccgaagcgctatccgcgcaggcaacggcgttgatgacctatctggacgagcgacctgatgtctcctcgctggatgttgggtactcgctggcgttgacacggtcggcgctggatgagcgagcggtggtgctggggtcggacgtgaaacttgttgtgcggtgtgaagcgctgtctgccggtcatgaggcttctgggttggtgaccggatctgtgggggctcggggccgcatcgggtttgtgttttccggtcaaggtg

SEQ ID NO: 4937 - DNA, 2370 bp, Homo sapiens
  SIMILAR (952)..(2367): 1001254mologous to Cloning vector pBACe3.6 levansucrase,accession number U80929,Smith-Waterman Score=2482.
atgaaactcatggaaacacttaaccagtgcataaacgctggtcatgaaatgacgaaggctatcgccattgcacagtttaatgatgacagcccggaagcgaggaaaataacccggcgctggagaataggtgaagcagcggatttagttggggtttcttctcaggctatcagagatgccgagaaagcagggcgactaccgcacccggatatggaaattcgaggacgggttgagcaacgtgttggttatacaattgaacaaattaatcatatgcgtgatgtgtttggtacgcgattgcgacgtgctgaagacgtatttccaccggtgatcggggttgctgcccataaaggtggcgtttacaaaacctcagtttctgttcatcttgctcaggatctggctctgaaggggctacgtgttttgctcgtggaaggtaacgacccccagggaacagcctcaatgtatcacggatgggtaccagatcttcatattcatgcagaagacactctcctgcctttctatcttggggaaaaggacgatgtcacttatgcaataaagcccacttgctggccggggcttgacattattccttcctgtctggctctgcaccgtattgaaactgagttaatgggcaaatttgatgaaggtaaactgcccaccgatccacacctgatgctccgactggccattgaaactgttgctcatgactatgatgtcatagttattgacagcgcgcctaacctgggtatcggcacgattaatgtcgtatgtgctgctgatgtgctgattgttcccacgcctgctgagttgtttgactacacctccgcactgcagtttttcgatatgcttcgtgatctgctcaagaacgttgatcttaaagggttcgagcctgattcaattcgggaggatcgaaacggcagatcgcaaaaaacagtacatacagaaggagacatgaacatgaacatcaaaaaaattgtaaaacaagccacagttctgacttttacgactgcacttctggcaggaggagcgactcaagccttcgcgaaagaaaataaccaaaaagcatacaaagaaacgtacggcgtctctcatattacacgccatgatatgctgcagatccctaaacagcagcaaaacgaaaaataccaagtgcctcaattcgatcaatcaacgattaaaaatattgagtctgcaaaaggacttgatgtgtgggacagctggccgctgcaaaacgctgacggaacagtagctgaatacaacggctatcacgttgtgtttgctcttgcgggaagcccgaaagacgctgatgacacatcaatctacatgttttatcaaaaggtcggcgacaactcaatcgacagctggaaaaacgcgggccgtgtctttaaagacagcgataagttcgacgccaacgatccgatcctgaaagatcagacgcaagaatggtccggttctgcaacctttacatctgacggaaaaatccgtttattctacactgactattccggtaaacattacggcaaacaaagcctgacaacagcgcaggtaaatgtgtcaaaatctgatgacacactcaaaatcaacggagtggaagatcacaaaacgatttttgacggagacggaaaaacatatcagaacgttcagcagtttatcgatgaaggcaattatacatccggcgacaaccatacgctgagagaccctcactacgttgaagacaaaggccataaataccttgtattcgaagccaacacgggaacagaaaacggataccaaggcgaagaatctttatttaacaaagcgtactacggcggcggcacgaacttcttccgtaaagaaagccagaagcttcagcagagcgctaaaaaacgcgatgctgagttagcgaacggcgccctcggtatcatagagttaaataatgattacacattgaaaaaagtaatgaagccgctgatcacttcaaacacggtaactgatgaaatcgagcgcgcgaatgttttcaaaatgaacggcaaatggtacttgttcactgattcacgcggttcaaaaatgacgatcgatggtattaactcaaacgatatttacatgcttggttatgtatcaaactctttaaccggcccttacaagccgctgaacaaaacagggcttgtgctgcaaatgggtcttgatccaaacgatgtgacattcacttactctcacttcgcagtgccgcaagccaaaggcaacaatgtggttatcacaagctacatgacaaacagaggcttcttcgaggataaaaaggcaacatttgcgccaagcttcttaatgaacatcaaaggcaataaaacatccgttgtcaaaaacagcatcctggagcaaggacagctgacagtcaactaa

SEQ ID NO: 4938 - DNA, 1218 bp, Homo sapiens
  SIMILAR (1157)..(1216): 601254mologous to unidentified cloning vector 29kD protein essential for the replication of mini F plasmid,accession number AB015619,Smith-Waterman Score=52.
atgaaactcatggaaacacttaaccagtgcataaacgctggtcatgaaatgacgaaggctatcgccattgcacagtttaatgatgacagcccggaagcgaggaaaataacccggcgctggagaataggtgaagcagcggatttagttggggtttcttctcaggctatcagagatgccgagaaagcagggcgactaccgcacccggatatggaaattcgaggacgggttgagcaacgtgttggttatacaattgaacaaattaatcatatgcgtgatgtgtttggtacgcgattgcgacgtgctgaagacgtatttccaccggtgatcggggttgctgcccataaagaaaggaaccagaatataagtagatacatttcaaacagattggctaggagagaatgccatgattcaccagaagaggggacaggaaacacgagaagtaaggagaggcttcaaggcagattgcccagccgaggactgactgagagccaggaacacctcctggacacaagaaaacagttctggtttgaagattttaaagatgggctgggccccatcctcaagtgtgacaatctaaaaacttgtcacacttcacatggatctgtcatggcggaaacagcggttatcaatcacaagaaacgtaaaaatagcccgcgaatcgtccagtcaaacgacctcactgaggcggcatatagtctctcccgggatcaaaaacgtatgctgtatctgttcgttgaccagatcagaaaatctgatggcaccctacaggaacatgacggtatctgcgagatccatgttgctaaatatgctgaaatattcggattgacctctgcggaagccagtaaggatatacggcaggcattgaagagtttcgcggggaaggaagtggttttttatcgccctgaagaggatgccggcgatgaaaaaggctatgaatcttttccttggtttatcaaacgtgcgcacagtccatccagagggctttacagtgtacatatcaacccatatctcattcccttctttatcgggttacagaaccggtttacgcagtttcggcttagtgaaacaaaagaaatcaccaatccgtatgccatgcgtttatacgaatccctgtctgcctcaaattaccagcgtatgcctgacttccgccggcgctttctgcaagtctggtgttatggagatcaacaagcagacttcaatgcgcctctcatacattga

SEQ ID NO: 4939 - DNA, 1212 bp, Homo sapiens
  SIMILAR (1)..(885): 991254mologous to Cloning vector pZC320 SopA,accession number U26464,Smith-Waterman Score=1527.
atgaaactcatggaaacacttaaccagtgcataaacgctggtcatgaaatgacgaaggctatcgccattgcacagtttaatgatgacagcccggaagcgaggaaaataacccggcgctggagaataggtgaagcagcggatttagttggggtttcttctcaggctatcagagatgccgagaaagcagggcgactaccgcacccggatatggaaattcgaggacgggttgagcaacgtgttggttatacaattgaacaaattaatcatatgcgtgatgtgtttggtacgcgattgcgacgtgctgaagacgtatttccaccggtgatcggggttgctgcccataaaggtggcgtttacaaaacctcagtttctgttcatcttgctcaggatctggctctgaaggggctacgtgttttgctcgtggaaggtaacgacccccagggaacagcctcaatgtatcacggatgggtaccagatcttcatattcatgcagaagacactctcctgcctttctatcttggggaaaaggacgatgtcacttatgcaataaagcccacttgctggccggggcttgacattattccttcctgtctggctctgcaccgtattgaaactgagttaatgggcaaatttgatgaaggtaaactgcccaccgatccacacctgatgctccgactggccattgaaactgttgctcatgactatgatgtcatagttattgacagcgcgcctaacctgggtatcggcacgattaatgtcgtatgtgctgctgatgtgctgattgttcccacgcctgctgagttgtttgactacacctccgcactgcagtttttcgatatgcttcgtgatctgctcaagaacgttgatcttaaaggtcaggcaccgtgtatgaaatctaacaatgcgctcatcgtcatcctcggcaccgtcaccctggatgctgtaggcataggcttggttatgccggtactgccgggcctcttgcgggatatcgtccattccgacagcatcgccagtcactatggcgtgctgctagcgctatatgcgttgatgcaatttctatgcgcacccgttctcggagcactgtccgaccgctttggccgccgcccagtcctgctcgcttcgctacttggagccactatcgactacgcgatcatggcgaccacacccgtcctgtggatctacccactagtcaattcaccatcttgttga

SEQ ID NO: 4940 - DNA, 1572 bp, Homo sapiens
  SIMILAR (676)..(1572): 1001254mologous to Plasmid F Protein A,accession number M12987,Smith-Waterman Score=1564.
tgtgacaatctaaaaacttgtcacacttcacatggatctgtcatggcggaaacagcggttatcaatcacaagaaacgtaaaaatagcccgcgaatcgtccagtcaaacgacctcactgaggcggcatatagtctctcccgggatcaaaaacgtatgctgtatctgttcgttgaccagatcagaaaatctgatggcaccctacaggaacatgacggtatctgcgagatccatgttgctaaatatgctgaaatattcggattgacctctgcggaagccagtaaggatatacggcaggcattgaagagtttcgcggggaaggaagtggttttttatcgccctgaagaggatgccggcgatgaaaaaggctatgaatcttttccttggtttatcaaacgtgcgcacagtccatccagagggctttacagtgtacatatcaacccatatctcattcccttctttatcgggttacagaaccggtttacgcagtttcggcttagtgaaacaaaagaaatcaccaatccgtatgccatgcgtttatacgaatccctgtgtcagtatcgaaagccggatggcttaagcatcgtctctctggaaaatcgactggatcatagagcggtaccagctgcctcaaagttaccagcgtatgccctgacttccgccgccgcttcctgcaggatgttcagaatgaaactcatggaaacacttaaccagtgcataaacgctggtcatgaaatgacgaaggctatcgccattgcacagtttaatgatgacagcccggaagcgaggaaaataacccggcgctggagaataggtgaagcagcggatttagttggggtttcttctcaggctatcagagatgccgagaaagcagggcgactaccgcacccggatatggaaattcgaggacgggttgagcaacgtgttggttatacaattgaacaaattaatcatatgcgtgatgtgtttggtacgcgattgcgacgtgctgaagacgtatttccaccggtgatcggggttgctgcccataaaggtggcgtttacaaaacctcagtttctgttcatcttgctcaggatctggctctgaaggggctacgtgttttgctcgtggaaggtaacgacccccagggaacagcctcaatgtatcacggatgggtaccagatcttcatattcatgcagaagacactctcctgcctttctatcttggggaaaaggacgatgtcacttatgcaataaagcccacttgctggccggggcttgacattattccttcctgtctggctctgcaccgtattgaaactgagttaatgggcaaatttgatgaaggtaaactgcccaccgatccacacctgatgctccgactggccattgaaactgttgctcatgactatgatgtcatagttattgacagcgcgcctaacctgggtatcggcacgattaatgtcgtatgtgctgctgatgtgctgattgttcccacgcctgctgagttgtttgactacacctccgcactgcagtttttcgatatgcttcgtgatctgctcaagaacgttgatcttaaagggttcgagcctgat

SEQ ID NO: 4941 - DNA, 1620 bp, Homo sapiens
  SIMILAR (1)..(948): 941254mologous to Cloning vector pZC320 SopA,accession number U26464,Smith-Waterman Score=1566.
atgaaactcatggaaacacttaaccagtgcataaacgctggtcatgaaatgacgaaggctatcgccattgcacagtttaatgatgacagcccggaagcgaggaaaataacccggcgctggagaataggtgaagcagcggatttagttggggtttcttctcaggctatcagagatgccgagaaagcagggcgactaccgcacccggatatggaaattcgaggacgggttgagcaacgtgttggttatacaattgaacaaattaatcatatgcgtgatgtgtttggtacgcgattgcgacgtgctgaagacgtatttccaccggtgatcggggttgctgcccataaaggtggcgtttacaaaacctcagtttctgttcatcttgctcaggatctggctctgaaggggctacgtgttttgctcgtggaaggtaacgacccccagggaacagcctcaatgtatcacggatgggtaccagatcttcatattcatgcagaagacactctcctgcctttctatcttggggaaaaggacgatgtcacttatgcaataaagcccacttgctggccggggcttgacattattccttcctgtctggctctgcaccgtattgaaactgagttaatgggcaaatttgatgaaggtaaactgcccaccgatccacacctgatgctccgactggccattgaaactgttgctcatgactatgatgtcatagttattgacagcgcgcctaacctgggtatcggcacgattaatgtcgtatgtgctgctgatgtgctgattgttcccacgcctgctgagttgtttgactacacctccgcactgcagtttttcgatatgcttcgtgatctgctcaagaacgttgatcttaaagggttcgagcctgatgcgcaggcgctgatcgccacctacggccgtgatcgtgatcctggccggccgttgtggttggggtcggtcaagtcgaacatcggtcatacgcaagcggcggcgggtgtggctggtgtgatcaagatggtgatggcgatgcggcacgggcagctgccacgcacgttgcacgtggaatcgccgtcgccggaggtggattggtcggcggggacggttcaactccttacggagaacacgccctggcccaggagtggtcgtgttcgtcgggtgggggtgtcgtcgttcgggatcagtggtactaacgcgcacgtcatcctcgaacagcccccgggagtgccgagtcagtctgcggggccgggttcgggttctgtcgtggatgttccggtggtgccgtggatggtgtcgggcaaaacacccgaagcgctatccgcgcaggcaacggcgttgatgacctatctggacgagcgacctgatgtctcctcgctggatgttgggtactcgctggcgttgacacggtcggcgctggatgagcgagcggtggttcttgggtcggacgtgaacgttgttgtgcggtgtgacacgctgtctgccggtcatgaggcttctgcagttggtgaccggatctgtgggggctgggggcccatcgggtttgtgttttccggtcacggtggtcagtggctggggatgggccgggggctttaccgggcttttccggtgttcgctgctgccctttga

SEQ ID NO: 4942 - DNA, 1942 bp, Homo sapiens
  SIMILAR (1514)..(1942): 1001254mologous to Cloning vector pSacBII SacB,accession number U09128,Smith-Waterman Score=768.
atgaaactcatggaaacacttaaccagtgcataaacgctggtcatgaaatgacgaaggctatcgccattgcacagtttagtgatgacagcccggaagcgaggaaaataacccggcgctggagaataggtgaagcagcggatttagttggggtttcttctcaggctatcagagatgccgagaaagcagggcgactaccgcacccggatatggaaattcgaggacgggttgagcaacgtgttggttatacaattgaacaaattaatcatatgcgtgatgtgtttggtacgcgattgcgacgtgctgaagacgtatttccaccggtgatcggggttgctgcccataaaggtggcgtttacaaaacctcaatttctgttcatcttgctcaggatctggctctgagggggctacgtggtttgctcgtggaagacgccaagtcaacagccgatttggataccatcaagacacctgaaaccttatcatgggccgggtgccaaggaagagattccaggaggaccccgaggaccccccagttgcagccatgtcaagactgacactgaggaggaccccaactgtcacaagcaacacccattgaacacggccacccacctggggacagatcaagaagctgtcacagatggcagaagaaaacctgaagaaagtgggacaaccagtcacaacgaggattttgccgatttcggaaccaccatcaaacaggattttcgcctgctggggcaaaccagcgtggaccgcttgctgcaactctctcagggccaggcggtgaagggcaatcagctgttgcccgtctcactggtgaaaagaaaaaccaccctggcgcccaatacgcaaaccgcctctccccgcgcgttggccgattcattaatgcagctggcacgacaggtttcccgactggaaagcgggcaggattttgccgatttcggaaccacccaccaaacaggattttcgcctgttggggcaaaccagcgtggaccgcttgctgcaactctctcagggccaggcggtgaagggcaatcagctgttgcccgtctcactggtgaaaagaaaaaccaccctggcgcccaatacgcaaaccgcctctccccgcgcgttggccgattcattaatgcagctggcacgacaggtttcccgactggaaagcgggcagtgagcgcaacgcaattaattcaggcaccgtgtatgaaatctaacaatgcgctcatcgtcatcctcggcaccgtcaccctggatgctgtaggcataggcttggttatgccggtactgccgggcctcttgcgggatatcgtccattccgacagcatcgccagtcactatggcgtgctgctagcgctatatgcgttgatgcaatttctatgcgcacccgttctcggagcactgtccgaccgctttggccgccgcccagtcctgctcgcttcgctacttggagccactatcgactacgcgatcatggcgaccacacccgtcctgtggatctacccactagtcaattcacctcttatccctaaacagcagcaaaacgaaaaataccaagtgcctcaattcgatcaatcaacgattaaaaatattgagtctgcaaaaggacttgatgtgtgggacagctggccgctgcaaaacgctgacggaacagtagctgaatacaacggctatcacgttgtgtttgctcttgcgggaagcccgaaagacgctgatgacacatcaatctacatgttttatcaaaaggtcggcgacaactcaatcgacagctggaaaaacgcgggccgtgtctttaaagacagcgataagttcgacgccaacgatccgatcctgaaagatcagacgcaagaatggtccggttctgcaacctttacatctgacggaaaaatccgtttattctacactgactattccggtaaacattacggcaaacaaagcctgacaacagcgcag

SEQ ID NO: 4943 - DNA, 3820 bp, Homo sapiens
  SIMILAR (1961)..(2554): 951254mologous to Plasmid F Protein A,accession number M12987,Smith-Waterman Score=974.
atgaaactcatggaaacacttaaccagtgcataaacgctggtcatgaaatgacgaaggctatcgccattgcacagtttaatgatgacagcccggaagcgaggaaaataacccggcgctggagaataggtgaagcagcggatttagttggggtttcttctcaggctatcagagatgccgagaaagcagggcgactaccgcacccggatatggaaattcgaggacgggttgagcaacgtgttggttatacaattgaacaaattaatcatatgcgtgatgtgtttggtacgcgattgcgacgtgctgaagacgtatttccaccgacaccggcgttcggtcgaagagtatctggtgtcatagaaattgccgatgggagtcgccgtcgtaaagctgctgcacttaccgaaagtgattatcgtgttctggttggcgagctggatgatgagcagatggctgcattatccagattgggtaacgattatcgcccaacaagtgcttatgaacgtggtcagcgttatgcaagccgattgcagaatgaatttgctggaaatatttctgcgctggctgatgcggaaaatatttcacgtaagattattacccgctgtatcaacaccgccaaattgcctaaatcagttgttgctcttttttctcaccccggtgaactatctgcccggtcaggtgatgcacttcaaaaagcctttacagataaagaggaattacttaagcagcaggcatctaaccttcatgagcagaaaaaagctggggctatcagagatgccgagaaagcagggcgactaccgcacccggatatggaaattcgaggacgggttgagcaacgtgttggttatacaattgaacaaattaatcatatgcgtgatgtgtttggtacgcgattgcgacgtgctgaagacgtatttccaccggtgatcggggttgctgcccataaaggtggcgtttacaaaacctcagtttctgttcatcttgctcaggatctggctctgaaggggctacgtgttttgctcgtggaaggtaacgacccccagggaacagcctcaatgtatcacggatgggtaccagatcttcatattcatgcagaagacactctcctgcctttctatcttggggaaaaggacgatgtcacttatgcaataaagcccacttgctggccggggcttgacattattccttcctgtctggctctgcaccgtattgaaactgagttaatgggcaaatttgatgaaggtaaactgcccaccgatccacacctgatgctccgactggccattgaaactgttgctcatgactatgatgtcatagttattgacagcgcgcctaacctgggtatcggcacgattaatgtcgtatgtgctgctgatgtgctgattgttcccacgcctgccagcgcagaaatatttccagcaaattcattctgcaatcggcttgcataacgctgaccacgttcataagcacttgttgggcgataatcgttacccaatctggataatgcagccatctgctcatcatccagctcgccaaccagaacacgataatcactttcggatgttcagaatgaaactcatggaaacacttaaccagtgcataaacgctggtcatgaaatgacgaaggctatcgccattgcacagtttaatgatgacagcccggaagcgaggaaaataacccggcgctggagaataggtgaagcagcggatttagttggggtttcttctcaggctatcagagatgccgagaaagcagggcgactaccgcacccggatatggaaattcgaggacgggttgagcaacgtgttggttatacaattgaacaaattaatcatatgcgtgatgtgtttggtacgcgattgcgacgtgctgaagacgtatttccaccggtgatcggggttgctgcccataaaggtggcgtttacaaaacctcagtttctgttcatcttgctcaggatctggctctgaaggggctacgtgttttgctcgtggaagtttctgttcatcttgctcaggatctggctctgaaggggctacgtgttttgctcgtggaaggtaacgacccccagggaacagcctcaatgtatcacggatgggtaccagatcttcatattcatgcagaagacactctcctgcctttctatcttggggaaaaggacgatgtcacttatgcaataaagcccacttgctggccggggcttgacattattccttcctgtctggctctgcaccgtattgaaactgagttaatgggcaaatttgatgaaggtaaactgcccaccgatccacacctgatgctccgactggccattgaaactgttgctcatgactatgatgtcatagttattgacagcgcgcctaacctgggtatcggcacgattaatgtcgtatgtgctgctgatgtgctgattgttcccacgcctgctgagttgtttgactacacctccgcactgcagtttttcgatatgcttcgtgatctgctcaagaacgttgatcttaaagggttcgagcctgatgtacgtattttgcttaccaaatacagcaatattgatggcctgctggcctgccggggctgccgggattttgccgatttcggaaccaccatcaaacaggattttcgcctgctggggcaaaccagcgtggaccgcttgctgcaactctctcagggccaggcggtgaagggcaatcagctgttgcccgtctcactggtgaaaagaaaaaccaccctggcgcccaatacgcaaaccgcctctccccgcgcgttggccgattcattaatgcagctggcacgacaggtttcccgactggaaagcgggcaagtaaaactgggggcatgcaacaagatcacttttaggactgcacttctggcaggaggagcgactcaagccttcgcgaaagaaaataaccaaaaagcatacaaagaaacgtacggcgtctctcatattacacgccatgatatgctgcagatccctaaacagcagcaaaacgaaaaataccaagtgcctcaattcgatcaatcaacgattaaaaatattgagtctgcaaaaggacttgatgtgtgggacagctggccgctgcaaaacgctgacggaacagtagctgaatacaacggctatcacgttgtgtttgctcttgcgggaagcccgaaagacgctgatgacacatcaatctacatgttttatcaaaaggtcggcgacaactcaatcgacagctggaaaaacgcgggccgtgtctttaaagacagcgataagttcgacgccaacgatccgatcctgaaagatcagacgcaagaatggtccggttctgcaacctttacatctgacggaaaaatccgtttattctacactgactattccggtaaacattacggcaaacaaagcctgacaacagcgcaggtaaatgtgtcaaaatctgatgacacactcaaaatcaacggagtggaagatcacaaaacgatttttgacggagacggaaaaacatatcagaacgttcagcagtttatcgatgaaggcaattatacatccggcgacaaccatacgctgagagaccctcactacgttgaagacaaaggccataaataccttgtattcgaagccaacacgggaacagaaaacggataccaaggcgaagaatctttatttaacaaagcgtactacggcggcggcacgaacttcttccgtaaagaaagccagaagcttcagcagagcgctaaaaaacgcgatgctgagttagcgaacggcgccctcggtatcatagagttaaataatgattacacattgaaaaaagtaatgaagccgctgatcacttcaaacacggaataa

SEQ ID NO: 4944 - DNA, 3780 bp, Homo sapiens
  SIMILAR (1459)..(2559): 971254mologous to Cloning vector pZC320 SopA,accession number U26464,Smith-Waterman Score=1845.
  misc_feature (1)...(3780): n = a,t,c or g
atgaaactcatggaaacacttaaccagtgcataaacgctggtcatgaaatgacgaaggctatcgccattgcacagtttaatgatgacagcccggaagcgaggaaaataacccggcgctggagaataggtgaagcagcggatttagttggggtttcttctcaggctatcagagatgccgagaaagcagggcgactaccgcacccggatatggaaattcgaggacgggttgagcaacgtgttggttatacaattgaacaaattaatcatatgcgtgatgtgtttggtacgcgattgcgacgtgctgaagacgtatttccaccggtgatcggggttgctgcccataaaggtggcgtttacaaaacctcagtttctgttcatcttgctcaggatctggctctgaaggggctacgtgttttgctcgtggaagggagcagagctctgttcccactgaaaagctgggattggaaaaatcaaccccaggctctgaagggattctggggctggattgcagaatgggcagcctgtgccatgaccaccagcagcaaagaaggtggtgctgatgacaacacaccacacggtggctgtgtcctggtgcccccagctntggcatttggtgctgatgccccagcctgtttccaagcactctgtgtgattcttatgatgtctgaggctggagacaccaggccaacaaaggttcccgaagtcgagcaagaactggagtcccccgtgggcttgctagaactcacgctgcagggcccacccagggttgacaactccgggtgtgagattcactctgtcctggcctttgctgacactcagggaaaggaactagaaaactggactgccagggaacatgacggtatctgcgagatccatgttgctaaatatgctgaaatattcggattgacctctgcggaagccagtaaggatatacggcaggcattgaagagtttcgcggggaaggaagtggttttttatcgccctgaagaggatgccggcgatgaaaaaggctatgaatcttttccttggtttatcaaacgtgcgcacagtccatccagagggctttacagtgtacatatcaacccatatctcattcccttctttatcgggttacagaaccggtttacgcagtttcggcttagtgaaacaaaagaaatcaccaatccgtatgccatgcgtttatacgaatccctgtgtcagtatcgtaagccggatggctcaggcatcgtctctctgaaaatcgactggatcatagagcgttaccagctgcctcaaagttaccagcgtatgcctgacttccgccgccgcttcctgcaggtctgtgttaatgagatcaacagcagaactccaatgcgcctctcatacattgagaaaaagaaaggccgccagacgactcatatcatgctgctgacttttggcatcgtagcagaaggcatgagtccccaagaggatcccccaatgaaactcatggaaacacttaaccagtgcataaacgctggtcatgaaatgacgaaggctatcgccattgcacagtttaatgatgacagcccggaagcgaggaaaataacccggcgctggagaataggtgaagcagcggatttagttggggtttcttctcaggctatcagagatgccgagaaagcagggcgactaccgcacccggatatggaaattcgaggacgggttgagcaacgtgttggttataccattgaacaaattaatcatatgcgtgatgtgtttggtacgcgattgcgacgtgctgaagacgtatttccaccggtgatcggggttgctgcccataaaggtggcgtttacaaaacctcagtttctgttcatcttgctcaggatctggctctgaaggggctacgtgttttgctcgtggaagggctacgtgttttgctcgtggaaggtaacgacccccagggaacagcctcaatgtatcacggatgggtaccagatcttcatattcatgcagaagacactctcctgcctttctatcttggggaaaaggacgatgtcacttatgcaataaagcccacttgctggccggggcttgacattattccttcctgtctggctctgcaccgtattgaaactgagttaatgggcaaatttgatgaaggtaaactgcccaccgatccacacctgatgctccgactggccattgaaactgttgctcatgactatgatgtcatagttattgacagcgcgcctaacctgggtatcggcacgattaatgtcgtatgtgctgctgatgtgctgattgttcccacgcctgctgagttgtttgactacacctccgcactgcagtttttcgatatgcttcgtgatctgctcaagaacgttgatcttaaagggttcgagcctgatgtacgtattttgcttaccaaatacagcaatagtaatggctctcagtccccgtggatggaggagcaaattcgggatgcctggggaagcatggttctaaaaaatgttgtacgtgaaacggatgaagttggtaaaggtcagatccggatgagaactgtttttgaacaggccattgatcaacgctcttcaactgatacttcgttatcgacaccagctgccccgatggtggattcgttaattgcgcgcgtaggagtaatggctcgcggtaatgccattactttgcctgtatgtggtcgggatgtgaagtttactcttgaagtgctccggggtgatagtgttgagaagacctctcgggtatggtcaggtaatgaacgtgaccaggagctgcttactgaggacgcactggatgatctcatcccttcttttctactgactggtcaacagacaccggcgttcggtcgaagagtatctggtgtcatagaaattgccgatgggagtcgccgtcgtaaagctgctgcacttaccgaaagtgattatcgtttgcccgatgtggattcgttaatgcgcggtgattatcgtgttctggttggcgagctggatgatgagcagatggctgcattatccagattgggtaacgattatcgcccaacaagtgcttatgaacgtggtcagcgttatgcaagccgattgcagaatgaatttgctggaaatatttctgcgctggctgatgcggaaaatatttcacgtaagattattacccgctgtatcaacaccgccaaattgcctaaatcagttgttgctcttttttctcaccccggtgaactatctgcccggtcaggtgatgcacttcaaaaagcctttacagataaagaggaattacttaagcagcaggcatctaaccttcatgagcagaaaaaagctggggtgatatttgaagctgaagaagttatcactcttttaacttctgtgcttaaaacgtcatctgcatcaagaactagtttaagctcacgacatcagtttgctcctggagcgacagtattgtataagggcgataaaatggtgcttaacctggacagtcaggcaccgtgtatgaaatctaacaatgcgctcatcgtcatcctcggcaccgtcaccctggatgctgtaggcataggcttggttatgccggtactgccgggcctcttgcgggatatcgtccattccgacagcatcgccagtcactatggcgtgctgctagcgctatatgcgttgatgcaatttctatgcgcacccgttctcggagcactgtccgaccgctttggccgccgcccagtcctgctcgcttcgctacttggagccactatcgactacgcgatcatggcgaccacacccgtcctgtggatctacccactagtcaattcaccatcttgttga

SEQ ID NO: 4945 - DNA, 3092 bp, Homo sapiens
  SIMILAR (712)..(2655): 251254mologous to Clostridium thermocellum S-layer protein,accession number X67506,Smith-Waterman Score=369.
gtccggccgacgtcacccccagaagacaagcagtggagctgtggcctcgggtttccggtaccgggtcccgtaccccgtggtcttgcggctccggagaactccaggagctggacttccaggcctggttccccaccgcagacccccggcagcaggagtgggcatcccttctggcccctgtggagtcgcaggctgattctggggtggccactgctcacccctggattctcccgtctctgtcgtccagcaggccccggtgacccctggattctcccgtttctgtcatataccaggcaccggtaacccctgcattctcctgtctttgtcatctaccaggccccggtgactgacttgcttatgaacagcctgacttccaggctgcctcttttctgatccagctacaatctctgagggcccagagtgtccacgtagttggggggcacagacgaccaaatcccagcatctcccaagacccacacccacagtgccaaggggcctggagcccacacagttaattccgtgacctccacagctccatcaccccccagacctgcaacggacaccaggcccatgtgcaacatgtggtccggcaggccccgggaggacctaggccaggtctccaggccctgcagacgacctgccatggaaacgtcggacaccagtttgagtgtgagctagatgccagcgagtcccgggaaggccagttcctgacttgctcaggtgcctgccacgtgccaccacccccgccccatccccagcacctggcctcgtggttcggcgcctcgcggccccagttcccgccgcggccccagttcccgccgcggccccagttcccgccgcggccccagttcccgccgcggccccagttcccgccgcggccccagttcccgccgcggccccagttccggtcgcggccccagttccggtcgcggccccagttcccgccgcggccccagttcccgccgcggccccagttcccgccgcggccccagttcccgccgcggccccagttcccgccgcggccccagttcccgtcgcggccccagttcccgccgcggccccagttcctaggtttcagtccccaaaccagacagcttccacatcagacagtccccatatcggacagcttccacaccagacagtccccatatcagacagcttccacaccggacagtccccacaccggacagattccacaccggacagtccccacaccggacagcttccacacaggacagtacccacaccggacagcttccacaccggacagtccccacaccggacagcttccacaccagacagtccccacaccagacagcttccacaccagacagtccccatatcggacagcttccacaccagacagtccccatatcggacagcttccacaccagacagtccccacaccagacagcttccacacaggacagtccccacaccggacagattccacaccggacagtccccacaccagacagcttccacaccagacagtccccatatcggacagcttccacaccagacagtccccatatcggacagcttgcacaccggacagtccccacaccagacagcttccacacaggacagtccccacaccggacagattccacaccggacagtccccacaccagacagcttccacaccagacagtccccatatcggacagcttccacacaggacagtccccatatcggacagcttccacaccagacagtccccacaccagacagcttccacaccagacagcttccacaccggacagtccccacaccagacagtccccacaccggacagtccccacaccggacagttccccacaccagacagtttccacaccagacagtccccacaccagacagcttccacaccagacagtccccacaccagacagcttccacacaagacagtccccacaccagacagtacccacaccagacagtccccacaccagacagcttccacaccagacagcttccacaccggacagtccccacaccagacagtccccacaccggacagtccccacaccagtttccacaccagacagtacccacagcggacagtccccacaccagacagcttccacaccagacagtccccacagcagacagtcccacaccagacagcttccacaccagacactccccacaccagacagcttccacaccagacagtccccatatcggacagcttccacaccggacagtccccacaccagacagtttccacaccagacagtccccacaccagacagcttccacaccagacactccccacaccagacagcttccacagcagacagtccccacagcagacagtcccacaccagacagcttccacaccagacagtccccacaccagacagtccctacaccagacagtccccacaccagacagtccccacaccggacagtacccacaccagacagcttccacaccagacagtacccacagcggacagtccccacaccagacagcttccacaccaggcagtccccacacaaaacagtccccacatcagacagtccccacaccagactgtccccacaccggacagtccccataccagacagtttccacaccagacagtccccacaccagacactccccacaccagacagcttccacaccagacagtccccatatcggacagcttccacaccagacagcttccacgctggacagtccccacatcggacggcatccacgccagatggcccccacgccagagagtccccacgccagacagcttccatgccagatggcccccacaccagacagccccacactggatggtccccacatcaaacaccttccactccagacaccttccacgctggacagtccccacaccagacagcttccatgccagacagcaaccacactggacggcatccacgccagacagcttccaagctggatgtcccccacatcagacagcccccatgccagatggcccccacgctgcacagtccccacggtggacggcctccacgccagatggcatcaatgcttccgacaatcggatcccatggacagagaggaccacactggctctgagaccctgacaaaacccaaaatgaccctttag

SEQ ID NO: 4946 - DNA, 891 bp, Homo sapiens
  SIMILAR (388)..(855): 851254mologous to Homo sapiens protein-tyrosine phosphatase,accession number D13540,Smith-Waterman Score=700.
atggagacttccaggctttacaataagtctttgcatgcagcagttgatgacaaaggggagaacaataacggcaagtctaaagtggcccatgttatgatttgctgtcaggaactgaaatacgatgttggtggaggagaacggtatgattctttgacagatcttgtggaacattacaagaagaatcctatgatggaaacatggggtacagtactacaactcacggttgtcctacacgatggtgatcccaacgagcctgtttcagatgacatcaatgcaaatatcatcatgcccaaatttgaaaccaagtgtaacaattcaaagcccaagaagagttacattgccacacaaggctgcctgcaaaacatggtgaacgacttttggcggatggttgggcaagggaatatggagagaatggtctggcaataccacttttggacctggccggaccacggagtgcccattgaccccaggggtgtgctggacttcctggaggaggtgcaccataagcaggaacgcatcatgcatgcaaggccagtcgtggtgcacggcagtgctggaattggccggacagggacatacgttgtgattgatattctgactgacatcaacagagagaaaggtgttgactgcaacattgacgttctcaaaactatccagatggtgcagtctcagaagtcagggatggtccagacagaaacacagtaccgatttatctatatggcggtccagcattatactgaaacactacagcgcaggattgaagaagagcagaaaagcaagaggaaaggtcatgaatatacaaatattaagtattctctagcggaccagacgagtggagatcagagcccccccccccgccttgtactccaactccacgctgtgcagaaatga

SEQ ID NO: 4947 - DNA, 2350 bp, Homo sapiens
  SIMILAR (199)..(1989): 991254mologous to Mus musculus protein tyrosine phosphatase,accession number D84372,Smith-Waterman Score=3159.
ggaggagcgagccgggccggggggcagctgcacagtctccgggatccccaggcctggaggggggtctgtgcgcggccggctggctctgccccgcgtccggtcccgagcgggcctccctcgggccagcccgatgtgaccgagcccagcggagcctgagcaaggagcgggtccgtcgcggagccggagggcgggaggaacatgacatcgcggagatggtttcacccaaatatcactggtgtggaggcagaaaacctactgttgacaagaggagttgatggcagttttttggcaaggcctagtaaaagtaaccctggagacttcacactttccgttagaagaaatggagctgtcacccacatcaagattcagaacactggtgattactatgacctgtatggaggggagaaatttgccactttggctgagttggtccagtattacatggaacatcacgggcaattaaaagagaagaatggagatgtcattgagcttaaatatcctctgaactgtgcagatcctacctctgaaaggtggtttcatggacatctctctgggaaagaagcagagaaattattaactgaaaaaggaaaacatggtagttttcttgtacgagagagccagagccaccctggagattttgttctttctgtgcgcactggtgatgacaaaggggagagcaatgacggcaagtctaaagtgacccatgttatgattcgctgtcaggaactgaaatacgacgttggtggaggagaacggtttgattctttgacagatcttgtggaacattataagaagaatcctatggtggaaacattgggtacagtactacaactcaagcagccccttaacacgactcgtataaatgctgctgaaatagaaagcagagttcgagaactaagcaaattagctgagaccacagataaagtcaaacaaggcttttgggaagaatttgagacactacaacaacaggagtgcaaacttctctacagccgaaaagagggtcaaaggcaagaaaacaaaaacaaaaatagatataaaaacatcctgccctttgatcataccagggttgtcctacacgatggtgatcccaatgagcctgtttcagattacatcaatgcaaatatcatcatgcctgaatttgaaaccaagtgcaacaattcaaagcccaaaaagagttacattgccacacaaggctgcctgcaaaacacggtgaatgacttttggcggatggtgttccaagaaaactcccgagtgattgtcatgacaacgaaagaagtggagagaggaaagagtaaatgtgtcaaatactggcctgatgagtatgctctaaaagaatatggcgtcatgcgtgttaggaacgtcaaagaaagcgccgctcatgactatacgctaagagaacttaaactttcaaaggttggacaagctctactccaggggaatacggagagaacggtctggcaataccactttcggacctggccggaccacggcgtgcccagcgaccctgggggcgtgctggacttcctggaggaggtgcaccataagcaggagagcatcatggatgcagggccggtcgtggtgcactgcagtgctggaattggccggacagggacgttcattgtgattgatattcttattgacatcatcagagagaaaggtgttgactgcgatattgacgttcccaaaaccatccagatggtgcggtctcagaggtcagggatggtccagacagaggcacagtaccgatttatctatatggcggtccagcattatattgaaacactacagcgcaggattgaagaagagcagaaaagcaagaggaaagggcacgaatatacaaatattaagtattctctagcggaccagacgagtggagatcagagccctctcccgccttgtactccaacgccaccctgtgcagaaatgagagaagacagtgctagagtctatgaaaacgtgggcctgatgcaacagcagaaaagtttcagatgagaaaacctgccaaaacttcagcacagaaatagatgtggactttcaccctctccctaaaaagatcaagaacagacgcaagaaagtttatgtgaagacagaatttggatttgggaaggcttgcaatgtggttgactaccttttgataagcaaaatttgaaaccatttaaagaccactgtattttaactcaacaatacctgcttcccaattactcatttcctcagataagaagaaatcatctctacaatgtagacaacattatattttatagaatttgtttgaaattgaggaagcagttaaattgtgcgctgtattttgcagaggattatggggattcaaattctagtaataggccttttt

SEQ ID NO: 4948 - DNA, 2157 bp, Homo sapiens
  SIMILAR (6)..(242): 721254mologous to Plasmodium lophurae histidine-rich protein,accession number X01469,Smith-Waterman Score=435.
atgatcatcatcatcatcatcactatcatcagcatcaccatcatcatcctcatcaccactatcatccccatccccatcatcctcaccattctcaccatcatcaccatcatcatcatcaccatcaccatcatcctcaccatcaccatcatcaccatcatcctcaccatcaccatcatcatcactgtcatcctcacccccatcatcctcactattaccatcatcaccatcattctcaccatcacatcatcctcatcatcaccatcgccaccaccaccatcatcctcatcatcaccaccatcatcaccatcattctcaccaccaccatcatcctcatcatcatcaccatcatcaccatcattctcaccaccaccatcatcatcatcaccaccatcatcaccatcattctcaccaccattatcatcctcatcatcatcattatctatttcttcttcacctcctcctcctctctatcttctcatcatgtcacacactgtcattactggttactatgtactgatcaccaatgactattctagagactcattgcctctgctcctcactcccatatggcctgctggaagtgcctgcgagggctgggtcccgggatactgcctgatgggagatggcaaacttgtgccccgcagggagggccaaggcggggaggagaagaaagaacattcagaggaaagaggcgagagaggcaagacagccgtgttagacagcctcgctgagaagaccatccgctacaccagctctgggggactgggggaaagtgaccctgcagaggtgagttttaaactaagactggaagacaagaagcaggagctgctgctgcctgccccacgttcgaatcctggttcagcaggagccattgcttcccgcactacactcgccctggtactgcgtctgcaacctgaatgcacccagagcccaaccactcccgagttcctcaactccctgggcccagaggccgcaacacctttcgtcttcatgcgttctgtcctgaggcacttcttccacacgtaccctggcttgcaacgagcccagggaccacttgaggtgaaagctgcaggtcttcctaggccttttctgaacacgcacattgacctggtgtatgcacagctttgtgcgttcccccatgtacatgggttctttttggaaaaacggtggttcaaaggcttccggagtgagacatctgtgtcgtcttcatcatcagggccagctgcacctgccaccctgggacgctcgctcccctgcgaggtggagtccaggaacatccaaccatctgtgtccttacgaaggcccatcctcacagcctgcagccgacagctaaggaatgactcctgcggcgatggaatctccaaggacgtgcatgttttactgaatctaccaaaagcacggcagaaggaggcgagttacagccagacgttttggaaagtacctaagcgctgtgaacagcaggaaagaatcgactccagcggcgccgtcaggcgccgacgtccaggaagctgcagcttagatgtcaaggaggtgaacctcaaagctggactctgggttctcaccaaaaactggccccctcgcctccaactccgatttgtgctgggtgctgaccccacacacgacagggacatgtggacgggcaggactgtggccgaggtacctactgagccgtcccccacgctcagcgactgccactcttctgcagggtacgctgcctctcagcactctccggggccagaggagcacactcagctccctcctgtgtgtccccatgaaaccgtatttataccccagtacagaacgtgtcacactgtgatccagggcttcctggtgtctccactgagggacggcgacagtgccagggtctcagcccacctgcgccacgaaagggagtcagaaacccgggggccgcatttcatccaccccaactccaccctgcaaagcacccttctgaaaatcaacactcgggaaaggtttacaggcatcaggcgaacagcagggagccctggtggcagcgagccaccttcacgtgtgggctccgagaccccgggaaaggctgcaacctttctttccaatacggtgcaaggtatccgcagcctgatacttgttttgcatgaaaatcaatcagctttaggacctcagcacatctgtttctga

SEQ ID NO: 4949 - DNA, 378 bp, Homo sapiens
  SIMILAR (133)..(324): 561254mologous to Rattus sp. reverse transcriptase homolog,accession number S80119,Smith-Waterman Score=189.
atgagcataaaagggacatatcttaaagtaataaaagccatctatgacaaacccacagccagcagtatactgaatggggaaaatttgaaagcatttctgctgagaactggaacaagacaaggatgcccactttacaaaatcaatgtatacaaatcagtagcactgctatacaccaccaacgaccaaggtgagaatcaaatcaataactcaaccccttataccacagctccaagaaaaataaaatacataggaatataccttaccaaggaggtgaaagatctctacaaggaaaactacaaaacactgctgaaagaagtcatagatgacacaaatggaaacacatcccatgctcatggatgggtagaatcaatattgtga

SEQ ID NO: 4950 - DNA, 419 bp, Homo sapiens
  SIMILAR (1)..(354): 941254mologous to Homo sapiens Human transferase TRNSFS- 12,accession number Y79220,Smith-Waterman Score=594.
gcgtccaattatgtcagtgactggtgggaggaatttgtgtacctgcgctcccgaaatccgctgatggtgaacagcaactattacatgatggctttcctgtatgtcacacccacgcctctgcaggcagctcgcgctgggaatgccgtccatgccctcctcctgtaccgccaccgcctgagccgccaggagatacccccgactttgctgatgggaatgcgccccttatgctctgaccagtacgagaagatcttcatcaccacgcggattccaggggtccaaaaagactacatccgccacctccatgacagacaacacggcgctgtcttccaccggggccgattcttccgcataggagacccactcccgaagcagccgtgtatgcggccgctctgaggattcacctaacgtcgcagcagttg

SEQ ID NO: 4951 - DNA, 1571 bp, Homo sapiens
  SIMILAR (561)..(1568): 901254mologous to Homo sapiens Human transferase TRNSFS- 12,accession number Y79220,Smith-Waterman Score=1549.
ttgagacggatttcgcttttgttggccaagctggagtacaatggtgcgatctcagctcaccacaacctctgcctccctgggttcaagcaattctcctgcctcagcctcccaggcaggggtgctggtctggcatccccaaatggtctggcatctctgaggatgtgcaagtttggaaaaactgcaaattggatttagctgctgctacaggaaagaactgccttggacagggtgaagaagctttgctgacgcagatgagaacaggaaaccaacgggaagtcagtgactggtgggaggaatttgtgtacctgcgctcccgaaatccgctgatggtgaacagcaactattacatgatggacttcctgtatgtcacacccacgcctctgcaggcagctcgcgctgggaatgccgtccatgccctcctcctgtaccgccaccgcctgaaccgccaggagatacccccggtgagagggccccagtgggttagggatggaggtgtggtcctgtggcctttgggccacgtgggtcctggaaggcagctcacagcccacggtttcctgcagactttgctgatgggaatgcgccccttatgctctgcccagtacgagaagatcttcaacaccacgcggattccaggggtccaaaaagactacatccgccacctccatgacagccaacacgtggctgtcttccaccggggccgattcttccgcatggggacccactcccgaaacagcctgctttccccgagagccctggagcagcagtttcagagaatcctggatgatccctcaccggcctgcccccacgaggaacatctggcagctctgacagctgctcccaggggcacgtgggcccaggtgcggacatccctgaagacccaggcagcggaggccctggaggcggtggaaggggccgctttctttgtgtcactggatgctgagcccgcggtgtctcaccttggaggacccggcagcgtcgttggatgcctacgcccatgctctgctggccggccggggccatgatcgctggttttgacaaaatccttcaccctaatcgtcttctctaacgggaagctgggcctcagcgtggagcactcctgggccgactgccccatctcaggacacatgtgggagttcactctggctacagaatgctttcagctgggctactcaacagacggccactgcaaggggcacccggaccccacactaccccagccccagcggctgcaatgggcccttccagaccatattcactcctccatctctctagccctgaggggagccaagatcttgtctgaaaatgtcgactgccatgtcgttccattctccctatttggcaagagcttcatccgacgctgccacctctctttagacagcttcatccagatcgccttgcaactggcccacttccgggacaggggtcaattctgcctgacttatgagtcggccatgactcgcttattcctggaaggccggacggagacggtgcggtcttgcacgagggaggcctgcaactttgtcagggccatggaggacaaaaagaagacggtgggtgcagccctcgcttga

SEQ ID NO: 4952 - DNA, 1028 bp, Homo sapiens
  SIMILAR (64)..(858): 531254mologous to Homo sapiens zinc finger protein,accession number AF020591,Smith-Waterman Score=738.
atgccagccaaaagtcctgggcaagatgtgcttggtacggataacataaagattgatgtcttcaaacaaaccaaccagaaaagtcacacaggggagaaaccctatgaatgtcctgagtgcgggaaagccttcagtgagaagtcacgcctaagaaaacatcagagaactcacacgggagagaaaccatacaaatgtgatggatgtgataaagctttcagtgcaaagtcaggcctaagaatacaccagagaacccacacaggggagaaaccattcgaatgtcatgaatgtgggaaatcttttaactataagtcaatcctcatagtgcatcagagaactcacacaggggagaaaccttttgaatgtaatgaatgcgggaaatctttcagccatatgtcaggcctaaggaatcaccgaagaactcacacaggggaaagaccatataaatgtgatgaatgtgggaaagctttcaaactgaagtcaggcctgaggaaacatcatagaacacacacaggggagaagccctacaaatgtaatcagtgtggaaaagctttcggtcagaaatcactaactcagaggacatcatagaattcactcaggggaaaaacccctataaatgtaatcattgtggggaagctttcagtcagaaatcaaacctcagagtacatcacagaactcatactggggagaaaccctatcaatgtgaggagtgtggaaaaacattcaggcagaaatcaaatctcagaggggcatcagagaactcactctggggagaagccctatgaatgtaatgaatgtggaaaagctttcagtgagaagtcagtcctaagaaaacatcagcgaactcacacccggggagaaacccatataattgtaatcagtgtggggaagctttcagtcagaaatccaatctcagagtacatcagagaactcacacaggggagaaaccctataaatgtgataaatgtgggagaactttcagtcaaaaatcaagccttagagaacatcagaaagcccacccaggggattaa

SEQ ID NO: 4953 - DNA, 606 bp, Homo sapiens
  SIMILAR (304)..(122): 311254mologous to Homo sapiens Human breast tumour-associated protein 83,accession number Y48538,Smith-Waterman Score=72.
tcaaatcatgctaccaatgtaggaagaatgtacttcccatgtcctgttgccatgaggtggaggttgagagacaccaggattgtgggctaggaggtcggtaaagagcagagggctctttcctgggctgcctagtcctagcagggcatctgttagatccctgctgctgctacctgcatgggcagccttcttggagggaatagtagataccagacccacagcatggagagcatttccctggaccctctttctgagtgtcttctgccaatttttggattttccagaaacgtctttggattcccaaaagttgagtttagatactcccagtttttgaatttcatttctctttagaattattgccattttatataagaaacttgaacatctgcagattttagtatccacaggggttgggggtgtcctggaatcaatccctgcagacacgaaggggacattgtactcatcagtattagccagctctaagtcagcacacaaaacatttgctttatgcagttttatccacgtcattaacaaagatgaagaataagaagaagataagtacattgaatttccaaacatcaaaatgaaactaagggtaactgaaatcat

SEQ ID NO: 4954 - DNA, 1455 bp, Homo sapiens
  SIMILAR (669)..(1334): 291254mologous to Streptomyces coelicolor A3(2) putative translation initiation factor IF-2(fragment),accession number AL355913,Smith-Waterman Score=140.
ttacaatgacagtttagttttcagagtctttgcagtgctagtgctattctggtcagcttgattcatctggtgcccttgtggtccatctctgccccaaatcatgctgccgatgcaggaagaatgtacttcccatgtcctgttgccatgaggtggagggtgagagacaccaggattgtggggtaggaggtcggcagagagcagagggctctttcctgggctgcctagtcctggcagggcacctgttagatccccgctgctgctacctgcatgggcagcctcccactcaggtcttggtttccaaataccattctcctctaaaaggaaccagggctccttggaaaaaatggctgattccaaggctgcagtgctatggacttgagtatttgtgtccacctcaaattcatagactgaatctttaatccccagtctgatggtgtttggagggtgggcctctgccagctgagaggcagttgggagaccaacaagctgagcaggcatttcagcagattcagcagtcagagtgcaccaagaagggtgctttagtttggagtttcgaaaggccatactgagaatcaaagttaaaatatacatctgaagtacaagaaatggataggaaaaactttcacggagaggtggtgtccacatcacacgagtgaccagaaccgaaaccagcggcagtcgcaccgccacctgagtcgccccttcctgctggagacagcgaggggtgcctgcagccgggacaccttcttctccgcgtctcctcgtctcccgcgcccgcgtcaggccgccagccttgcccaccgccccgagaagagcgcgccgggcgccgactgcccctcggggcgccgggcggcggccctggacgtgcgggggcctctctgggccggccgcagcgcctcggccctgccctctagctcccgcgttcgctcctgccttcttggctctcggggcacagcgcgcggcccggtccggagcagggcggacatgagcgccaagcagagcggcctggccgccgctcacggcgcacgcgcgcgtactcggctcggatctaccttccagtagcagcggagtggccaatgggaccgggaccagagccgggggccggaggccgccgccgcggggaggttcccggcccaggtgcccagcgctcaccagcccggcggcgccgcggcggccccgcagctgtttcctcgggggggcgtggcgtcgggggccttcgcggcgcagtcctctttcagcatcccgaacagcagcagcggcccgtaggactcgcaggactcggtgcacagcagcccgcgcatgtttggaggtacggacccctctccacgcgcccgcgctcggtcctcccgcggctgcacgtgggccgtggccgccggctatttttacccttctccttttctccttcggccggggcgccgggggctgcttcccggcccagcccgcgccggtctccat

SEQ ID NO: 4955 - DNA, 415 bp, Homo sapiens
  SIMILAR (1)..(252): 921254mologous to Rattus norvegicus proline rich synapse associated protein 1,accession number AJ131899,Smith-Waterman Score =414.
atgatgaacgtccccggcggaggagcggccgcggtgatgatgacgggctacaataatggtcgctgtccccggaattctctctacagtgactgcattattgaggagaagacggtggtcctgcagaaaaaagacaatgagggctttggattcgtgcttcgaggggccaaagctgacacacccattgaagaattcacaccaacaccggctttcccagccctacagtacctggagtccgtggatgaagggaacattccctgtgggtcagagagtttgctgaccaggtctctgctacatctccagcatgcagcacagttcagagagattaagaagcctgcccagggccctccagggaggtctgaatctaagctgactccaaagcttgtttcttttgcactgtgtctgtctgatgctccag

SEQ ID NO: 4956 - DNA, 481 bp, Homo sapiens
  SIMILAR (328)..(480): 781254mologous to Homo sapiens GKAP/SAPAP interacting protein,accession number AF141901,Smith-Waterman Score=185.
  misc_feature (1)...(481): n = a,t,c or g
ggtgatgatgacgggctacaataatggtcgctgtccccggaattctctctacagtgactgcattattgaggagaagacggtggtcctgcagaaaaaagacaatgagggctttggattcgtgcttcgaggggccaaagctgacacacccattgaagaattcacaccaacaccggctttcccagccctacagtacctgggagtccgtggatgaaggtggggtggcgtggcaagccggactaaggaccggggacttcttgattgagggtaacaatgagaatgttgtcaaagtctggcccaggcaggcggtgaacatgatccggcagggagggaatcaccctgttccttaatgtggtcacggtgaccaggaatctggaacccgacgacaccgccaggaagaaagcttccccgccttcaaagcgggcacctaccacagccctnaccctncgcttcaagtccatnaccttggagcttgagganttgt

SEQ ID NO: 4957 - DNA, 565 bp, Homo sapiens
  SIMILAR (40)..(246): 461254mologous to Homo sapiens NAG13,accession number AF194537,Smith-Waterman Score=152.
atggacccaaaccacgaagaaatccctgatttacctgaaaaagaatttaggagagttaaaagcaaaaatcacatgaccatctcaatagatgcagaaaaagcattcgacaacatccagcatcgctttatgattaaaactctcagcaaaattggcatacaagggacacactttaatgataataaaagccatctatgacaaacccacagccagtataatactgaacggagaaaacttgaaagcattccctctgagaactggaacaagcatagtactggaagtcctagccagagcaatcagacgagagaaagaaataaagggcatccaaattggtaaagaggaagtcaaactgttgctctttgctgatgatatgattgtttacctagaaaaccctaaagactcctacagaaagctgttagaacagataaaggaattcagcaaagtttccagatacaaaattaatgtacagaaatcaatagctcttctgtacgccaacagtgaccaagctgagaatcaaatcaataacccaacctcttttacaatagctgcaaaaaataaaataaaataa

SEQ ID NO: 4958 - DNA, 1221 bp, Homo sapiens; identical to SEQ ID NO: 3630
  SIMILAR (369)..(223): 971254mologous to Homo sapiens GKAP42,accession number AF319476,Smith-Waterman Score=264.

SEQ ID NO: 4959 - DNA, 1169 bp, Homo sapiens
  SIMILAR (440)..(1030): 741254mologous to Mus musculus Pro-Pol-dUTPase polyprotein,accession number Y12713,Smith-Waterman Score=833.
ctatcgatgaggtgcaatgtcggtgtcagtcgctgacaatccgctgacgtcgcgcatgtgaacgcactgcaccattacgccgcgtgcacgagtgacctccagacaggtattcactgatgaaggatgaccggacacttcaaagctgacatcgaaatagcctttttccgctttccagtgatccatgtcgtcgttttgtgggtttacgagcacatccgcccccatctctttgcccagcgaaagggaacggggactcacatcagcacagacaatttccgcggcccccagtgttttcactgcattgtccaatgggatgtaggaattcagaatggatcctgccattgctttggtgctggcattatcactaactgttcccaagctgactgtgccagattctccacttagactgtaccgttctttctgtacatctgcttgtacttccaacctggtggtacactttgcatagaaggagaaatggccagatgtgtgattatacactgattcatgggctgtggccaatggtttggctggatggtcagggacttggaagaagcatgattggaaaattgatgacaatgaaatttggggaagaggtatgtggatagacctctctgagtggtcaaaaactgtgaagatatttgtatcacatgagagtgctcaccatatcacataaaagagctcagcagaggaggattttaataatcaagtggataggatgattcattctgtggacaccactcggcctctttccccagccacccctgtcatcacccaatgggcccatgaacaaagtggccatggtgacagggatggaggttatgcatgggctcagcaacatggacttccactcaccaaggctgacctggctatggtcactgctgagtgcccaatttgccagcagcagagaccaacactgagcccttgatatggcaccattcctcggggtgatcagccagctacctggtggcaggtcgattatattggacctctttcatcatggaaagggcagaggtttgtcctcactggaatagacaatctggatatgagtttgcctatcctgcacgcagttctgccaatagtaccatccgtggacttatggaatgccttatccaccatcatggtattccacacagcattgcctctaaccaactttacagctaaagaagtttagc

SEQ ID NO: 4960 - DNA, 15359 bp, Homo sapiens
  SIMILAR (131)..(15244): 1001254mologous to Homo sapiens skeletal muscle ryanodine receptor,accession number U48508,Smith-Waterman Score=26424.
tctacctcgcgggtgcctctggtgtctccagaggtctccgaccccagcccgcccccagccctcccgcccagcccgcagccccctccctctgttccccgacctcagaccctgggcttccgacctcgacatcatgggtgacgcagaaggcgaagacgaggtccagttcctgcggacggacgatgaggtggtcctgcagtgcagcgctaccgtgctcaaggagcagctcaagctctgcctggccgccgagggcttcggcaaccgcctgtgcttcctggagcccactagcaacgcgcagaatgtgccccccgatctggccatctgttgcttcgtcctggagcagtccctgtctgtgcgagccctgcaggagatgctggctaacacggtggaggctggcgtggagtcatcccagggcgggggacacaggacgctcctgtatggccatgccatcctgctccggcatgcacacagccgcatgtatctgagctgcctcaccacctcccgctccatgactgacaagctggccttcgatgtgggactgcaggaggacgcaacaggagaggcttgctggtggaccatgcacccagcctccaagcagaggtctgaaggagaaaaggtccgcgttggggatgacatcatccttgtcagtgtctcctccgagcgctacctgcacctgtcgaccgccagtggggagctccaggttgacgcttccttcatgcagacactgtggaacatgaaccccatctgctcccgctgcgaagagggcttcgtgacgggaggtcacgtcctccgcctctttcatggacatatggatgagtgtctgaccatttcccctgctgacagtgatgaccagcgcagacttgtctactatgaggggggagctgtgtgcactcatgcccgctccctctggaggctggagccactgagaatcagctggagtgggagccacctgcgctggggccagccactccgagtccggcatgtcactaccgggcagtacctagcgctcaccgaggaccagggcctggtggtggttgacgccagcaaggctcacaccaaggctacctccttctgcttccgcatctccaaggagaagctggatgtggcccccaagcgggatgtggagggcatgggcccccctgagatcaagtacggggagtcactgtgcttcgtgcagcatgtggcctcaggactgtggctcacctatgccgctccagaccccaaggccctgcggctcggcgtgctcaagaagaaggccatgctgcaccaggagggccacatggacgacgcactgtcgctgacccgctgccagcaggaggagtcccaggccgcccgcatgatccacagcaccaatggcctatacaaccagttcatcaagagcctggacagcttcagcgggaagccacggggctcggggccacccgctggcacggcgctgcccatcgagggcgttatcctgagcctgcaggacctcatcatctacttcgagcctccctccgaggacttgcagcacgaggagaagcagagcaagctgcgaagcctgcgcaaccgccagagcctcttccaggaggaggggatgctctccatggtcctgaattgcatagaccgcctaaatgtctacaccactgctgcccactttgctgagtttgcaggggaggaggcagccgagtcctggaaagagattgtgaatcttctctatgaactcctagcttctctaatccgtggcaatcgtagcaactgtgccctcttctccacaaacttggactggctggtcagcaagctggatcggctggaggcctcgtctggcatcctggaggtcctgtactgtgtcctcattgagagtccagaggttctgaacatcatccaggagaatcacatcaagtccatcatctccctcctggacaagcatgggaggaaccacaaggtcctggacgtgctatgctccctgtgtgtgtgtaatggtgtggctgtacgctccaaccaagatcttattactgagaacttgctgcctggccgtgagcttctgctgcagacaaacctcatcaactatgtcaccagcatccgccccaacatctttgtgggccgagcggaaggcaccacgcagtacagcaaatggtactttgaggtgatggtggacgaggtgactccatttctgacagctcaggccacccacttgcgggtgggctgggccctcaccgagggctacaccccctaccctggggccggcgagggctggggcggcaacggggtcggcgatgacctctattcctacggctttgatggactgcatctctggacaggacacgtggcacgcccagtgacttccccagggcagcacctcctggcccctgaagacgtgatcagctgctgcctggacctcagcgtgccgtccatctccttccgcatcaacggctgccctgtgcagggtgtctttgagtccttcaacctggacgggctcttcttccctgttgtcagcttctcggctggtgtcaaggtgcggttcctccttggtggccgccatggtgaattcaagttcctgcccccacctggctatgctccatgccatgaggctgtgctccctcgagagcgactccatcttgaacccatcaaggagtatcgacgggaggggccccgggggcctcacctggtgggccccagtcgctgcctctcacacaccgacttcgtgccctgccctgtggacactgtccagattgtcctgccgccccatctggagcgcattcgggagaagctggcggagaacatccacgagctctgggcgctaacccgcatcgagcagggctggacctacggcccggttcgggatgacaacaagaggctgcacccgtgtcttgtggacttccacagccttccagagcctgagaggaactacaacctgcagatgtctggggagacgctcaagactctgctggctctgggctgccacgtgggcatggcggatgagaaggcggaggacaacctgaagaagacaaaactccccaagacgtatatgatgagcaatgggtacaagccggctccgctggacctgagccacgtgcggctgacgccggcgcagacaacactggtggaccgtctggcagaaaatgggcacaacgtgtgggcccgagaccgcgtgggccagggctggagctacagcgcagtgcaggacatcccagcgcgccgaaaccctcggctggtgccctaccgcctgctggatgaagccaccaagcgcagcaaccgggacagcctctgccaggccgtgcgcaccctcctgggctacggctacaacatcgagcctcctgaccaggagcccagtcaggtggagaaccagtctcgttgtgaccgggtgcgcatcttccgggcagagaaatcctatacagtgcagagcggccgctggtacttcgagtttgaagcagtcaccacaggcgagatgcgcgtgggctgggcgaggcccgagctgaggcctgatgtagagctgggagctgacgagctggcctatgtcttcaatgggcaccgcggccagcgctggcacttgggcagtgaaccatttgggcgcccctggcagccgggcgatgtcgttggctgtatgatcgacctcacagagaacaccattatcttcaccctcaatggcgaggtcctcatgtctgactcaggctccgaaacagccttccgggagattgagattggggacggcttcctgcccgtctgcagcttgggacctggccaggtgggtcatctgaacctgggccaggacgtgagctctctgaggttctttgccatctgtggcctccaggaaggcttcgagccatttgccatcaacatgcagcgcccagtcaccacctggttcagcaaaggcctgccccagtttgagccagtgccccttgaacaccctcactatgaggtatcccgagtggacggcactgtggacacgcccccctgcctgcgcctgacccaccgcacctggggctcccagaacagcctggtggagatgcttttcctgcggctgagcctcccagtccagttccaccagcacttccgctgcactgcaggggccaccccgctggcacctcctggcctgcagccccccgccgaggacgaggcccgggcggcggaacccgaccctgactacgaaaacctgcgccgctcagctgggggctggagcgaggcagagaacggcaaagaagggactgcgaaggagggcgcccccgggggcaccccgcaggcggggggagaggcgcagcccgccagggcggagaatgagaaggatgccaccaccgagaagaacaagaagagaggcttcttattcaaggccaagaaggtcgccatgatgacccagccaccggccacccccacgctgccccgactccctcacgacgtggtgcctgcagacaaccgcgatgaccccgagatcatcctcaacaccaccacgtactattactccgtgagggtctttgctggacaggagcccagctgcgtgtgggcgggctgggtcacccctgactaccatcagcacgacatgagcttcgacctcagcaaggtccgggtcgtgacggtgaccatgggggatgaacaaggcaacgtccacagcagcctcaagtgtagcaactgctacatggtgtggggcggagactttgtgagtcccgggcagcagggccggatcagccacacggaccttgtcattgggtgcctggtggacttggccactggcttaatgacctttacagccaatggcaaagagagcaacacctttttccaggtggaacccaacactaagctatttcctgccgtcttcgtcctgcccacccaccagaacgtcatccagtttgagctggggaagcagaagaacatcatgccgttgtcagccgccatgttccaaagcgagcgcaagaacccggccccgcagtgcccaccgcggctggagatgcagatgctgatgccagtgtcctggagccgcatgcccaaccacttcctgcaggtggagacgaggcgtgccggcgagcggctgggctgggccgtgcagtgccaggagccgctgaccatgatggcgctgcacatccccgaggagaaccggtgcatggacatcctggagctgtcggagcgcctggacctgcagcgcttccactcgcacaccctgcgcctctaccgcgctgtgtgcgccctgggcaacaatcgcgtggcgcacgctctgtgcagccacgtagaccaagctcagctgctgcacgccctggaggacgcgcacctgccaggcccactgcgcgcaggctactatgacctcctcatcagcatccacctcgaaagtgcctgccgcagccgccgctccatgctctctgaatacatcgtgcccctcacgcctgagacccgcgccatcacgctcttccctcctggaaggagcacagaaaatggtcacccccggcatggcctgccgggagttggagtcaccacttcgctgaggcccccgcatcatttctcgcccccctgtttcgtggccgctctgccagctgctggggcagcagaggccccggcccgcctcagccctgccatcccgctggaggccctgcgggacaaggcactgaggatgctgggggaggcggtgcgcgacggtgggcagcacgctcgcgaccccgtcggggcctccgtggagttccagtttgtgcctgtgctcaagctcgtgtccaccctgctggtgatgggcatctttggcgatgaggatgtgaaacagatcttgaagatgattgagcctgaggtcttcactgaggaagaggaggaggaggacgaggaggaagagggtgaagaggaagatgaggaggagaaggaggaggatgaggaggaaacagcacaggaaaaggaagatgaggaaaaagaggaagaggaggcagcagaaggggagaaagaagaaggcttggaggaagggctgctccagatgaagttgccagagtctgtgaagttacagatgtgccacctgctggagtatttctgtgaccaagagctgcagcaccgtgtggagtccctggcagcctttgcggagcgctatgtggacaagctccaggccaaccagcggagccgctatggcctcctcataaaagccttcagcatgaccgcagcagagactgcaagacgtacccgtgagttccgctccccaccccaggaacagatcaatatgctattgcaattcaaagatggtacagatgaggaagactgtcctctccctgaagagattcgacaggatttgcttgactttcatcaagacctgctggcacactgtggaattcagctagatggagaggaggaggaaccagaggaagagaccaccctgggcagccgcctcatgagcctgttggagaaagtgcggctggtgaagaagaaggaagagaaacctgaggaggagcggtcagcagaggagagcaaaccccggtccctgcaggagctggtgtcccacatggtggtgcgctgggcccaagaggacttcgtgcagagccccgagctggtgcgggccatgttcagcctcctgcaccggcagtacgacgggctgggtgagctgctgcgtgccctgccgcgggcgtacaccatctcaccgtcctccgtggaagacaccatgagcctgctcgagtgcctcggccagatccgctcgctgctcatcgtgcagatgggcccccaggaggagaacctcatgatccagagcatcgggaacatcatgaacaacaaagtcttctaccaacacccgaacctgatgagggcgctgggcatgcacgagacggtcatggaggtcatggtcaacgtcctcgggggcggcgagtccaaggagatccgcttccccaagatggtgacaagctgctgccgcttcctctgctatttctgccgaatcagccggcagaaccagcgctccatgtttgaccacctgagctacctgctggagaacagtggcatcggcctgggcatgcagggctccacgcccctggacgtggctgctgcctccgtcattgacaacaatgagctggccttggcattgcaggagcaggacctggaaaaggttgtgtcctacctggcaggctgtggcctccagagctgccccatgcttgtggccaaagggtacccagacattggctggaacccctgtggtggagagcgctacctggacttcctgcgctttgctgtcttcgtcaacggcgagagcgtggaggagaacgccaatgtggtggtgcggctgctcatccggaagcctgagtgcttcggacccgccctgcggggtgagggtggctcagggctgctggctgccatcgaagaggccatccgcatctccgaggaccctgcgagggatggcccaggcatccgcagggaccggcggcgcgagcactttggtgaggaaccgcctgaagaaaaccgggtgcacctgggacacgccatcatgtccttctatgccgccttgatcgacctgctcggacgctgtgcaccagagatgcatctaatccaagccggcaagggtgaggccctgcggatccgcgccatcctccgctcccttgtgcccttggaggaccttgtgggcatcatcagcctcccactgcagattcccaccctgggcaaagatggggctctggtgcagccaaagatgtcagcatccttcgtgccggaccacaaggcgtccatggtgctcttcctggaccgtgtgtatggcatcgagaaccaggacttcttgctgcacgtgctggacgtggggttcctgcccgacatgagggcagccgcctcgctggacacggccactttcagcaccaccgagatggcgctggccgtgaaccgctacctgtgcctggccgtgctgccgctcatcaccaagtgtgcgccgctctttgcgggcacagaacaccgcgccatcatggtggactctatgctgcataccgtgtaccgcctgtctcggggtcgttcgctcaccaaggcgcagcgtgacgtcatcgaggactgcctcatgtcgctctgcaggtacatccgcccgtcgatgctgcagcacctgttgcgccgcctggtgttcgacgtgcccatcctcaacgagttcgccaagatgccactcaagctcctcaccaaccactatgagcgctgttggaagtactactgcctacccacgggctgggccaacttcggggtcacctcagaggaggagctgcacctcacacggaaactcttctggggcatctttgactctctggcccataagaaatacgacccggagctgtaccgcatggccatgccttgtctgtgcgccattgccggggctctgccccccgactatgtggatgcctcatactcatctaaggcagagaaaaaggccacagtggatgctgaaggcaactttgatccccggcctgtggagaccctcaatgtgatcatcccggagaagctggactccttcattaacaagtttgcggagtacacacacgagaagtgggccttcgacaagatccagaacaactggtcctatggagagaacatagacgaggagctgaagacccaccccatgctgaggccctacaagaccttttcagagaaggacaaagagatttaccgctggcccatcaaggagtccctgaaggccatgattgcctgggaatggacgatagagaaggccagggagggtgaggaggagaagacggaaaagaaaaaaacgcggaagatatcacaaagtgcccagacctatgatcctcgagaaggctacaaccctcagccccccgaccttagtgctgttaccctgtcccgggagctgcaggccatggcagaacaactggcagaaaattaccacaacacgtggggacggaagaagaagcaggagctggaagccaaaggcggtgggacccaccccctgctggtcccctacgacacgctcacggccaaggagaaggcacgagatcgagagaaggcccaggagctactgaaattcctgcagatgaatggctacgcggttacaagaggccttaaggacatggaactggactcgtcttccattgaaaagcggtttgcctttggcttcctgcagcagctgctgcgctggatggacatttctcaggagttcattgcccacctggaggctgtggtcagcagtgggcgagtggaaaagtccccacatgaacaggagattaaattctttgccaagatcctgctccctttgatcaaccagtacttcaccaaccactgcctctatttcttgtccactccggctaaagtgctgggcagcggtggccacgcctctaacaaggagaaggaaatgatcaccagcctcttctgcaaacttgctgctctcgtccgccaccgagtctctctctttgggacagacgccccagctgtggtcaactgtcttcacatcctggcccgctccctggatgccaggacagtgatgaagtcaggccctgagatcgtgaaggctggcctccgctccttcttcgagagtgcctcggaggacatcgagaagatggtggagaacctgcggctgggcaaggtgtcgcaggcgcgcacccaggtgaaaggcgtgggccagaacctcacctacaccactgtggcactgctgccggtcctcaccaccctcttccagcacatcgcccagcaccagttcggagatgacgtcatcctggacgacgtccaggtctcttgctaccgaacgctgtgcagtatctactccctgggaaccaccaagaacacttatgtggaaaagcttcggccagccctcggggagtgcctggcccgtctggcagcagccatgccggtggcgttcctggagccgcagctgaacgagtacaacgcctgctccgtgtacaccaccaagtctccgcgggagcgggccatcctggggctccccaacagtgtggaggagatgtgtcccgacatcccggtgctggagcggctcatggcagacattggggggctggccgagtcaggtgcccgctacacagagatgccgcatgtcatcgagatcacgctgcccatgctatgcagctacctgccccgatggtgggagcgcgggcccgaggcacccccttccgccctgcccgccggcgcccccccaccctgcacagctgtcacctctgaccacctcaactccctgctggggaatatcctgagaatcatcgtcaacaacctgggcattgacgaggcctcctggatgaagcggctggctgtgttcgcacagcccattgtgagccgtgcacggccggagctcctgcagtcccacttcatcccaactatcgggcggctgcgcaagagggcagggaaggtggtgtccgaggaggagcagctgcgcctggaggccaaggcggaggcccaggagggcgagctgctggtgcgggacgagttctctgtgctctgccgggacctctacgccctgtatccgctgctcatccgctacgtggacaacaacagggcgcagtggctgacggagccgaatcccagcgcggaggagctgttcaggatggtgggcgagatcttcatctactggtccaagtcccacaacttcaagcgcgaggagcagaactttgtggtccagaatgagatcaacaacatgtccttcctgactgctgacaacaaaagcaaaatggctaaggcgggagatatacagtccggtggctcggaccaggaacgcaccaagaagaagcgccggggggaccggtactctgtgcagacgtcactgatcgtggccacactgaagaagatgctgcccatcggcctgaatatgtgtgcgcccaccgaccaagacctcatcacgctggccaagacccgttacgccctgaaagacacagatgaggaggtccgggaatttctgcacaacaaccttcaccttcagggaaaggtcgaaggctccccgtctctgcgctggcagatggctctgtaccggggcgtcccgggtcgcgaggaggacgccgatgaccccgagaaaatcgtgcgcagagtccaggaagtgtcagccgtgctctactacctggaccagaccgagcacccttacaagtctaagaaggccgtgtggcacaagcttttgtccaaacagcgccggcgggcagtcgtggcctgtttccgtatgacgcccctgtacaacctgcccacgcaccgggcatgtaacatgttcctggagagctacaaggctgcatggatcctgactgaagaccacagttttgaggaccgcatgatagatgacctttcaaaagctggggagcaggaggaggaggaggaagaggtggaagagaagaagccagaccccctgcaccagttggtcctgcacttcagccgcactgccctgacggaaaagagcaaactggatgaggattacctgtacatggcctatgctgatatcatggcaaagagctgccacctggaggagggaggggagaacggtgaagctgaagaggaggttgaggtctcctttgaggagaaacagatggagaagcagaggctcttgtaccagcaagcacggctgcacacccggggggcggccgagatggtgctgcagatgatcagtgcctgcaaaggagagacaggtgccatggtgtcctccaccctgaagctgggcatctccatcctcaatggaggcaatgctgaggtccagcagaaaatgctggattatcttaaggacaagaaggaagttggcttcttccagagtatccaggcactgatgcaaacatgcagcgtcctggatctcaatgcctttgagagacaaaacaaggccgaggggctgggcatggtgaatgaggatggcactgtcatcaatcgccagaacggagagaaggtcatggcggatgatgaattcacacaagacctgttccgattcctacaattgctctgtgaggggcacaataatgatttccagaactacctacggacacagacagggaacacgaccactattaacatcatcatttgcactgtggactacctcctgcggctgcaggaatccatcagcgacttctactggtactactcgggcaaggatgtcattgaagagcagggcaagaggaacttctccaaagccatgtcggtggctaagcaggtgttcaacagcctcactgagtacatccagggtccctgcaccgggaaccagcagagcctggcgcacagtcgcctatgggacgcagtggtgggattcctgcacgtgttcgcccacatgatgatgaagctcgctcaggactcaagccagatcgagctgctgaaggagctgctggatctgcagaaggacatggtggtgatgttgctgtcgctactagaagggaacgtggtgaacggcatgatcgcccggcagatggtggacatgctcgtggaatcctcatccaatgtggagatgatcctcaagttcttcgacatgttcctgaaactcaaggacattgtgggctctgaagccttccaggactacgtaacggatccccgtggcctcatctccaagaaggacttccagaaggccatggacagccagaagcagttcagcggtccagaaatccagttcctgctttcgtgctccgaagcggatgagaacgaaatgatcaactgcgaagagttcgccaaccgcttccaggagccagcacgcgacatcggcttcaacgtggcggtgctgctgaccaacctgtcggagcatgtgccgcatgaccctcgcctgcacaacttcctggagctggccgagagcatccttgagtacttccgcccctacctgggccgcatcgagatcatgggcgcgtcacgccgcatcgagcgcatctacttcgagatctcagagaccaaccgcgcccagtgggagatgccccaggtgaaggagtccaagcgccagttcatcttcgacgtggtgaacgagggcggcgaggctgagaagatggagctcttcgtgagtttctgcgaggacaccatcttcgagatgcagatcgccgcgcagatctcggagcccgagggcgagccggagaccgacgaggacgagggcgcgggcgcggcggaggcgggcgcggaaggcgcggaggagggcgcggcggggctcgagggcacggcggccacggcggcggcgggggcgacggcgcgggttgtggcggccgcaggccgggccctgcgaggcctcagctaccgcagcctgcggcggcgcgtgcggcggctgcggcggcttacggcccgcgaggcggccaccgcagtggcggcgctgctctgggcagcagtgacgcgcgctggggccgctggcgcgggggcggcggcgggcgcgctgggcctgctctggggctcgctgttcggcggcggcctggtggagggcgccaagaaggtgacggtgaccgagctcctggcaggcatgcccgaccccaccagcgacgaggtgcacggcgagcagccggccgggccgggcggagacgcagacggcgagggtgccagcgagggcgctggagacgccgcggagggcgctggagacgaggaggaggcggtgcacgaggccgggccgggcggtgccgacggggcggtggccgtgaccgatgggggccccttccggcccgaaggggctggcggtctcggggacatgggggacacgacgcctgcggaaccgcccacacccgagggctctcccatcctcaagaggaaattgggggtggatggagtggaggaggagctcccgccagagccagagcccgagccggaaccagagctggagccggagaaagccgatgccgagaatggggagaaggaagaagttcccgagcccacaccagagccccccaagaagcaagcacctccctcaccccctccaaagaaggaggaagctggaggcgaattctggggagaactggaggtgcagagggtgaagttcctgaactacctgtcccggaacttttacaccctgcggttccttgccctcttcttggcatttgccatcaacttcatcttgctgttttataaggtctcagactctccaccaggggaggacgacatggaaggctcagctgctggggatgtgtcaggtgcaggctctggtggcagctctggctggggcttgggggccggagaggaggcagagggcgatgaggatgagaacatggtgtactacttcctggaggaaagcacaggctacatggaacccgccctgcggtgtctgagcctcctgcatacactggtggcctttctctgcatcattggctataattgtctcaaggtgcccctggtaatctttaagcgggagaaggagctggcccggaagctggagtttgatggcctgtacatcacggagcagcctgaggacgatgacgtgaaggggcagtgggaccgactggtgctcaacacgccgtctttccctagcaactactgggacaagtttgtcaagcgcaaggtcctggacaaacatggggacatctacgggcgggagcggattgctgagctactgggcatggacctggccacactagagatcacagcccacaatgagcgcaagcccaacccgccgccagggctgctgacctggctcatgtccatcgatgtcaagtaccagatctggaagttcggggtcatcttcacagacaactccttcctgtacctgggctggtatatggtgatgtccctcttgggacactacaacaacttcttctttgctgcccatctcctggacatcgccatgggggtcaagacgctgcgcaccatcctgtcctctgtcacccacaatgggaaacagctggtgatgaccgtgggccttctggcggtggtcgtctacctgtacaccgtggtggccttcaacttcttccgcaagttctacaacaagagcgaggatgaggatgaacctgacatgaagtgtgatgacatgatgacgtgttacctgtttcacatgtacgtgggtgtccgggctggcggaggcattggggacgagatcgaggaccccgcgggtgacgaatacgagctctacagggtggtcttcgacatcaccttcttcttcttcgtcatcgtcatcctgttggccatcatccagggtctgatcatcgacgcttttggtgagctccgagaccaacaagagcaagtgaaggaggatatggagaccaagtgcttcatctgtggaatcggcagtgactactttgatacgacaccgcatggcttcgagactcacacgctggaggagcacaacctggccaattacatgtttttcctgatgtatttgataaacaaggatgagacagaacacacgggtcaggagtcttatgtctggaagatgtaccaagagagatgttgggatttcttcccagctggtgattgtttccgtaagcagtatgaggaccagcttagctgacacacccccagctggccctccacccccacctcaagtgccttattctcacagcaagccccttagtccccaagcccctccccctaaggcagctgggggagaggtgacctagtac

SEQ ID NO: 4961 - DNA, 954 bp, Homo sapiens
  SIMILAR (638)..(688): 1001254mologous to Sus scrofa ryanodine receptor 1,accession number X69465,Smith-Waterman Score=88.
atggcgctggcgctgaaccgctacctgtgctggccgtgctgccgctcatcaccaagtgtgcgccgctctttgcgggcacgaacaccgcgccatcatggtggactctatgctgcataccgtgtaccgccgtctcggggtcgttcgctcaccaaggcgcagcgtgacgtcatcgaggacgcctcatgtcgctctgcagcactgttgcgccgcctggtgttcgacgtgcccatcctcaacgagttcgccaaatgccactcaagctcctcaccaaccactatgagcgctgttggaagtactatgcctacccacgggctgggccaacttcggggtcacctcagaggaggagcgcacctcacacggaaactcttctggggcatctttgactctctggcccatagaaatacgaccggagctgtaccgcatggccatgccttgtctgtgcgccattgccggggcttgccccccgactatgtggatgcctcatactcatctaaggcagagaaaaagccacagtggatgctgaaggcaactttgatccccggcctgtggagaccccaatgtgacatcccggagaagctggactccttcattaacaagtttgcggagtacacaacgagaagtgggccttcgacaaggaaaagagatttaccgctggcccatcaaggagtccctgaaggccatgattgctgggaatggacgatagagaaggccagggaggacctagatcctcgagaaggctacaaccctcagccccccgaccttagtgctgttacctgtcccgggagctgcaggccatggcagaacaactggcagaaaattaccacaacagtggggacggaagaagaagcaggagctggaagccaaaggcggtgggacccaccccctgctggtccccacgacacgctcacggccaaggagaaggcacgagatcgagagaaggcccagagctactga

SEQ ID NO: 4962 - DNA, 478 bp, Homo sapiens
  SIMILAR (183)..(76): 591254mologous to Homo sapiens Human secreted protein, SEQ ID NO: 7771,accession number G03690,Smith-Waterman Score=115.
gttctcagtggaatttttctttaataaaaagcagcccctaaaacatttctaacaaaaagcaccctgagaaatcaagctgcaaacatagataagcaagctagaagtttgcataggtaaatgccggcagctatgtcagaagccaggtacattcaacatggaggatatctcctctcttctctttgtcgcccccgtgtgtgggtgtcatggcaacggccaggtaaaccccatttgcataataaaagattcacgggctatgtaaatggcacacctgacacctggtcaatccaatctcctgggccctatgtgaatcaaatacggcctccttaagcccctctataaaatggaccacatctctccccaaacccagaaatccgcttgaacatccccttcctctgcatgaggaagcgcgctctctctctccctcctttcttttgcctattaaactttacgctcttaaacccaaaaaaaaaaaaaaaaa

SEQ ID NO: 4963 - DNA, 623 bp, Homo sapiens
  SIMILAR (237)..(392): 921254mologous to Mus musculus SOX5,accession number AB006330,Smith-Waterman Score=248.
cggggctccgaggagcttgtctgagaaagaaaggcaactcatgggtatgatcaaccagctgagcagcttccgagagcagctgttgcatgcccactatgagcaaaagaaactagctgcctctcagattgagaaacagcgtcagcatatgaagctgggcaagcaggcagcaagaacaaattgcaagacagcagcagcggcttatacagcaacaacacaaaatcaatttgctccagcaacagatccagcagttatatgctgcccagctagctgcaatgcaggtatctccaggagggaagctgccaggcataccccaaggcaaccttggtgctgctgtatctcctaccagcattcacacagacaagagcacaaacagcccaccacccaaaagcaagacttgctgtttgttactgtgggaggatgaacactctgcatctattcctgaggtcaccaaccagcaaatacatctccatctggcaagttctatcacagaccatgggggcaaagtgatttgggaaaggtgcctagaggaaagtgggaagggtgtcactggatttccagactggagtccccgttggggaagaattcctcctgaagggagtaaggaagggtttactaaggaatag

SEQ ID NO: 4964 - DNA, 512 bp, Homo sapiens
  SIMILAR (353)..(439): 361254mologous to Homo sapiens kappa B and V(D)J recombination signal sequences binding protein,accession number AF278765,Smith-Waterman Score=48.
cagaagaggccctcaagaagaagaggaagccccagaagccaggcaagtacatctgccagtactgcagccggccctgtgccaagcccagcgtgctccagaagcacattcgctcacacacaggtgagaggccctacccctgcggcccctgtggcttctccttcaagaccaagagtaatctctacaagcacaggaagtcccatgcccaccgcatcaaagcaggcctggcctcaggcatgggtggcgagatgtacccacatgggctggagatggagcggatccctggggaagagtttgaggagcccactgagggagaaagcacagattctgaagaggagactagtgccacctctggtcaccctgcagagctctccccaagacccaagcagccccttctctccagcgggctatacagctctgggagccacagttccagccacgaacgctgttccctgtcacagtccagcacagcccagtcactcgaagaccccccactgtatgcggccgctctagag

SEQ ID NO: 4965 - DNA, 645 bp, Homo sapiens
  SIMILAR (37)..(579): 721254mologous to Homo sapiens kappa B and V(D)J recombination signal sequences binding protein,accession number AF278765,Smith-Waterman Score=634.
atgcatgcacagacctatgcacacacggacacacgggcacagccatgcacaagcatggagaagcaggtctccttgaagcccacagaagaggcacacaagaaggagaggaagccccagaagccaggcaagtacatctgccagtactgcagccggccctgtgcaagcccagcgtgctccagaagcacattcgctcacacacaggctatgggtggcgagatgtacccacatgggctggagatggagcggatccctggggaagagtttgaggagcccactgagggagaaagcacagattctgaagaggagactagtgccacctctggtcaccctgcagagctctccccaagacccaagcagccccttctctccagcgggctatacagctctgggagccacagttccagccacgaacgctgttccctgtcccagtccagcacagcccagtcactcgaagacccccctccatttgtggaaccctcatctgagcaccccctgagccataaacctgaagacacccacacgattaagcagaagctggccctccgcttaagcgagaggaagaagcaccaagtgatcgacaggctgggcagtggcatcctggcaggcctgtcctggcagctgctcccacaaggcgaggccctgtga

SEQ ID NO: 4966 - DNA, 1023 bp, Homo sapiens
  SIMILAR (451)..(1020): 801254mologous to Homo sapiens Human secreted protein clone qg596_12 protein sequence SEQ ID NO:16,accession number Y94905,Smith-Waterman Score=782.
atggcagcccaccactccagcccactcaagatgcagaataaagctcataaaagtgggcagcatcggggtcggggatctgcacagcaggatggcaagggccatctagcactgaaaaccctaagcaagaaggtgagaaaagaactcagcagagtagaccagaggcattccgccagtcagctccaaaagcagaagaaggaggtggttctggcggagaagagacagctggcactagctgtccagggattatctggcctcccactgaagaaacaaatagatgccagaaagaagctaagtaaagcagtggagaagcactttctggatgacaaactcctcttgttagacactcaacaggaggcagggatgctgcttaggcagttggctaaccagaagcaatggcatcttgcttttcgagatcagcaggcctacctatttgcccatactgctgattttgttcctagtgaagagaataagttgaagatgtcagtattgaatatggtggtgaggcatgaccctggcagcactgaatctgcgaaagccaaggaggagctcatattccgctgtagatccaggcacttccgagcctcacctttattctctcagcatgctgcagcagacaaacataaatttcagagattcctgactgctgatatggccctggcggtgacagtatacgcaccaaccacttttcctccttcatctttgctgcttttcaagcagaaaagcaatggaatgcacaatctcattgctacaggccatcttttgctggtggatccaaacagaatggtcatcaagagagttgtcctgagtgatcctcctttcaaaatttgtactaagatggcagtggtatgttacatgttcttcaatagagaggatgtgcagtggtttaaaccagtagaactgagaacaaagtggagccgcagaggacacatccaggagccttcaggtacccatggccgcatgaagtgcagctttgataggaagctaaaatctcagaacacagaactgatgaacctttacaaatga

SEQ ID NO: 4967 - DNA, 1126 bp, Homo sapiens
  SIMILAR (1)..(843): 721254mologous to Homo sapiens antigen of the monoclonal antibody Ki-67,accession number X65551,Smith-Waterman Score=970.
gaaaaggcgcaagccctagaagacctggctggcttcaaagacccagcaccaggtcatactgaagaatcaatgactcatgacaaaaccaccaaaataccctgcaaatcaccaccagaactagtagacactgcaacaagctcaaagaaatggcccagggcttgtggccagaaagtagaagtgaaagaagagctattagcagtcggcaagctcacacaaacatcaggggagaccacgcacaccaataaagaaccagaaggtgagggcaaaggcatgaaagcatttaagcaacctgcaaagcagaagctggacccagaaaatgtaactggcagcaggagattgccaagagtgcccaaggaaaaggcccaacccctagaagatctggccagcttccaagagctctctcaaacaccaggccacactgaggaactggcaaatggtgctgatagctttacaagtgctccaaagcaagcacctgacagtggaaaacctctaaaaatatccagaagagttcttcaggcccctaaagtagaacccgtgggagacctggtaggcaccagagactgtaaaatcacaaagcaaaagcaacacctccctgcccccactgcccttcaagaggggatgtggaaaagatggaagtgtcacaggaaccaagaggccgcactgcatgcctgcaccagaggaaatcatagaggagctgccagccagcaagaagcagagagggttgctcccagggtgagaggcaaatcacccgaacccttggtcatcatgaagagaagtctgaggacttctgcaaaaagaattgaacctgcagaagatctgaacagcaataacatgaaaaccaacaattagggtggtgatgatgatcttatgtctatacccactgaactctgtgtgaggtgccatgtcccagtgccccaggctggtcctggggtgctaaagaggaatgtgccgttacaggaatcattgaccttcaaggacgtgtttgtggacttcaccctggaggagtggcagcaacaggggtgggcctaggttctggaattcctcagcattaataacaaagtcctatgtcatgtcccctaaacagggcatctagttgggaagccagatgtgatcttcaggttgggac

SEQ ID NO: 4968 - DNA, 1094 bp, Homo sapiens
  SIMILAR (672)..(1094): 851254mologous to Homo sapiens antigen of the monoclonal antibody Ki-67,accession number X65551,Smith-Waterman Score=592.
ccgcatgaattcggcacgaggaagaatcaatgactgatgacaaaaccactattataccctgcaaatcatcaccagaactagaagacaccgcaacaagctcaaagagacggcccaggacacgtgcccagaaagtagaagtgaaggaggagctgttagcagttggcaagctcacacaaacctcaggggagagcacgcacaccgacaaagagccggtaggtgagggcaaaaggcacgaaagcatttaagcaacctgcaaagcggaagctggacgcagaagatgtaattggcagcaggagacagccaagagcacctaaggaaaaggcccaacccctggaagatctggccagcttccaagagctctctcaaacaccaggccacactgaggaactggcaaatggtgctgctgatagctttacaagcgctccaaagcaaacacctgacagtggaaaacctctaaaaatatccagaagagttcttcgggcccctaaagtagaacccgtgggagacgtggtaagcaccagagaccctgtaaaatcacaaagcaaaagcaacacttccctgcccccactgcccttcaagaggggaggtggcaaagatggaagcgtcacgggaacctaagaggctgcgctgcatgccagcaccagaggaaattgtggaggagctgccaacccagcaagaagcagagggttcgctcccagggcaagaggcaaatcatccgaacccgtggtcatcatgaaggagaagtttgtaggacttctgcaaaaagaattgaacctgcggaagagctgaacagcaacgacatgaaaaccaacaaagaggaacacaaattacaagactcggtccctgaaaataagggaatatccctgcgctccagacgccaaaataagactgaggcagaacagcaaataactgaggtctttgtattagcagaaagaatagaaataaacagaaatgaaaagaagcccatgaagacctccccagagatggacattcagaatccagatgatggagcccggaaacccatacctagagacaaagtcactgagaacaaaaggtgcttgaggtctgctagacagaatgagagctcccagcct

SEQ ID NO: 4969 - DNA, 459 bp, Homo sapiens
  SIMILAR (298)..(402): 801254mologous to Homo sapiens envelope protein precursor,accession number AF072506,Smith-Waterman Score=143.
atggccaaaccctggagggccctgtgcatcctgctgagaagcctagattcttttcttcagctctcagcttcactcacctgctttggatttatgcacaacacctacaaaaataggccatggggagtactgaggagctccacggagaggagccccagaaaagggactgcaggagacatgagggctggtggaagatttaatgctccactaataggtcaagacttgctgtttaaagaacactttgcttctaaggccctcgacacatgtactaacattgcacgcagtgcaaaaacccaaggaggtcctgtggcagccatcttgctgttactcgcctttgggccctgtatctttaaccttcgtgtcaaatttgtttcttctagaatcaaggccatcaagctacagatggtcttaccatctaccgaggacccctggaccgacccgctggcccttccactggcctaa

SEQ ID NO: 4970 - DNA, 828 bp, Homo sapiens
  SIMILAR (142)..(813): 891254mologous to Homo sapiens putative p150,accession number U93563,Smith-Waterman Score=1021.
atgtcaaataacggcctagacattcaagacaaacccccagcccctccgatgagaaataccagcactatgattggagccggcagcaaagatgctggaaccctaaaccatggttctaaacctctgcctccaaacccagaggagaagaaaaagaaggaccgattttaccgatccattttacctggagataaaaaactagaaaagcaagagcaaacacattcaaaagctagcagaaggcaagaaataactaagatcagagcagaactgaaggaaatagagacacaaaaaacccttcaaaaaattaatgaatccaggagctggttttttgaaaggatcaacaaaattgatagaccgctagcaagactaataaagaagaaaagagagaagaatcaaatagacgcaatcaaaaatgataaaggggagatcaccaccgatcccacagaaatacaaactaccatcagagaatactataaacacctctatgcaaatcaactagaaaatctagaagaaatggataaattcctcgacacatacatcctcccaagactaaaccaggaagaagctgaatctctgaatagaccaataacaggatctgaaattgaggcaataatcaatagcttaccaaccaaaaagagtccaggaccagatggattcacagccgaattgtaccagaggtacaaggaggaaatggtaccattccttctgaaactattccaatcaacagaaaaagagggaatcctccctaactcattttatgaggccagcatcatcctgataccaaagcctggcagagacacaacaaaaaaagagaattttagccaatatccttga

SEQ ID NO: 4971 - DNA, 476 bp, Homo sapiens
  SIMILAR (239)..(415): 941254mologous to Homo sapiens ribosomal protein L5,accession number U14966,Smith-Waterman Score=279.
  misc_feature (1)...(476): n = a,t,c or g
cgcggnngttttaaactgattgcgtggcattcgcacgagaagatctatgaaggccaagtggaggtgactggtgatgaatacaatgtggaaagcattgatggtcagccaggtgccttcacctgctatttggatgcaggccttgccagaactaccactggcaataaagtttttggtgccctgaagggagctgtggatggaggcttgtctatccctcacagtaccaaacgattccctggttatgattctgaaagctcatgctgctatacgagagaatccagtctatgaaaagaagcccaagaaagaagttaaaaagaagaggtggaaccgtcccaaaatgtcccttgctcagaagaaggatcgggtagctcaaaagaaggcaagcttcctcagagctcangagcgggctgctgagagctaaacccagcaattttctatgattttttcagatatagataataaacttatgaacagcaaaa

SEQ ID NO: 4972 - DNA, 452 bp, Homo sapiens
  SIMILAR (23)..(211): 961254mologous to Homo sapiens MSTP030,accession number AF113210,Smith-Waterman Score=321.
  misc_feature (1)...(452): n = a,t,c or g
gttaaaattaattncaccacaccccaattacaggatgatagttcgtgtgacaaacagagatatcatttgtcagattgcttatgcccgtatagagggggatatgatagtctgcgcagcgtatgcacacgaactgccaaaatatggtgtgaaggttggcctgacaaattatgctgcagcatattgtactggcctgctgctggcccgcaggatggaggagatgtataagaaagctcatgctgctatacgagagaatccagtctatgaaaagaagcccaagaaagaagttaaaaagaagaggtggaaccgtcccaaaatgtcccttgctcagaagaaggatcgggtagctcaaaagaaggcaagcttcctcagagctcaggagcgggctgctgagagctaaacccagcaattttctatgattttttcagatatagataataaacttatgaacagca

SEQ ID NO: 4973 - DNA, 88 bp, Homo sapiens
  SIMILAR (1)..(69): 951254mologous to Mus musculus ribosomal protein L5,accession number X83590,Smith-Waterman Score=115.
  misc_feature (1)...(88): n = a,t,c or g
atggaggagatgtataagaaagctcatgctgctatactagagaatccagtctatgaaaagaagcccaagnnnnnnnnnnnnnnnnngg

SEQ ID NO: 4974 - DNA, 1257 bp, Homo sapiens
  SIMILAR (1)..(336): 681254mologous to Xenopus laevis L5b ribosomal protein,accession number M29033,Smith-Waterman Score=339.
  misc_feature (1)...(1257): n = a,t,c or g
atggggtttgttaaagttgttaagaataaggcctactttaagagataccaagtgaaatttagaagacgacgagagggtaaaactgattattatgctcggaaacgcttggtgatacaagataaaaataaatacaacacacccaaatacaggatgatagttcgtgtgacaaacagagattatcatttgccagattgcttatgcccgtatagaggggattatgatagtctgcgcagcgtatgcacccgaactgccaaaataatggtgtgaagggttggcctgacaaattatgctgcagccatattgtactggcctgctggctgggcccgcaggcttcttccataggtttggcatggacaaattctatgaaggcccaagtggaggtgactggtgatgaatacaatgtggaaagcattgatggtcagccagggtgccttcaccctgcctattgggatgccaggcccttgcccagaacctccccactggccattaaagttttttggttgccctgaaggggagcctgtggatggagggcttgtcctattccctccacagtacccaaaccgatttccctggttatggattcctgaaagccaagggaatttaaatgccagaaggtaccatcgggaaggcaccatccatgggcccagaattgttgcaggattacatgcgcctaccttaatggaagaagatgaagatgccttacaagaaacagttcgtgcgtcaatacgtaaagaacagcggtaactccagacattgatggaggagatgtataagaaagctcatgctgctatacgaggagaatccagtctatgaaaagaagcccaagaaagaagtttaaaagaaaaaggtggaaccgttcccaaaatgtcccttgctcagaagaaagatcgggtagctcaaaagaaagcaagccccctcaagagctcaggagcgggctgctgagaagctaaaccaaacaattttctataaagatttttcagatatcgctaactaaacttatgaacagccnnnnnnnnnnnnggggggggccctttaaaaagatcccttgggggggcccaagtttacgcgggcttgcaaggttatagctctctccttatggggagccttattatatcctatctggggatttttgggaaggacccttactttgggggggggacatcttggtccaaccttcctcgggagattaatcgcttaggggaatcctaaatttttaaaggggttagggggataatatattgattttttctggggggg

SEQ ID NO: 4975 - DNA, 308 bp, Homo sapiens; identical to SEQ ID NO: 2076
  SIMILAR (2)..(79): 961254mologous to Homo sapiens hypothetical protein,accession number AL133109,Smith-Waterman Score=123.
  misc_feature (1)...(308): n = a,t,c or g

SEQ ID NO: 4976 - DNA, 371 bp, Homo sapiens; identical to SEQ ID NO: 2077
  SIMILAR (2)..(259): 791254mologous to Homo sapiens KIAA1002 protein,accession number AB023219,Smith-Waterman Score=368.
  misc_feature (1)...(371): n = a,t,c or g

SEQ ID NO: 4977 - DNA, 1488 bp, Homo sapiens; identical to SEQ ID NO: 2080
  SIMILAR (757)..(1017): 741254mologous to Homo sapiens KIAA1002 protein,accession number AB023219,Smith-Waterman Score=363.

SEQ ID NO: 4978 - DNA, 1942 bp, Homo sapiens
  SIMILAR (764)..(1609): 831254mologous to Homo sapiens hypothetical protein,accession number AL133109,Smith-Waterman Score=1193.
acagggacaggatgatacttttgaaaatggagcaggaaattattgatttcattgctgacaacaataatcattataaaaagttccctcagatgtcatcgtatcagaggatgcttgtccatcgagtggcagcttattttggattggatcacaatgtggatcaaacaggaaaatctgttatcatcaacaagaccagcagcaccagaataccagagcaaaggttttgtgaacatttaaaagatgaaaaaggtgaagaatcccagaagcggtttatcttgaagcgagataactctagtattgataaagaagacaatcagtcagtttgctcccaggaaagcctttttgtggaaaacagtaggctcttggaagacagtaacatatgcaatgagacctataagaaaagacagctctttcggggcaacagagatggctcagggagaacatctgggagtcgacagagcagctcagaaaatgaactcaagtggtctgaccaccaaagggcctggagcagcacagactccgacagttccaaccgcaatctaaagcccgccatgaccaagacggcgagttttgggggcatcacggtgctgaccaggggtgacagcacttccagtactaggagtaccgggaagctgtccaaagcaggttccgagtcttccagcagtgcaggctcctcaggatcgctgtcccgcacccatccacctctccagagcacacccctagtcgcagggtgtggcagctggctctccaggctgtgtgccttagtccagagaatggaatagggggccaggttgctcccagcagcaccagctacatcctccttccacttgaagctgcaacaggcatcccgcctggaagcatccttcttaatccacacacaggccagccctttgtgaatcccgatggaactcctgcaatatacaacccacccaccagtcagcagcccctgcgaagcgccatggtggggcagtcccaacagcagccgccacagcagcagccctccccgcagccccaacagcaggtccagccaccgcagccacagatggcaggccctctggtcactcagagtataccagcaaagaaggaactgaatgccttcagagttagaaatcaggaacagagagatacaggaactttgcatgagggttcgggaaagatctcaaggatggtgttgggatgggaaccattatcaccctatgctcctgatagagatgatgtggcaacacagtttggccagatgaccctgagccggcagtcctcgggggagactcctgaacccccatcaggtcctgtctacccatcctcccttatgccacagccggcccagcagcccagctatgtaatcgcctctacaggccagcagcttcctacaggaggattctcaggctctggccctcccatctcccagcaggtcctccagccccctccctcaccacagggatttgtgcaacagcctccgcctgcacagatgcctgtatattattacccatctggtcagtaccctacctcaaccacgcaacagtaccggcccatggccccggttcagtacaacgctcagaggagtcaacagatgccacaggcagcacagcaagcagtactggaagtgctgtcacccctggtcagcaccgtgatgcccccaaaactcgccgtcttggtcatggcgggctttagattgcggttggaactgtcggagtctgtgctgctccaggccctttggtggtcagaccacttgagttcattttctgagctgctctgtcgactcccagatgttctccctgagccatctctgttgcccctggagtacgaccaccagaaagatgcacagggacaggattaccttacatgcatggtgttggttactctcctactggaatcacctactggaatccaggaagatgatagtaatgagatatctgtcattggagctgggccctcttgtaagtaa

SEQ ID NO: 4979 - DNA, 1356 bp, Homo sapiens
  SIMILAR (3)..(56): 831254mologous to Homo sapiens Lim kinase,accession number AC002073,Smith-Waterman Score=86.
atggggatgcatacgccctggtgctgcgtgtcaccctatactgtggaaagtgccacaaatgaggtggtgctggcacccatatttgagatactctccacagagtccattcaggaccagctgccctactctgtcatgctcatgtccatgctggccatcacagagggcaggcggagcttctccgtgtccgtggagaatgcctgctccaactatgttaccaccgtgcaagtaaaagaggtcaaccagatgcacatcagtcccaacagctgcaatgccatccaccccagggaccacatcctggagatcagtggaacccccacccacacactccaagtagaggagttggaggatgcaattagccagatgagccagacacttctgctgttgattgaacatgaccctgtctcccggtccccagcccagctgcggctggatgcctggctctctccccacacacagaatgctggacaccctcacgccctcagcaccctggacaccaaggataatctggaggggacactgagaagatgctccctaagactcagtaacagcatctccaagtcccctagccctagctctccaaaggagcccctgctgctcagccgtgacatcagctgctgggaatccctttgttgttccagcacttactcaaagcagaacttccggtcctgtgacctgatccacggggaggtcctggggaagggcttctttgggcaggctatcaaagtgacacacaaagccacaggcaaagtgttggtcatgaaggaattaatgcgatgtgatgaggagaaccagaagacttttctgactgaagtgaaagtgacactgccctccaaccttcttccccctggccatgatctactgcagactggagcccgagagcagactggcattctcaaaactggaggactctctgtacctgggggagctgggcatcccgccgcctgtagggctggaggagttggaccacactgtgagcatgcagtacggcctgatccaagactcaccccactagccctggcccagccccctgcaggggggtgttccacagccagcattgctcctctgttctccatccctgctgtgagcagggtttttcgggcttcccgtggattggcagcttgtttagaagcagaacaagccggcaggactatacttacatgtgaagtttgcaagcttgttgtagggttgagcctggactcccagcagcagctcagttcagtattgtgtggctggttgtgcctcagctgtccccaactgtggtctttgaaccggcatccccagcatcagcatcaccttgtagaaatgcaaaatctcaagtctcatcccagacctggtgaaacagaatctgccctttaa

SEQ ID NO: 4980 - DNA, 588 bp, Homo sapiens
  SIMILAR (530)..(586): 941254mologous to Homo sapiens STE20-like kinase 3,accession number AF024636,Smith-Waterman Score=101.
atggaatatcctgatggaggctccacactagatctgttagaacctggcccgttagatgaaacccagatcattactatattaagagaaatactgaaaggacttgattacctccattcggagaagaaaatccatagaggtgttaaagcggccaacgtcctgctgtctgagcactgcgaggtgaagctggtggactttggcatggctggccaactggcagacacccagaccaaaaggaacacttttgtgggcaccccgttctggatagcacccgagaacaacccaccaacgttggaagaaaactacagtaaacccctcaaggagtttgtggaggcctgtttgaataaagagctgagctttagacccactgctaaggagttattgaagcacaagtttatactacgcgatacaaagaaaacttcctacttgaccgagctcatcgacaggtataagagatggagggcaaagcagagccaagaagactcgagctccgaggattccaactcggaaacagatggccaagactcagtggggcagcgattctggggactggatcttcacaatccaagaaaaagatcccaagaatcttga

SEQ ID NO: 4981 - DNA, 1431 bp, Homo sapiens
  SIMILAR (605)..(1246): 521254mologous to Homo sapiens Human MST3 protein,accession number Y55950,Smith-Waterman Score=496.
ggcccgcgggcctcgccgccccgcgcggatcgtcgcggcccggccgtcccgtcccaggaagtggccgtcctgagcgccatggctcactccccggtgcagtcgggcctgcccggcatgcagaacctaaaggcagacccagaagagctttttacaaaactagagaaaattgggaagggctcctttggagaggtgttcaaaggcattgacaatcggactcagaaagtggttgccataaagatcattgatctggaagaagctgaagatgagatagaggacattcaacaagaaatcacagtgctgagtcagtgtgacagtccatatgtaaccaaatattatggatcctatctgaaggatacaaaattatggataataatggaatatcttggtggaggctccgcactagatctattagaacctggcccattagatgaaacccagatcgctactatattaagagaaatactgaaaggactcgattatctccattcggagaagaaaatccacagagacattaaagcggccaacgtcctgctgtctgagcatggcgaggtgaagctggcggactttggcgtggctggccagctgacagacacccagatcaaaaggaacaccttcgtgggcaccccattctggatggtttcccgaggtcatcaaacaggcgggctatgactcgaaggcagacatctggtccctgggcataacagctattgaacttgcaagaggggaaccacctcattccgagctgcaccccatgaaagttttattcctcattccaaagaacaacccaccgacgttggaaggaaactacagtaaacccctcaaggagtttgtggaggcctgtttgaataaggagccgagctttatacccactgctaaggagttattgaagcacaagtttatactacgcaatgcaaagtaaaacttcctacttgaccgagctcatcgacaggtacaagagtatggaaggccgagcagagccatgacgactcgagctccgagggattccgacgcggaggacagatggccaagcctcggggggcagtgattctggggactggatcttcacaatccgagaaaaagatcccaagaatctcgagaatggagctcttcagccatcggacttggacagaaataagatgaaagacatcccaaagaggcctttctctcagtggttatctacaattatttctcctctgtttgcagagttgaaggagaagagccagggcttgcggaggggaacttgggggtccattgaaggagctgcgaggggccatctacctagcggaggaggcgtgccctggcatctccgacaccatggtggcccagctcgtgcagcggctccagagatactctctaagtggtggaggaacttcatcccactgaaattcctttggcatttgggggtttgtttttccttttttccttcttcat

SEQ ID NO: 4982 - DNA, 375 bp, Homo sapiens; identical to SEQ ID NO: 4591
  SIMILAR (4)..(246): 711254mologous to Homo sapiens TAXREB107,accession number D17554,Smith-Waterman Score=276.

SEQ ID NO: 4983 - DNA, 599 bp, Homo sapiens
  SIMILAR (95)..(595): 431254mologous to Homo sapiens TAXREB107,accession number D17554,Smith-Waterman Score=275.
  misc_feature (1)...(599): n = a,t,c or g
agagtctcattctgtaggccaggccggaggacgggaatgagaaaggccatgtacaagaggaagtagtcagccgctaaatccgagatggcgggtgaaaaagttgagaagccagatactaaagagaagaaacccgaagccaagaaggttgatgctggtggcaaggtgaaaaagggtaacctcaaagctaaaaagcccaagaaggggaagccccattgcagccgcaaccctgtccttgtcagaggaattggcaggtattcccgatctgccatgtattccagaaaggccatgtacaaaaaggaagtactcagccgctaaatccaaggttgaaaagaaaaagaaggagaaggttctccgcaacttgttacaaaaccaagttggtggtgacaagaaccggcggtacccgggggggntaaacttccgcaaaatgcctagaatataatcctactgaaagatgtgcctccgaaagctgttgagccacgggcaaaaaaaccctttcagtcagcacgttgagaaaaactgcgagccagcattacccccgggaccattctgattcatcctcactggacgccacaggggcaagagggtggttttcctgaacc

SEQ ID NO: 4984 - DNA, 357 bp, Homo sapiens
  SIMILAR (151)..(74): 501254mologous to Drosophila melanogaster CG8009 gene product,accession number AE003547,Smith-Waterman Score=73.
ctttatcattaacaaagcactacaatatccattatctcatttaattatgctaatgattttaaaacaaaacttctaccttttgtgtctcagggtctattaaccagttccaggcaccagtagctgtacagacagataccactataagaagcactgatgaaagataaacacgaaattagtaagcaaatacatacttaatatgtgatactatcaccaccagttcctactaaatgacaaccaaagaatatagcactttattaaatggaaaatgcactaactagactcaggaattagaaggcttgccatctggcttcgaggaattctcttaaacattgtgaaccttagtaattaaggatactg

SEQ ID NO: 4985 - DNA, 888 bp, Homo sapiens
  SIMILAR (107)..(448): 591254mologous to Drosophila melanogaster CG8009 gene product,accession number AE003547,Smith-Waterman Score=363.
cttgaggaccgtgccggacctcccgggacgacgatttcgtgcgatgcggacagggcagcggcggtgacccgagctgccgcccgacatgaactcgctggagcaggcggaagatctcaaggcttttgagaggagacttactgaatatattcattgtttgcaacctgctactggacgctggagaatgcttcttatagtggtatctgtctgtacagctactggtgcctggaactggttaatagaccctgagacacaaaaggtgtccttcttcacatcattatggaatcacccatttttcaccattagctgtatcactctaataggcttgttctttgctggaatacacaagagagtagttgcaccatcaattatagctgctcgatgtcgaacggtattagcagaatacaatatgtcttgtgatgatacaggaaaactaattttgaaacctaggcctcatgttcaatgacaatcttcactcattgttatgggacttagaatagcctttcttcgaataagtgatacagcaaaaagccataaaggattccttttgcggttggatatgtaaaggtcatagcagcaactgacaagaagtgtgcaatatttacctggattatcttgatgatggtgactcattatcagtgctttggtacttttgattacctgtgtttcagtattagagtcactttagtacttcagatcctgcaaatatttttgcagatgaagtatgtatgtatgttactaagttaaacttagaaacagaacctgattcaattggtataatgtatttttgcaaactactgtaaatagcctatcaatgccaatgttaaacaaagaggaaaacgttgagcggactctgttctcttgcaccggtatttcaggaacatctgcttg

SEQ ID NO: 4986 - DNA, 2646 bp, Homo sapiens
  SIMILAR (574)..(1767): 941254mologous to Mus musculus arm-repeat protein NPRAP/neurojungin,accession number U90331,Smith-Waterman Score= 1946.
atgggggcggtctttttcatgctgttctcgtggtggataacttcaggacacatacagctgctgtgtacccggagaagagccacagtgagcactcaccaagagtttgtggtgactgtgtcaccattttctctaggactggttgtgtctggctgcttagatgcagacaccgccatgcctggttcagcagaagagcagtttcagtggcagtcacaagatggtcaaaaagatatcgaagatgagcttacaacaggtctcgagctggtggactcctgtattaggtcactacaggaatcaggaatacttgacccacaggattattctacaggtgaaagggtgattcattttgggaaaacccttgggctcagttctgaggactattctatcatggagaagggccagatggtcaaagaagtcactgtgacccctcaggtcagcgtcttgaaggcaaatgagaccatggcttctgctctctgtggccaagaaggacatgatgatccgctgttgctcacagttcagatgtctactggaaatcattacattaaagacaatagcctgtttccctgggtgaaatggcccagcctgctctcccagagtgcacttcagctcaattccaaacctgaagggtctttccagtatccggccagctaccatagcaaccagaccctggccctgggggaaaccaccccttcacagctcccggcccgaggcacacaagcccgagctacgggccagagcttcagccagggcacgaccagccgcgccggccacctggcggggcccgagcccgcgccgccgccgccgccgccgccgcgggagccgttcgcgcccagcctgggcagcgccttccacctgcccgacgcgccgcccgccgccgccgccgccgcgctctactactccagctccacgctgcccgcgccgccgcgcgggggctccccgctggccgcgccccagggcggttcgcccaccaagctgcagcgcggcggctcggcccccgagggcgccacctacgccgcgccgcgcggctcctcgcccaagcagtcgcccagccgcctggccaagtcctacagcaccagctcgcccatcaacatcgtcgtgtcctcggccggcctgtccccgatccgcgtgacctcgccccccaccgtgcagtccaccatctcctcctcgcccatccaccagctgagctccaccatcggcacgtacgccaccctgtcgcccaccaagcgcctggtccacgcgtccgagcagtacagcaagcactcgcaggagctgtatgccacggccaccctccagaggccgggcagcctggcagctggttcccgagcctcatacagcagccagcatgggcacctgggcccagagttgcgggccctgcagtccccagaacaccacatagatcccatctatgaagaccgcgtctatcagaagccccctatgaggagtctcagccagagccagggggaccctctgccgccagcacacaccggcacctaccgcacgagcacagccccatcttcccctggtgtcgactccgtccccttgcagcgcacaggcagccagcacggcccacagaatgccgccgcggccaccttccagagggccagctatgccgccggcccagcctccaattacgcggacccctaccgacagctgcagtattgtccctctgttgagtctccatacagcaaatccggccctgctctcccgcctgaaggcaccttggccaggtccccgtccattgatagcattcagaaagatcccagcaaataccccatcctttgcgatggtggaaatccgttttgtgctctcgtatacagaccttcctctagggaacgagcctcttctcttccaaatccatgtgctatcagtaaaacagactgtaccccaagttcagaagagttctgggaagtggtttcgaaggaatgcaaagaaggttctgtgcttcaaaaggtatcaaaggaagattttgtgggtctagtcttgaacaagattgtgaacatggaggacagcacccctgctacccaaagttggttcccacgttgtggaaccctcaccagagagagggaaaccaaaaaaattcagaaagagtatgatgcgtatagagaagcaaaagttactgatcatgggagttgcagtcgtgtggagggagggatagaacaggacaccaccagaggcgttgtgtggcaggcccagtttccaacagagctccccagggctttccatttttctgggggcttggacctgggaggcaggaattccagttgttcccagaggtctctgaagaagggcccagagtgtcggggacttggaagaggatctcgggactggaagtcagagaaagtgcaaagcttgtcactgagccttggaaaaaccttgtccctgagcaccctgagcagccgtactgaggctggggagcctgcacaggcctataagatcctagccctgtttcctgctgctgccccaaatcctgctcagggaggaggaggagggacaggaagaaatctgaacaacaactcttcttgtgacggagttgaaaagcagacctatctgtacaagtcaactctaactggaatgtcactgggttctgaaggggttgaaggaaagtgtcagtccaaacacacagaagctctggaacaaacaggagtttag

SEQ ID NO: 4987 - DNA, 5461 bp, Homo sapiens
  SIMILAR (147)..(3821): 1001254mologous to Homo sapiens neural plakophilin-related arm-repeat protein (NPRAP),accession number AB013805,Smith-Waterman Score=6377.
gccagcatcccttgtcccgcggccggctcagacaacaaaagcggaagatgctgcagttgggcaaggtcaggaccttgccttgaaagccgggcggcgccgcgcaacgcctcttcccggactgaggagctgtcgccggcggagggtgcatgtttgcgaggaagccgccgggcgccgcgcctttgggagctatgcctgttccagaccagccttcatcagcctcagagaagacgagttccctgagccccggcttaaacacctccaacggggatggctctgaaacagaaaccacctctgccatcctcgcctcagtcaaagaacaggaattacagtttgaaaggctgacccgagagctggaggctgaacggcagatcgtagccagccagctggagcgatgcaagctcggatccgagactggcagcatgagcagcatgagttcagcagaagagcagtttcagtggcagtcacaagatggtcaaaaagatatcgaagatgagcttacaacaggtctcgagctggtggactcctgtattaggtcactacaggaatcaggaatacttgacccacaggattattctacaggtgaaaggcccagcctgctctcccagagtgcacttcagctcaattccaaacctgaagggtctttccagtatccggccagctaccatagcaaccagaccctggccctgggggaaaccaccccttcacagctcccggcccgaggcacacaagcccgagctacgggccagagcttcagccagggcacgaccagccgcgccggccacctggcggggcccgagcccgcgccgccgccgccgccgccgccgcgggagccgttcgcgcccagcctgggcagcgccttccacctgcccgacgcgccgcccgccgccgccgccgccgcgctctactactccagctccacgctgcccgcgccgccgcgcgggggctccccgctggccgcgccccagggcggttcgcccaccaagctgcagcgcggcggctcggcccccgagggcgccacctacgccgcgccgcgcggctcctcgcccaagcagtcgcccagccgcctggccaagtcctacagcaccagctcgcccatcaacatcgtcgtgtcctcggccggcctgtccccgatccgcgtgacctcgccccccaccgtgcagtccaccatctcctcctcgcccatccaccagctgagctccaccatcggcacgtacgccaccctgtcgcccaccaagcgcctggtccacgcgtccgagcagtacagcaagcactcgcaggagctgtatgccacggccaccctccagaggccgggcagcctggcagctggttcccgagcctcatacagcagccagcatgggcacctgggcccagagttgcgggccctgcagtccccagaacaccacatagatcccatctatgaagaccgcgtctatcagaagccccctatgaggagtctcagccagagccagggggaccctctgccgccagcacacaccggcacctaccgcacgagcacagccccatcttcccctggtgtcgactccgtccccttgcagcgcacaggcagccagcacggcccacagaatgccgccgcggccaccttccagagggccagctatgccgccggcccagcctccaattacgcggacccctaccgacagctgcagtattgtccctctgttgagtctccatacagcaaatccggccctgctctcccgcctgaaggcaccttggccaggtccccgtccattgatagcattcagaaagatcccagagaatttggatggagagacccggaactgccggaagtgattcagatgttgcagcaccagtttccctcggtccagtctaacgcggcagcctacttgcaacacctctgttttggagacaacaaaattaaagccgagataaggagacaaggaggcatccagctcctggtggacctgttggatcatcggatgaccgaagtccaccgtagtgcctgtggagctctgagaaacctggtgtatgggaaggccaacgatgataacaaaattgccctgaaaaactgtggtggcatcccagcactggtgaggttactccgcaagacgactgacctggagatccgggagctggtcacaggagtcctttggaacctctcctcatgcgatgcactcaaaatgccaatcatccaggatgccctagcagtactgaccaacgcggtgattatcccccactcaggctgggaaaattcgcctcttcaggatgatcggaaaatacagctgcattcatcacaggtgctgcgtaacgccaccgggtgcctaaggaatgttagttcggccggagaggaggcccgcagaaggatgagagagtgtgatgggcttacggatgccttgctgtacgtgatccagtctgcgctggggagcagtgagatcgatagcaagaccgttgaaaactgtgtgtgcattttaaggaacctctcgtaccggctggcggcagaaacgtctcagggacagcacatgggcacggacgagctggacgggctactctgtggcgaggccaatggcaaggatgctgagagctctgggtgctggggcaagaagaagaagaaaaagaaatcccaagatcagtgggatggagtaggacctcttccagactgtgctgaaccaccaaaagggatccagatgctgtggcacccatcaatagtcaaaccctacctcacactgctctctgagtgctcaaatccagacacgctggaaggggcggcaggcgccctgcagaacttggctgcagggagctggaagtggtcagtatatatccgagccgctgtccgaaaagagaaaggcctgcccatcctcgtggagctgctccgaatagacaatgaccgtgtggtgtgcgcggtggccactgcgctgcggaacatggccttggacgtcagaaataaggagctcatcggcaaatacgccatgcgagacctagtccacaggcttccaggagggaacaacagcaacaacactgcaagcaaggccatgtcggatgacacagtgacagctgtctgctgcacactgcacgaagtgattaccaagaacatggagaacgccaaggccttacgggatgccggtggcatcgagaagttggtcggcatctccaaaagcaaaggagataaacactctccaaaagtggtcaaggctgcatctcaggtcctcaacagcatgtggcagtaccgagatctgaggagtctctacaaaaaggatggatggtcacaataccactttgtagcctcgtcttcaaccatcgagagggaccggcaaaggccctactcctcctcccgcacgccctccatctcccctgtgcgcgtgtctcccaacaaccgctcagcaagtgccccagcttcacctcgggaaatgatcagcctcaaagaaaggaaaacagactacgagtgcaccggcagcaacgccacctaccacggagctaaaggcgaacacacttccaggaaagatgccatgacagctcaaaacactggaatttcaactttgtataggaattcttatggtgcgcccgctgaagacatcaaacacaaccaggtttcagcacagccagtcccacaggagcccagcagaaaagattacgagacctaccagccatttcagaattccacaagaaattacgatgagtccttcttcgaggaccaggtccaccatcgccctcccgccagcgagtacaccatgcacctgggtctcaagtccaccggcaactacgttgacttctactcagctgcccgtccctacagtgaactgaactatgaaacgagccactacccggcctcccccgactcctgggtgtgaggagcagggcacaggcgctccgggaaacagtgcatgtgcatgcataccacaagacatttctttctgttttggtttttttctcctgcaaatttagtttgttaaagcctgttccataggaaggctgtgataaccagtaagggaaatattaagagctattttagaaagctaaatgaatcgcaagtttaacttggaaatcagtagaaagctaaagtgatcctaaatatgacagtgggcagcacctttcctagcgtgagctgttaggagtaacgagaagtgctttatactgaacgtgggttgatgggagggtggagacgaggcattcgggccggtggggcgtaagggttatcgttaagcacaagacacagaatagtttacacactgtgtgggggacggcttctcacgctttgtttactctcttcatccgttgtgactctaggcttcaggttgcattggggttcctctgtacagcaagatgtttcttgccttttgttaatgcattgttgtaaagtatttgatgtacattacagattaaagaagaaaagcgcgttgtgtatattacaccaatgccgccgtgtttcctcatctatggttctaaatattgcttcaatttcaaacttttgaaagatgtatggatttccagtttttctttactttctcccagtatgttttaacaaaaaaaaaaaaaaagcaggaaaaaaggaatatttagcagtattgttcgttctgatatgtgaatttgtttgtgacaactaaacaaggcattcagcagtttctgacaattaacatacatcattccacactccttgtcaacaaagtgctttttcactgcctaagattttagatgtagatatttgaaatagattttttcatttataccagttttctttatgatgatacagtgttaaaagaaaataaattacaattgatctgtcatccatatttgctaagaatgtctatttccaagaacctatatcttacaaaatacacattcttgcttgtgtgtctgtgtgtgtgggtgtatgtatgtccacgtactagaaaaattacctgtgtgagattttattttgacagaagctatttcatttgctgttcatcttgtacaaactttgtttttggttttttagtataaatgtacatcagtttgttccttttgtactgtatctattcttctgaccatctagtgactcaggatattaggcccagttgaagtggagttatggggattttccacacattcacgcatacttggatatcaaccctctctacaggtccgtttccttacacattttatccccctcagaacacgataaaccatggccaattcagtttcactttggggcccaattacttgaagtatcccacagaaaatgtaaactgctcgccttattcccccaaactttttgttcatgtggcagggagcagtacacaactatggaatagattattaaaactgaacttgaagctaacgttagaatagtggttaacagagctaagaaataaggctaaccatcgaaaagaacatgggccgcgggtaaactagctttgctctttagatgcaagtggctgaggccaataggtgcctagtaaatgttaactgttcttggaaaaaataaaaacatcagtaacaaaaaaaaaaa

SEQ ID NO: 4988 - DNA, 595 bp, Homo sapiens
  SIMILAR (169)..(195): 881254mologous to Homo sapiens protein phosphatase 2A BR gamma subunit,accession number AF096160,Smith-Waterman Score=41.
atgcaggtctgcagctcagggggacgcattttgagggtctcaggaacagagaggcagctcagacgcgagggtggacggttttgcctcgggagaggtgtcagaaacctccgggaaggcggagcattgagggcgcccttcactgccccttccttgaccgcactgcccccagacatcgtggacatcaagccggccaactatggaggaccttacggaggtgaccacagcatctgagtcccacccgcaccactgcaacctcttcgtttacagcagcagcaagggcttcctgcggctctgcgacatgcgggcagctgccctgtgtgacaagcattccaagcacccttgtgatgacattgggcccatccagattatccagggtcacctccgtacctcaaggggctggatgatcatcttgccagctttgcagagcaccttcaggtgccggatggatgaacagaacctcagagcctttctcgctccaaggctgtgtgatttttcaacatcacaaccccagccaggctcaccggagcagccagtgatgtctgggctcatcagtccttggacaaagccctccaggagctctgtcttctcaatgtaa

SEQ ID NO: 4989 - DNA, 897 bp, Homo sapiens
  SIMILAR (426)..(536): 451254mologous to Homo sapiens Protein polymer adhesive substrate PPAS1-B monomer,accession number W49714,Smith-Waterman Score=70.
atggacacaggaaggggaacaagacacactgggcctgggcagagcattctgctaagtgatgaatccagcgaggctgattctcagagtgaagacgatgatgaagaagaactcaatctcagcagagaagaacttcacaacatgcttcgactacacaaatataagaaacttcaccaaaataagtatagtaaagacaaggagcctgcgggaacaaatatcccaggatcccgggcggtttcgattgacgttacttccgggaaaagtaaccttgcatcggcggttgcgggcctggaaagctctcgcgacattttctcctgcgagatctgcttgctcactgtagcgatgacaccctcctcctcctccccgccgcctttcggcaatcttcgccagtcccagtcccgactaatctgtactcagatggcatggatcagggtctcccctcgaaccccggttcgcacggggcgtcaggtggcagcggcggggtgcgagctgcgcgaggccgacggcagcggcactacgggtgggcacgggcaggcgacgagcattgaatgtgggcggggtggggatactccatatcaagaagcagaatgtcctgagtgtggcagcagaaggagcgaatgtatgtcgccatggcaaactgtgctggctgcagcccttatggagggcatggacattcacatcccccatcaacaaggaagacgaagtccaagcatgccgaacatggaggaccacccatgttcgatggaaaatttcagcaacttaccgcacgctgaggaacaccggacattgttcgctgatctgatgaagattgatcggtggatggatcgaatgttgcccctctttactctaccaatctttgctggcaactcggacaatattcttttatgcattcctttttag

SEQ ID NO: 4990 - DNA, 3210 bp, Homo sapiens
  SIMILAR (1739)..(2494): 631254mologous to Arabidopsis thaliana helicase-like protein,accession number AL137080,Smith-Waterman Score=867.
  misc_feature (1)...(3210): n = a,t,c or g
agacagatttgttctatggcctcggagttgggtgccagggatgatggaggctgcactgagctggcaaagcccctctatcttcagtacttggagagggccctccggttggaccattttctgcgacaaacgtcagctatcttcaataggaatatttctagtgatgacagtgaagatggactggatgacagtaatccattattgccccagtctggggatcccttaatacaagttaaggaagaacctccaaattcattgcttggtgaaacttctggagcaggcagttctggaatgttaaacacatattctctgaatggagttctacagtcagaatcaaaatgtgataaggggaatttatataatttctctaagctgaagaaaagcagaaagtggctaaagagcattctgctaagtgatgaatccagcgaggctgattctcagagtgaagacgatgatgaagaagaactcaatctcagcagagaagaacttcacaacatgcttcgactacacaaatataagaaacttcaccaaaataagtatagtaaagacaaggagttgcagcaatatcagtactacagtgcaggcctgctctccacatatgaccctttctatgagcaacaacggcacctacttggacccaagaaaaagaaatttaaggaggaaaagaaacttaaagctaagttgaaaaaagtgaagaaaaaaagacgaagagatgaagaactttcctctgaagaatcccctcgtcgccatcaccaccagaccaaagtctttgccaagttttctcacgatgcacctccccctggcactaagaaaaagcacttatccattgagcagctgaatgctcgtcgcaggaaagtatggctcagcattgtgaaaaaggaactaccaaaggcaaataagcagaaagcttcagctcgtaacctgtttctcaccaatagccgaaagcttgctcaccagtgcatgaaggaggtgcgtcgagctgccttgcaggcccagaagaactgtaaggaaaccttgcctcgtgcccgccgcctcaccaaggagatgcttctgtactggaagaaatatgagaaagtagagaaggagcaccgcaagagagcagagaaggaagctttggagcagcggaagttggatgaggaaatgcgggaggccaagaggcaacagcgaaaactcaacttcttaattacccagacagagttgtatgcccatttcatgagtcgcaaacgagatatgggtcatgatggtatccaggaagaaatcctaaggaaactggaagacagttctacccagagacaaatcgatataggtggaggagtggtagttaacatcacacaggaggattatgatagtaaccattttaaagcccaggccctgaagaatgctgaaaatgcttaccatattcaccaagctcggacaaggtcatttgatgaagatgcaaaagaaagtcgagcagctgccctacgggcagcaaacaagtctggcactgggtttggggagagttatagcctggctaacccatctatccgggctggtgaggatattccacagcccacaatttttaatggcaaattgaaaggttatcaactgaaaggcatgaattggttggccaatctatatgaacagggtattaatggcattcttgctgatgaaatgggccttggtaaaacagtacagagcattgcccttctggcccatctggctgagagagagaacatttggggacctttcttaataatttcagcctgcgtctacacttaacaaggggcgccaggagtttactagatttgttcctaaatttaaggtgctaccatattggggaaatcctcatgatagaaaagtcatcagaaggttctggagtcagaagaccctctacactcaggatgcccccttccatgtggttattaccagctatcagctggtggtgcaggatgtaaagtatttccagcgggtcaagtggcaatacatggtactggatgaggctcaggcgctcaagagtagttccagtgttcgttggaagatcctcttacagttccagtgtcggaatcggcttttgctaaccgggaccccaattcagaacaccatggcagagctttgggctctgctgcatttcattatgccaacattatttgattcacatgaggaatttaatgaatggttttccaaggacattgagagccatgccgaaaacaaatctgctattgatgagaatcaactttctcgcttacacatgattttgaagccatttatgctgaggagaatcaagaaagatgtggaaaatgaattatctgacaagattgagattctaatgtattgccaactgaccagccgacagaagctgctatatcaggcactaaagaacaaaatttccattgaggatttattgcagtcttctatgggctctacccaacaagcacagaacaccaccagcagcctcatgaatctggtcatgcagtttaggaaggtgtgtaatcacccggagttatttgaacggcaagaaacttggtctccatttcatatttccctaaagccataccacatttcaaagtttatctaccgtcatggacagatcagggtcttcaatcattcacgagacaggtggttaagggttctttctccatttgcaccagactatatccaacggtctctctttcacagaaaaggtattaatgaagaaagctgtttctctttccttcgctttattgatatatctccagcagaaatggcaaaccttatgcttcagggacttttggccagatggttagctcttttcctgtctctgaaagcctcctacaggctccatcagctacgctcctggggagcgccagaaggggagagccaccagagatacctgaggaacaaggatttccttcttggggttaattttccactctcctttccaaacctttgcagctgccctttgttaaagtctcttgttttcagcagccactgtaaagcagtgagtggctactcagaccaggttgtccatcagcggagatcagctacctcctcgctgcgtcgctgcctgctcactgagctgccatcttttttgtgtgtggccagtccacgagtaagtgcaaaatactgcagcgcttggagcggttacgcttccttcagctagagcaggaacatacgtgtcctcaggaaggacgcgctgaacgcttaaggnggcagcccctgaaggtactgtagtttcagaggttaatgaagcaagaa

SEQ ID NO: 4991 - DNA, 1522 bp, Homo sapiens
  SIMILAR (778)..(915): 671254mologous to Schizosaccharomyces pombe putative helicase,accession number Z99167,Smith-Waterman Score=184.
atggtggcacaggcctctggacaaactattcgggaggctgaagtgggaggatcacttacagcccaggaggttgaggctacaagcattctgctaagtgatgaatccagcgaggctgattctcagagtgaagacgatgatgaagaagaactcaatctcagcagagaagaacttcacaacatgcttcgactacacaaatataagaaacttcaccaaaataagtatagtaaagacaaggagtggatgtcccagctggcagccctgaactactacttagctggcggtgatgagcagaagttgctagacttgtcatactctcctccccaaaacagacagccagccatggctaaggcacataacaacaacaacaacaacaacaacaacaacaacaacaaccacaacaaaaacccaaaaaggctgttggatgaaagagagttgctcacatactccacagcaacacagagctttgatacccgcaatacaaggtcatttgatgaagatgcaaaagaaagtcgagcagctgccctacgggcagcaaacaagtctggcactgggtttggggagagttatagcctggctaacccatctatccgggctggtgaggatattccacagcccacaatttttaatggcaaattgaaaggttatcaactgaaaggcatgaattggttggccaatctatatgaacagcgcttggagcggttacgcttccttcagctagagcaggaacatacgtgtcctcaggaaggacgcgctgaacgcttaagggggcagcccctgaagctttgggctctgctgcatttcattatgccaacattatttgattcacatgaggaatttaatgaatggttttccaaggacattgagagccatgccgaaaacaaatctgctattgatgagactaagttgaaaaaagtgaagaaaaaaagacgaagagatgaagaactttcctctgaagaatcccctcgtcgccatcaccaccagaccaaagtctttgccaagttttctcacgatgcacctccccctggcactaagaaaaagcacttatccattgagcagctgaatgctcgtcgcaggaaagtatggctcagcattgtgaaaaaggaactaccaaagaagaccctctacactcaggatgcccccttccatgtggttattaccagcaatcagctggtggtgcaggatgtaaagtatttccagcgggtcaagtggcaatacatggtactggatgaggctcaggcgctcaagagtagttccagcttgactcgaagtaacgctcggtaccccttagtgtcctctcagaggaagattcatgatcaacaggttacgacggacaagagcagcaagatggaccccaaagaagaagaatatattccagcaaaacatgaaatggaaaatacaaaactacaattttacctttcggctattggtgagaaacagtgttcgttggaagatcctcttacagttccagtgtcggaatcggcttttgctaaccgggaccccaattcagaacaccatggcagag

SEQ ID NO: 4992 - DNA, 976 bp, Homo sapiens
  SIMILAR (52)..(513): 661254mologous to Homo sapiens repressor transcriptional factor,accession number U35376,Smith-Waterman Score=559.
atggggtttcaccatgttgcccgggctggtctggaactcctgacctcaggtatgtgttgttattttgcccaagaccttcggccagagcagagcataaaagcttctttgcaaagaataatactgagaaaatatgaaaaatgtggacatcacaatttacagttaaaaaaaggctataaaagtgtggatgagtacaaggtgcacaaaggaagttataatggatttaaccagtgtttgacaactacccagagcaaaatatttcagtgtgataaatatgtgaaagactttcataaattttcaaattcaaatagacatatgactgagaagaatcctttcaaatgtaaagaatgtggcaagtcattttgtgttctttcacacctaactcaacataaaagaattcacactactgtcaattcctacaaacttgaagaatgtggcaaggcctttaatgtgtcctcaaccctttctcaacatatgagaattcatacaggacaaaaacactaccaatgtggagaaatggtgcatagcctttaacaagtcctcacaccttaacacacataagataattcatactggagagaaatcctacaaacgtgaagaatgtggaaaagcttttaacatatcctcacaccttactacacataagataattcatactggagagaatgcctacaaatgtaaagaatgtggcaaagcttttaaccaatcatcaacccttactagacataagataattcatgctggagagaagccctacatatgtgaacattgtggcagagcttttaaccaatcctcgaaccttactaaacataagagaattcatactggtgataaaccttataaatgtgaagaatgtggcaaagcctttaatgtgtcctcaacccttactcaacataagagaattcaacaacaacaacaacaaacaattaagcaaacaaaaaacctattaaacaacaacaacaaaaaattatgggtctag

SEQ ID NO: 4993 - DNA, 693 bp, Homo sapiens
  SIMILAR (310)..(672): 981254mologous to unidentified cloning vector 29kD protein essential for the replication of mini F plasmid,accession number AB015619,Smith-Waterman Score=629.
gtatttattcgcgataagctcatggagcggcgtaaccgtcgcacaggaaggacagagaaagcgcggatctgggaagtgacggacagaacggtcaggacctggattggggaggcggttgccgccgctgctgctgacggtgtgacgttctctgttccggtcacaccacatacgttccgccattcctatgcgatgcacatgctgtatgccggtataccgctgaaagttctgcaaagcctgatgggacataagtccatcagttcaacggaagtctacacgaaggtttttgcgctggatgtggctgcccggcaccggatcagaaaatctgatggcaccctacaggaacatgacggtatctgcgagatccatgttgctaaatatgctgaaatattcggattgacctctgcggaagccagtaaggatatacggcaggcattgaagagtttcgcggggaaggaagtggttttttatcgccctgaagaggatgccggcgatgaaaaaggctatgaatcttttccttggtttatcaaacgtgcgcacagtccatccagagggctttacagtgtacatatcaacccatatctcattcccttctttatcgggttacagaaccggtttacgcagtttcggcttagtgaaacaaaagaaatcaccaatccgtatgccatgcgtgttacgaatccctgtgtcagtatc

SEQ ID NO: 4994 - DNA, 1341 bp, Homo sapiens
  SIMILAR (814)..(1338): 981254mologous to unidentified cloning vector 29kD protein essential for the replication of mini F plasmid,accession number AB015619,Smith-Waterman Score=916.
atggagctgaaaaccaaggctcgagaactacgtgaagaatgcagaagcctcaggagccgatgcaatcaactggaagaaagggtatcagcaatggaagatgaaatgaatgaaatgaagcgagaagggaagtttagagaaaaaagaataaaaagaaatgagcaaagcctccaagaaatatgggactatgtgaaaagaccaaatctacgtctgattggtgtacctgaaagtgatgtggagaatggaaccaagttggaaaacactctgcaggatattatccaggagaacttccccaatctagcaaggcaggccaacgttcagattcaggaaatacagagaacgccacaaagatactcctcgggaagagaaactccaagacacataattgtcagattcaccaaagttgaaatgaaggaaaaaatgttaagggcagcagagagaaagtgtgacaatctaaaaacttgtcacacttcacatggatctgtcatggcggaaacagcggttatcaatcacaagaaacgtaaaaatagcccgcgaatcgtccagtcaaacgacctcactgaggcggcatatagtctctcccgggatcaaaaacgtatgctgtatctgttcgttgaccagatcagaaaatctgatggcaccctacaggaacatgacggtatctgcgagatccatgttgctaaatatgctgaaatattcggattgacctctgcggaagccagtaaggatatacggcaggcattgaagagtttcgcggggaaagaagtggttttttatcgccctgaagaagatgccggcgatgaaaaaagctatgaacaacccagtaaggatatacggcaggcattgaagagtttcgcggggaaggaagtggttttttatcgccctgaagaggatgccggcgatgaaaaaggctatgaatcttttccttggtttatcaaacgtgcgcacagtccatccagagggctttacagtgtacatatcaacccatatctcattcccttctttatcgggttacagaaccggtttacgcagtttcggcttagtgaaacaaaagaaatcaccaatccgtatgccatgcgtttatacgaatccctgtgtcagtatcgtaagccggatggctcaggcatcgtctctctgaaaatcgactggatcatagagcgttaccagctgcctcaaagttaccagcgtatgcctgacttccgccgccgcttcctgcaggtctgtgttaatgagatcaacagcagaactccaatgcgcctctcatacattgagaaaaagaaaggccgccagacgactcatatcgtattttccttccgcgatatcacttccatgacgacaggatag

SEQ ID NO: 4995 - DNA, 906 bp, Homo sapiens
  SIMILAR (190)..(531): 981254mologous to unidentified cloning vector 29kD protein essential for the replication of mini F plasmid,accession number AB015619,Smith-Waterman Score=573.
atggggatgactgatatgggcaaatctaagaaaaagagtcagggaccaccttccttccctccagggggcgcaccgccgccggctatcggagcacctgcagggcgggagcgcccacccgggactggggacccatttaatcagcgcccttgtgacaatctaaaaacttgtcacacttcacatggatctgtcatggcggaaacagcggttatcaatcacaagaaacgtaaaaatagcccgcgaatcgtccagtcaaacgacctcactgaggcggcatatagtctctcccgggatcaaaaacgtatgctgtatctgttcgttgaccagatcagaaaatctgatggcaccctacaggaacatgacggtatctgcgagatccatgttgctaaatatgctgaaatattcggattgacctctgcggaagccagtaaggatatacggcaggcattgaagagtttcgcggggaaggaagtggttttttatcgccctggagaggatgccggccatgaaaaaggctatgaatcttttccttggttatcaaacgcagtcctgagtaaagaagaggcaagtttcccttcacccagatgggacaggactgagggagatgatggggccagtcttctggggggagggcagggttgttggtggtctggagttgaaggcccatcttcagcagtgggtgagatgaaagggaagaaggtgaaacttctgaattgtgtccaggaacttggagtggaggtggattctgtggagaatgaagacagaactagctgcaaatgtgagctcctggcccctctgagcagccatattaaagatcaaagggacaaagcctgtgcattccagatggaatcaggcagcaaagcacagctacgaaagcattcttggctgtcataccctcgagtgccatga

SEQ ID NO: 4996 - DNA, 1695 bp, Homo sapiens
  SIMILAR (1060)..(1692): 951254mologous to unidentified cloning vector 29kD protein essential for the replication of mini F plasmid,accession number AB015619,Smith-Waterman Score=1048.
gcctctaaagggttcttcttttttaaaaggcgccttgtaaggcctttatccatgttgtttttagagaaaggtgttgtgacaaattgcccccttccagtggtgccaaaatcaccctccaaatgaccagtcctgtcttgtgaccaaattcccctttacccctggtaccaaattgccttcagaaaaagctgtttttttcccaaagtatccccggtttattgactcttttttatttagtgtgacaatctaaaaaacttgtcacactttcacatggatctgtcatggcggaaacagcgggttatcaatcacaagaaacgtaaaaataggccctctaatcgtccagtcaaacgccgtcactgaggcggcatatagtctctcccagggatcaaaaacgtatgctgtatctgttcgttgaccagatcagaaaatctgatggcaccctacagggaacatgacggtatctgcgagatccatgttgctaaatatgctgaaatattcgggattgaccttctggcggaagccagtaaggatatacggcaggcattgaagagtttcgcggggaaggaagtggttttttatcgccctgaagaggatgccggcgatgaaaaaggctatgaatcttttccttggtttatcaaacgtgcgcacagtccatccagagggctttacagtggacatattccccccatatctcattcctcttctttatcgggttacagaacccggttaacgcagttttcggcttagtgaaacaaaagaaatcaccaatccgtatggccatggcgttaatacgaaatccctgttgtcagtatccgtaagcccgggatgggctcaagcatcgtctctctgaaaaatcgactggatcatagagccgtaccagctgcctcaaagttaccagcgtatggcctgactttcgccggcggcttgctggcaggtcttgtgttaatgaaatccaacagccggaactccatgcgcctctcatacattgagaaaaagaaaggccgccagacgactcatatctgtgacaatctaaaaacttgtcacacttcacatggatctgtcatggcggaaacagcggttatcaatcacaagaaacgtaaaaatagcccgcgaatcgtccagtcaaacgacctcactgaggcggcatatagtctctcccgggatcaaaaacgtatgctgtatctgttcgttgaccagatcagaaaatctgatggcaccctacaggaacatgacggtatctgcgagatccatgttgctaaatatgctgaaatattcggattgacctctgcggaagccagtaaggatatacggcaggcattgaaaagtttcgcggggaaagaagtggttttttatcgccctgaagaggatgccggcgatgaaaaaggctatgaatcttttccttggtttatcaaacgtgcgcacagtccatccagagggctttacagtgtacatatcaacccatatctcattcccttctttatcgggttacagaaccggtttacacaatttcggcttattgaaacaaaagaaatcaccaatccgtatgccatgcgtttatacaaatccctgtgtcaatatcgtaaaccggatggctcaaggcatctctctttgaaaatcgactggatcatagagcggttccagctgccctcaaattaccaaccgatgcctgactttccccgccgtttcctgcaggtatga

SEQ ID NO: 4997 - DNA, 1341 bp, Homo sapiens
  SIMILAR (1)..(285): 1001254mologous to Homo sapiens prostate-specific, androgen- regulated homeoprotein NKX3.1,accession number U91540,Smith- Waterman Score=494.
  misc_feature (1)...(1341): n = a,t,c or g
atgctcagggttccggagccgcggcccggggaggcgaaagcggagggggccgcgccgccgaccccgtccaagccgctcacgtccttcctcatccaggacatcctgcgggacggcgcgcagcggcaaggcggccgcacgagcagccagagacagcgcgacccggagccggagccagagccagagccagagggaggacgcagccgcgccggggcgcagaacgaccagctgagcaccgggccccgcgccgcgccggaggaggccgagacgctggcagagaccgagccanctggtggttggcagagggcagagctgcaggttatgagagacctggcacaagaggggaggtgtgacaatctaaaaacttgtcacacttcacatggatctgtcatggcggaaacagcggttatcaatcacaagaaacgtaaaaatagcccgcgaatcgtccagtcaaacgacctcactgaggcggcatatagtctctcccgggatcaaaaacgtatgctgtatctgttcgttgaccagatcagaaaatctgatggcaccctacaggaacatgacggtatctgcgagatccatgttgctaaatatgctgaaatattcggattgacctctgcggaagccaatcgtaagccggatggctcaagcatcgtctctctgaaaatgactgatcataaacgttccagctgcctaagataccagcgttgccgacttccggcgccgttctgcagaagagacgctcccaggatttggtttccagtgggagaaggaaggcgccgcaaataccatcggctgcgaggcgactgtggtggtcgaaggaacgtgatcctttgtcagctcagcggagccgaagtgatcgccgagttggctgagcagcgccgagggagtttagaatccgctgcagaaaacctaccagcttcttcgcggacacagcagctgaagccctccggatcgacacaacacaacttccgggatcgacgcaacacaacttcccgccagccccttcccttcagcgggctggacacagcccatggcggtgagaagatatcgagtgtcagcaacctggtctggacctggattggggaggcggttgccgccgctgctgctgacggtgtgacgttctctgttccggtcacaccacatacgttccgccattcctatgcgatgcacatgctgtatgccggtataccgctgaaagttctgcaaagcctgatgggacataagtccatcagttcaacggaagtctacacgaaggtttttgcgctggatgtggctgcccggcaccgggtgcagtttgcgatgccggagtctgatgcggttgcgatgctgaaacaattatcctga

SEQ ID NO: 4998 - DNA, 1350 bp, Homo sapiens
  SIMILAR (1003)..(1347): 1001254mologous to Plasmid F Protein D,accession number M12987,Smith-Waterman Score=584.
  misc_feature (1)...(1350): n = a,t,c or g
atgccgagaaagcaaggcgactaccgcaccccggtatgggaaatcgaggaccggtacttagatatgcttcgtgatctgctcaagatcgatgatattaaagggttccagcctgaagtacgtatctatcttaccagatacataaatagtaatggctcttacaccccacgaatggatgagcaagattccgatgcctgcggatgcatggacataaaaaatgctcgcgcggttattttcctcgctttccggctgtcatcattaaactgtgcaatggcgatagccttcgtcatttatgacccgcgtttatgcactggccatctgctcatcatccagctcgccaaccagaacacgataatcactttcggtaagtgcagcagctttacgacggcgactcccatcggcaatttcgggtaccgagctcgaattcgtaatcatggtcatagctgtttcctgtgtgaaatgggggaggtctccatcaccaatccgtatgccatgcgtttatacgaatccctgtgtgagtatcgtaagccggatggctcaggcatcgtctctctgaaaatcgactggatcatagagcgttaccagctgcctcaaagttaccagcgtatgcctgacttccgccgccgcttcctgcagcttgaatgtctgtatgtggactctagaggaccccccagcgcggcgacgaacgggtcgtcgcgcatccggcgcagcgtgtggaacacccacacaccgcgcaccgggatcgccaggatcagcgccgcgccgacgatgccgaactcgaacaggatccccatcgggtaccgagctcgaattcgtaatcatgggtttattgagaatatgtttttcgtctcagccaatccctgggtgagtttcaccagttttgatttaaacgtggccaatgtggacaacttcttcgcccccgttttcaccatgggcaaatattatacgcaaggcgacaaggtgctgatgccgctggcgattcangtatttattcgcgataagctcatggagcggcgtaaccgtcgcacaggaaggacagagaaagcgcggatctgggaagtgacggacagaacggtcaggacctggattggggaggcggttgccgccgctgctgctgacggtgtgacgttctctgttccggtcacaccacatacgttccgccattcctatgcgatgcacatgctgtatgccggtataccgctgaaagttctgcaaagcctgatgggacataagtccatcagttcaacggaagtctacacgaaggtttttgcgctggatgtggctgcccggcaccgggtgcagtttgcgatgccggagtctgatgcggttgcgatgctgaaacaattatcctga

SEQ ID NO: 4999 - DNA, 783 bp, Homo sapiens
  SIMILAR (403)..(780): 921254mologous to Plasmid F Protein D,accession number M12987,Smith-Waterman Score=586.
atgatcgcgtattcgatagtggctccaagtggcgaagcgagcaggactgggcggcggccaaagcggtcggacagtgctccgagaacggtgactggcgatgctgtgggaatggacgatatcccgcaagaggcccggcagtaccggcctaaccaagcctatgcctacatcatccacggtgacggtgccgaggatgacgatcatcgcatagttagatttcatacacagtgcctgactgcggtcaccgtcgacagcgacacacttgcatcggatgcagcccggttaacgtgccggcacggcctgggtaaccaggtattttgtccacataaccgtgcgcaaaaagttgtggataagcaggacacagcatccttccacagcaggcatacaaccgcacaccgagggtactccgttctacaggtatttattcgcgataagctcatggagcggcgtaaccgtcgcacaggaaggacagagaaagcgcggatctgggaagtgacggacagaacggtcaggacctggattggggaggcggttgccgccgctgctgctgacggtgtgacgttctctgttccggtcacaccacatacgttccgccattcctatgcgatgcacatgctgtatgccggtataccgctgaaagttctgcaaagcctgatgggacataagtccatcagttcaacggaagtctacacgaaggtttttgcgctggatgtggctgcccggcaccgggtgcagtttgcgatgccggagtctgatgcggttgcgatgctgaaacaattatcctga

SEQ ID NO: 5000 - DNA, 436 bp, Homo sapiens
  SIMILAR (82)..(324): 1001254mologous to Plasmid F Protein D,accession number M12987,Smith-Waterman Score=407.
  misc_feature (1)...(436): n = a,t,c or g
gatccgatgtccgtacgccgtacatcgggnnnnnnnnnnnnnnnnnnnnnnnnnnnnnnnnnnnnnnnnnnnnnnnnnnnngctgctgctgacggtgtgacgttctctgttccggtcacaccacatacgttccgccattcctatgcgatgcacatgctgtatgccggtataccgctgaaagttctgcaaagcctgatgggacataagtccatcagttcaacggaagtctacacgaaggtttttgcgctggatgtggctgcccggcaccgggtgcagtttgcgatgccggagtctgatgcggttgcgatgctgaaacaattatcctgagaataaatgccttggcctttatatggaaatgtggaactgagtggatatgctggttttgtctgttaacaaagaaactggctggtattcactgagaaacgaacgaaacagg

SEQ ID NO: 5001 - DNA, 547 bp, Homo sapiens
  SIMILAR (167)..(544): 921254mologous to Plasmid F Protein D,accession number M12987,Smith-Waterman Score=586.
ggtcaccgtcgacagcgacacacttgcatcggatgcagcccggttaacgtgccggcacggcctgggtaaccaggtattttgtccacataaccgtgcgcaaaaagttgtggataagcaggacacagcatccttccacagcaggcatacaaccgcacaccgagggtactccgttctacaggtatttattcgcgataagctcatggagcggcgtaaccgtcgcacaggaaggacagagaaagcgcggatctgggaagtgacggacagaacggtcaggacctggattggggaggcggttgccgccgctgctgctgacggtgtgacgttctctgttccggtcacaccacatacgttccgccattcctatgcgatgcacatgctgtatgccggtataccgctgaaagttctgcaaagcctgatgggacataagtccatcagttcaacggaagtctacacgaaggtttttgcgctggatgtggctgcccggcaccgggtgcagtttgcgatgccggagtctgatgcggttgcgatgctgaaacaattatcctga

SEQ ID NO: 5002 - DNA, 735 bp, Homo sapiens
  SIMILAR (1)..(471): 911254mologous to Cloning vector pZC320 SopA,accession number U26464,Smith-Waterman Score=725.
atgaaactcatggaaacacttaaccagtgcataaacgctggtcatgaaatgacgaaggctatcgccattgcacagtttaatgatgacagcccggaagcgaggaaaataacccggcgctggagaataggtgaagcagcggatttagttggggtttcttctcaggctatcagagatgccgagaaagcagggcgactaccgcacccggatatggaaattcgaggacgggttgagcaacgtgttggttatacaattgaacaaattaatcatatgcgtgatgtgtttggtacgcgattgcgacgtgctgaagacgtatttccaccggtgatcggggttgctgcccataaaggtggcgtttacaaaacctcagtttctgttcatcttgctcaggatctggctctgaaggggctacgtgttttgctcgtggaagcgcggatctgggaagtgacggacagaacggtcaggacctggattggggaggcggttgccgccgctgctgctgacggtgtgacgttctctgttccggtcacaccacatacgttccgccattcctatgcgatgcacatgctgtatgccggtataccgctgaaagttctgcaaagcctgatgggacataagtccatcagttcaacggaagtctacacgaaggtttttgcgctggatgtggctgcccggcaccgggtgcagtttgcgatgccggagtctgatgcggttgcgatgctgaaacaattatcctga

SEQ ID NO: 5003 - DNA, 1113 bp, Homo sapiens
  SIMILAR (187)..(504): 1001254mologous to Homo sapiens GDNF receptor alpha,accession number U95847,Smith-Waterman Score=595.
atggagaaacagtaccagaaacattcctctattggggacagggctgaattcctgttgtccattcatcctttaaccttgctgttgggcttggccttggcctgcctgcccaggcaccgagtgggccctgcctccaccatgctctcgctgcagacagcagagggcaggcgtggagcacattcccaaaggaacaactgcctggatgcagcgaaggcctgcaacctcgacgacatttgcaagaagtacaggtcggcgtacatcaccccgtgcaccaccagcgtgtccaatgatgtctgcaaccgccgcaagtgccacaaggccctccggcagttctttgacaaggtcccggccaagcacagctacggaatgctcttctgctcctgccgggacatcgcctgcacagagcggaggcgacagaccatcgtgcctgtgtgctcctatgaagagagggagaagcccaactgtttgaatttgcaggactcctgcaagacgaattacatctgcagagtgccccttctgcctgcgccacctcctgatgtggatgtgtggcccttcagctccactcagcagcggcagagctctatcagctcgggctctcagagctcattagagttcagttcctctgactataaacatcaagatgctgtgatacttacctcaacacttccttctgagggtacagacagcaccttcttaaatgaacacaggcttgatgcttcaattgccagaccagtagagggtccacaggtatttattcgcgataagctcatggagcggcgtaaccgtcgcacaggaaggacagagaaagcgcggatctgggaagtgacggacagaacggtcaggacctggattggggaggcggttgccgccgctgctgctgacggtgtgacgttctctgttccggtcacaccacatacgttccgccattcctatgcgatgcacatgctgtatgccggtataccgctgaaagttctgcaaagcctgatgggacataagtccatcagttcaacggaagtctacacgaaggtttttgcgctggatgtggctgcccggcaccgggtgcagtttgcgatgccggagtctgatgcggttgcgatgctgaaacaattatcctga

SEQ ID NO: 5004 - DNA, 1173 bp, Homo sapiens
  SIMILAR (826)..(1170): 1001254mologous to Plasmid F Protein D,accession number M12987,Smith-Waterman Score=584.
atgacaaaggactctcagaacaaatgggaagtgaatcagaggaaaattaggagttcggtgatagaaaagcccagggaagtaagtgttttgagaaggaagtggttgactgtgtgggctgatgctgatcatcaggtcaaaatagatgagaacaaagaatgggccttcagtctgacacacagagctgcatggagtcttggcagaacagccactcaggcatgcatggaggcccaggacactcaggcatgcatggaggcccaggagctttacctactgtggcactgggctttccggcaaaatgactgccactctgtaagggttcagaaccggggtgaggctgagatggctgaaatgacagaagtagaattcagaatgtggataaacacaatcttcactgatcttaaggagcacattgtaacccaatgcaggaaagctaaaaatcataaaatattgcaggaagtgacagacaaaatagccagtatagagaagaatgtaatgaacctgatggagctgaaaaacacaatacaagaatttcataatgcaatcacaagtattaatagcagaaaagaccaagtggaggaaagaatctcagagtttgaggactgtgtttctgaaataaggcagacagacaagaatagagaaaaaagaatgaaaaggaacgaacaaaacctccaagaaatatgggattgtgtaaagagactggatctacaactaattggtgtgcctgaaagagatgttggcccagggcttctggatcaacagggacaccaggatttatttattctgcgaagtgatcttccgtcacaggtatttattcgcgataagctcatggagcggcgtaaccgtcgcacaggaaggacagagaaagcgcggatctgggaagtgacggacagaacggtcaggacctggattggggaggcggttgccgccgctgctgctgacggtgtgacgttctctgttccggtcacaccacatacgttccgccattcctatgcgatgcacatgctgtatgccggtataccgctgaaagttctgcaaagcctgatgggacataagtccatcagttcaacggaagtctacacgaaggtttttgcgctggatgtggctgcccggcaccgggtgcagtttgcgatgccggagtctgatgcggttgcgatgctgaaacaattatcctga

SEQ ID NO: 5005 - DNA, 873 bp, Homo sapiens
  SIMILAR (526)..(870): 1001254mologous to Plasmid F Protein D,accession number M12987,Smith-Waterman Score=584.
atggcccgatatcggttaatgcacctgcgcccaacaggcttgcccgactggaaaggggcgtcgaggatctccggggcgcggggcgcgggctggggcccagtgaggcttggcaggctgtgcgcggaccgcgccctggacggcgaaagcaggcccggagggggcggccagtccggcgtcccagcgtccgaggcgagccagaaggcggcccacggccgtcgcctcccgccctcgctcgctctcggtgcctccttggccttggcgcccactctggccgcacttgagcgcttcaacccgccgctgcactgtgggagcccctttctgggctggccaaggccggagccggctccctcagcttgcggggaggtgtggagggagaggcgcgtgcgggaactggggctgcgcacaggcttgcgggccagcgcgagttctggttggcccagggctttccggtatcaacagggacaccaggatttatttattctgcgaagtgatcttccgtcacaggtatttattcgcgataagctcatggagcggcgtaaccgtcgcacaggaaggacagagaaagcgcggatctgggaagtgacggacagaacggtcaggacctggattggggaggcggttgccgccgctgctgctgacggtgtgacgttctctgttccggtcacaccacatacgttccgccattcctatgcgatgcacatgctgtatgccggtataccgctgaaagttctgcaaagcctgatgggacataagtccatcagttcaacggaagtctacacgaaggtttttgcgctggatgtggctgcccggcaccgggtgcagtttgcgatgccggagtctgatgcggttgcgatgctgaaacaattatcctga

SEQ ID NO: 5006 - DNA, 1257 bp, Homo sapiens
  SIMILAR (1)..(897): 991254mologous to Cloning vector pZC320 SopA,accession number U26464,Smith-Waterman Score=1553.
atgaaactcatggaaacacttaaccagtgcataaacgctggtcatgaaatgacgaaggctatcgccattgcacagtttaatgatgacagcccggaagcgaggaaaataacccggcgctggagaataggtgaagcagcggatttagttggggtttcttctcaggctatcagagatgccgagaaagcagggcgactaccgcacccggatatggaaattcgaggacgggttgagcaacgtgttggttatacaattgaacaaattaatcatatgcgtgatgtgtttggtacgcgattgcgacgtgctgaagacgtatttccaccggtgatcggggttgctgcccataaaggtggcgtttacaaaacctcagtttctgttcatcttgctcaggatctggctctgaaggggctacgtgttttgctcgtggaaggtaacgacccccagggaacagcctcaatgtatcacggatgggtaccagatcttcatattcatgcagaagacactctcctgcctttctatcttggggaaaaggacgatgtcacttatgcaataaagcccacttgctggccggggcttgacattattccttcctgtctggctctgcaccgtattgaaactgagttaatgggcaaatttgatgaaggtaaactgcccaccgatccacacctgatgctccgactggccattgaaactgttgctcatgactatgatgtcatagttattgacagcgcgcctaacctgggtatcggcacgattaatgtcgtatgtgctgctgatgtgctgattgttcccacgcctgctgagttgtttgactacacctccgcactgcagtttttcgatatgcttcgtgatctgctcaagaacgttgatcttaaagggttcgagcctgatgtatttattcgcgataagctcatggagcggcgtaaccgtcgcacaggaaggacagagaaagcgcggatctgggaagtgacggacagaacggtcaggacctggattggggaggcggttgccgccgctgctgctgacggtgtgacgttctctgttccggtcacaccacatacgttccgccattcctatgcgatgcacatgctgtatgccggtataccgctgaaagttctgcaaagcctgatgggacataagtccatcagttcaacggaagtctacacgaaggtttttgcgctggatgtggctgcccggcaccgggtgcagtttgcgatgccggagtctgatgcggttgcgatgctgaaacaattatcctga

SEQ ID NO: 5007 - DNA, 1239 bp, Homo sapiens
  SIMILAR (160)..(852): 991254mologous to Homo sapiens protein-tyrosine- phosphatase,accession number X93920,Smith-Waterman Score=1193.
atggtagagaagagagcctcaatggagaacatgggtctggatgagaacatgggtcttggtagttctcggatgggatggaagatcatcgctggggctttcaaaatagtacaacgggaaacaaggtaccgtcaactcctttccaaaagaagctcgacccccatgatagatacgctcagacccgtgcccttcgcgtcggaaatggcgatcagcaagacggtggcgtggctcaacgagcagctggagctgggcaacgagcggctgctgctgatggactgccggccgcaggagctatacgagtcgtcgcacatcgagtcggccatcaacgtggccatcccgggcatcatgctgcggcgcctgcagaagggtaacctgccggtgcgcgcgctcttcacgcgcggcgaggaccgggaccgcttcacccggcgctgtggcaccgacacagtggtgctctacgacgagagcagcagcgactggaacgagaatacgggcggcgagtcggtgctcgggctgctgctcaagaagctcaaggacgagggctgccgggcgttctacctggaaggtggcttcagtaagttccaagccgagttctccctgcattgcgagaccaatctagacggctcgtgtagcagcagctcgccgccgttgccagtgctggggctcgggggcctgcggatcagctctgactcttcctcggacatcgagtctgaccttgaccgagaccccaatagtgcaacagactcggatggtagtccgctgtccaacagccagccttccttcccagtggagatcttgcccttcctctacttgggctgtgccaaagactccaccaacttggacgtgttggaggaattccgcgatcctctccctatagtatttattcgcgataagctcatggagcggcgtaaccgtcgcacaggaaggacagagaaagcgcggatctgggaagtgacggacagaacggtcaggacctggattggggaggcggttgccgccgctgctgctgacggtgtgacgttctctgttccggtcacaccacatacgttccgccattcctatgcgatgcacatgctgtatgccggtataccgctgaaagttctgcaaagcctgatgggacataagtccatcagttcaacggaagtctacacgaaggtttttgcgctggatgtggctgcccggcaccgggtgcagtttgcgatgccggagtctgatgcggttgcgatgctgaaacaattatcctga

SEQ ID NO: 5008 - DNA, 1281 bp, Homo sapiens
  SIMILAR (895)..(1278): 921254mologous to Plasmid F resolvase,accession number AP001918,Smith-Waterman Score=585.
atgggcaaggacttcatgtctaatacaccaaaagcaatggcaacaaaagccaaaattgacaaatcggatctaattaaactaaagagcttctgcacagcaaaagaaactaccatcagagtgaacaggcaacctacaaaatgggagaaaattttcagaaatttcttctttcgtcggcagggttggctccttctggagacaataccagcattgccaccggtgggtagaacactaagtgggctcttggagtccctgattccagaacttgactcttggatgacatttctggacctgctctgggccagagaggagaccacttcccttaaggctctggttgaagaagtgtattttgcgcagaaggaacgtgatgaagctgttatgtctagactgcaattagccattgaggagagagatgaagcaattgcacgagccaagcatatggaaatgtctctaaaagtgaaaaagaagtcttggggatcacattctgatacacagactaaagaacaacaacaacaaaaaacccagcagtcaactgtgagaaagaggactgaggaggacaccaggggaacacaaggaaatagcttcacagtgtggcactctgacaaccttatatcttcacatagaccaagcaggcaaggctgtgcaggctgcgagctcgttgacgcatctcagcccactcccttgtcctcccgcctggcgaagatgtccgccaagcctgaagtcagcttagtgcgcgaggcttctcggcagatcgtggccggtggttctgcagtgatcttatgtcattatggtgaaagttggaacatcttacgtgccgatcaacgtctaattttcgccaaaagttggcccagggcttcccggtatcaacagggacaccaggaaaaatatattctgcgaagtgatcttccgtcacaggtattaattcgcgataagctcatggagcggcgtaaccgtcgcacaggaaggacagagaaagcgcggatctgggaagtgacggacagaacggtcaggacctggattggggaggcggttgccgccgctgctgctgacggtgtgacgttctctgttccggtcacaccacatacgttccgccattcctatgcgatgcacatgctgtatgccggtataccgctgaaagttctgcaaagcctgatgggacataagtccatcagttcaacggaagtctacacgaaggtttttgcgctggatgtggctgcccggcaccgggtgcagtttgcgatgccggagtctgatgcggttgcgatgctgaaacaattatcctga

SEQ ID NO: 5009 - DNA, 895 bp, Homo sapiens
  SIMILAR (548)..(892): 1001254mologous to Plasmid F Protein D,accession number M12987,Smith-Waterman Score=584.
gaaatcccagaaagaggacagaacaaggcaaggcacagaacaaggttcagtggtggctgaccaggactcctgttatggtccagaagaggcccacgatagtgtcactcaaatcctctccagacagccctttggaaacatattccatgttcctcttcttagggatgtgggtaggagtgggggtggagatggttctgtaaagcttgaggagcaagtgaatacatatcactatcagcgaatattgttgggaatatcatcggataatgcaatcctcttagaggaagaatctgaggagggacgacccatgcatataagcaccatcaaagagccatcacctgattccccaatcttatacctgacgctgaatctcaaactccttacctcgctgatcttatttcattatggtgaaagttggaacctcttacgtgccgatcaacgtctcattttcgccaaaagttggcccagggcttcccggtatcaacagggacaccaggatttatttattctgcgaagtgatcttccgtcacaggtatttattcgcgataagctcatggagcggcgtaaccgtcgcacaggaaggacagagaaagcgcggatctgggaagtgacggacagaacggtcaggacctggattggggaggcggttgccgccgctgctgctgacggtgtgacgttctctgttccggtcacaccacatacgttccgccattcctatgcgatgcacatgctgtatgccggtataccgctgaaagttctgcaaagcctgatgggacataagtccatcagttcaacggaagtctacacgaaggtttttgcgctggatgtggctgcccggcaccgggtgcagtttgcgatgccggagtctgatgcggttgcgatgctgaaacaattatcctga

SEQ ID NO: 5010 - DNA, 1419 bp, Homo sapiens; identical to SEQ ID NO: 3349
  SIMILAR (663)..(728): 771254mologous to Mus musculus Pro-Pol-dUTPase polyprotein,accession number Y12713,Smith-Waterman Score=89.

SEQ ID NO: 5011 - DNA, 768 bp, Homo sapiens
  SIMILAR (421)..(765): 1001254mologous to Plasmid F Protein D,accession number M12987,Smith-Waterman Score=584.
atgtactggacagactggggagaagtgccaaagatagaacgtgctggaatggatggttcaagtcgcttcattataataaacagtgaaatttactggccaaatggactgactttggattatgaagaacaaaagctttattgggcagatgcaaaacttaatttcatccacaaatcaaatctggatggaacaaatcggaagaatgtggattccattctccaggattatgcaaattgcaaaaaatctcgtggaaacacagataatgagtatgctgttaatgaagttgtggcagggatagaagaatacttcaatgtgatgttgggcacccagctactctgcaagtttgacagaccacagtatgctgaaattcttgcagatcaccctcatgcactcatgtccaaggtatttattcgcgataagctcatggagcggcgtaaccgtcgcacaggaaggacagagaaagcgcggatctgggaagtgacggacagaacggtcaggacctggattggggaggcggttgccgccgctgctgctgacggtgtgacgttctctgttccggtcacaccacatacgttccgccattcctatgcgatgcacatgctgtatgccggtataccgctgaaagttctgcaaagcctgatgggacataagtccatcagttcaacggaagtctacacgaaggtttttgcgctggatgtggctgcccggcaccgggtgcagtttgcgatgccggagtctgatgcggttgcgatgctgaaacaattatcctga

SEQ ID NO: 5012 - DNA, 795 bp, Homo sapiens
  SIMILAR (448)..(792): 1001254mologous to Plasmid F Protein D,accession number M12987,Smith-Waterman Score=584.
atgggcgtcttccgaatgaagaccccaagatgggaagctgtccattgtgtttcaaaatcctcgaatagtcctacaggagcattgagagagccttggatccagctcaggagagaggagcccctgcatggctcccccattgagaaatttgtgaagtcttcagaagaacatttcccagtggcctccctgtttgcacatctgcaggtgctggtgagtgtgaaccacctgtccctgcctgacacggaaccagatccttctcaggactcacctggggctcgtcaaaacaacatccacaacctctctgtattttatgaaagggagctctttagaagaacaaagtcaggcccgacctggaaaggaaatgatcctgcagcagttctgagggcctatgccctccctaaggatttcttgggattctgggttgggggggtatttattcgcgataagctcatggagcggcgtaaccgtcgcacaggaaggacagagaaagcgcggatctgggaagtgacggacagaacggtcaggacctggattggggaggcggttgccgccgctgctgctgacggtgtgacgttctctgttccggtcacaccacatacgttccgccattcctatgcgatgcacatgctgtatgccggtataccgctgaaagttctgcaaagcctgatgggacataagtccatcagttcaacggaagtctacacgaaggtttttgcgctggatgtggctgcccggcaccgggtgcagtttgcgatgccggagtctgatgcggttgcgatgctgaaacaattatcctga

SEQ ID NO: 5013 - DNA, 1461 bp, Homo sapiens
  SIMILAR (1)..(630): 1001254mologous to unidentified cloning vector 29kD protein essential for the replication of mini F plasmid,accession number AB015619,Smith-Waterman Score=1098.
  misc_feature (1)...(1461): n = a,t,c or g
atggcggaaacagcggttatcaatcacaagaaacgtaaaaatagcccgcgaatcgtccagtcaaacgacctcactgaggcggcatatagtctctcccgggatcaaaaacgtatgctgtatctgttcgttgaccagatcagaaaatctgatggcaccctacaggaacatgacggtatctgcgagatccatgttgctaaatatgctgaaatattcggattgacctctgcggaagccagtaaggatatacggcaggcattgaagagtttcgcggggaaggaagtggttttttatcgccctgaagaggatgccggcgatgaaaaaggctatgaatcttttccttggtttatcaaacgtgcgcacagtccatccagagggctttacagtgtacatatcaacccatatctcattcccttctttatcgggttacagaaccggtttacgcagtttcggcttagtgaaacaaaagaaatcaccaatccgtatgccatgcgtttatacgaatccctgtgtcagtatcgtaagccggatggctcaggcatcgtctctctgaaaatcgactggatcatagagcgttaccagctgcctcaaagttaccagcgtatgcctgacttccgccgccgcttcctgcagcattttctggctcatgctggctgtcccaaaggcacccagaacttcacgtttagaatgaaatttatcatcttctccattaaaaaagttttacctcctgttgacacaatcttagctcatgaccccgttatccatacttgtcatctgagagagtcctttggtagtgtctctccttcatctccaaaatctaatcggttaccatgccctgaagtgatcttatttcattatggtgaaagttggaacctcttacgtgccgatcaacgtctcattttcgccaaaagttggcccagggcttcccggtatcaacagggacaccaggatttatttattctgcgaagtgatcttccgtcacaggtatttattcgcgataagctcatggagcggcgtaaccgtcgcacaggaaggacagagaaagcgcggatctgggaagtgacggacagaacggtcaggacctggattggggaggcggttgccgccgctgctgctgacggtgtgacgttctctgttccggtcacaccacatacgttccgccattcctatgcgatgcacatgctgtatgccggtataccgctgaaagttctgcaaagcctgatgggacataagtccatcagttcaacggaagtctacacgaaggtttttgcgctggatgtggctgcccggcaccgggtgcagtttgcgatgccggagtctgatgcggttgcgatgctgaaacattatcctgagataaatgccttggccctttatttgaaatgtggaactgagtggatatgctngttttgtctggtaaacagagaagctggctggtattccctggagaagcgaaccaaacaatga

SEQ ID NO: 5014 - DNA, 1206 bp, Homo sapiens
  SIMILAR (1)..(357): 891254mologous to Homo sapiens pot. ORF I,accession number X03145,Smith-Waterman Score=563.
atgggggactttaacaccccactgtcaacattagacagattaatgagacagaaagttaacaaggatatccaggaattgaactcagctctgcaccaagcagatctaacagacatctacagaactcttcaccccaaatcaacagaatatacattcttctcagcaacacaccgcacttattccaaaactgaccacatagttggaagtaaagcactcctcagcaaatgtaaaagaacagaaattatgacaaactgtatctcagaccacagtgcaatcaaactagaactcaggattaagaaactcactcaaaaccgctcaactacatggaaactgaacaacctgctcctgaatgactactggggttcacacccaaagtccccccccacgggaccctgttccaaaaggcccgaaaaaaaagggcggggacgaaagcaaggtaagcaaaatctgaaagcgggctacccgggaaagcgtcagttccaaaccaggaaccccccccagaacggacagaagaacaaacacattaacccgattttaaaaattaaaaatccaaaagcatgtttccccaggattcaacctacagcagacagaaattttttttcctctgaactttttactggcatcctgctccacaaagggtaccctgctcctgctgacttaatgtctcagaactttgatgtcgttggtctcagacaccactttaccattcactatctggcaggtggtggtcttttggattgtttgcatggagttgctgctgtccagggcatcaccaagattgaagtcctcgccatcttccagtgggcagcggtagctggtgatctcagcctccagcttgagcttgatgttcagcagggcctcttactcctgggcctgacgctgtctctgaaggccagagaaagcgcgttctggggagtgacggacagaacggtcaggacttggattgggagggcggttgccgccgctgctgctgacggtgtgacgttctctgttccggtcccaccacatacgttccgccattcctatgcgatgcacatgctgtatgccggtataccgctgaaagttctgcaaagcctgatgggacataagtccatcagttcaacggaagtctacacgaaggtttttgcgctggatgtggctgcccggcaccgggtgcagtttgcgatgccggagtctgatgcggttgcgatgctgaaacaattatcctga

SEQ ID NO: 5015 - DNA, 1434 bp, Homo sapiens
  SIMILAR (64)..(1065): 981254mologous to Homo sapiens Net,accession number Z36715,Smith-Waterman Score=1668.
atgggagaaattgcttttcccatctgtgcatctgtgatggtgggctttgacctgcagcatggtatggagagtgcaatcacgctgtggcagttcctgttgcagttgctgctggatcagaaacatgagcatttgatctgctggacctcgaacgatggtgaattcaagctcctcaaagcagaagaagtggccaagctgtggggactccgaaaaaacaaaacaaatatgaactatgataagctgagcagagccctgcgatactattatgacaagaacatcatcaagaaggtgatcgggcagaagtttgtgtacaagtttgtctctttcccggagatcctgaagatggatcctcacgcggtggagatcagccgggagagccttctgctgcaggacagcgactgcaaggcgtctccggagggccgcgaggcccacaaacacggcctggccgccctcagaagcacgagccgcaacgaatacatccactcaggcctgtactcgtccttcaccattaattccctgcagaacccaccagacgccttcaaggccatcaagacggagaagctggaggagccgcccgaagacagcccccccgtggaagaagtcaggactgtgatcaggtttgtgaccaataaaaccgacaagcacgtcaccaggccggtggtgtccctgccttccacgtcagaggctgcggcggcgtccgccttcctgttctcgtccgtctcggccaagatctcctctttaatgttgccaaacgctgccagtatttcatccgcctcacccttctcatctcggtccccgtccctgtcccccaactcacccctcccttctgaacacagaagcctcttcctggaggccgcctgccatgactccgattccctggagcccttgaacctgtcatcgggctccaagaccaagtctccatctcttcccccaaaggccaaaaaacccaaaggcttggaaatctcagcgcccccgctggtgctctccggcaccgacatcggctccatcgccctcaacagcccagccctcccctcgggatccctcaccccagccttcttcaccgcacaggtatttattcgcgataagctcatggagcggcgtaaccgtcgcacaggaaggacagagaaagcgcggatctgggaagtgacggacagaacggtcaggacctggattggggaggcggttgccgccgctgctgctgacggtgtgacgttctctgttccggtcacaccacatacgttccgccattcctatgcgatgcacatgctgtatgccggtataccgctgaaagttctgcaaagcctgatgggacataagtccatcagttcaacggaagtctacacgaaggtttttgcgctggatgtggctgcccggcaccgggtgcagtttgcgatgccggagtctgatgcggttgcgatgctgaaacaattatcctga

SEQ ID NO: 5016 - DNA, 1509 bp, Homo sapiens
  SIMILAR (230)..(1195): 741254mologous to Cloning vector pSacBII SacB,accession number U09128,Smith-Waterman Score=1249.
  misc_feature (1)...(1509): n = a,t,c or g
acaggaagctacagacgtagaaaccaaggcagtgagtgaagtctgtctggtggcagaggaggaggaaggaggcagcccgaaagacgctgatgacacatcaatctacatgttttatcaaaaggtcggcgacaactcaatcgacagctggaaaaacgcgggccgtgtctttaaagacagcgataagttcgacgccaacgatccggggctgaaagatcagacgcaagaatggtccggttctgcaacctttacatctgacggaaaaatccgtttattctacactgactattccggtaaacattacggcaaacaaagcctgacaacagcgcaggaggctaggcagaaaatacttgacccaatcttggctaaatctctgattgggactctagaggatccccggccgctgcaaaacgctgacggaacagtagctgaatacaacggctatcacgttgtgtttgctcttgcgggaagcccgaaagacgctgatgacacatcaatctacatgttttatcaaaaggtcggcgacaactcaatcgacagctggaaaaacgcgggccgtgtctttaaagacagcgataagttcgacgccaacgatccgatcctgaaagatcagacgcaagaatggtccggttctgcaacctttacatctgacggaaaaatccgtttattctacactgactattccggtaaacattacggcaaacaaagcctgacaacagcgcaggtaaatgtgtcaaaatctgatgacacactcaaaatcaacggagtggaagatcacaaaacgatttttgacggagacggaaaaacatatcagaacgttcagcagtttatcgatgaaggcaattatacatccggcgacaaccatacgctgagagaccctcactacgttgaagacaaaggccataaataccttgtattcgaagccaacacgggaacagaaaacggataccaaggcgaagaatctttatttaacaaagcgtactacggcggcggcacgaacttcttccgtaaagaaagccagaagcttcagcagagcgctanaaaacgcgatgctgagttagcgaacggcgccctcggtatcatagagttaaatatgattaccattgaaaaagtatttattcgcgataagctcatggagcggcgtaaccgtcgcacaggaaggacagagaaagcgcggatctgggaagtgacggacagaacggtcaggacctggattggggaggcggttgccgccgctgctgctgacggtgtgacgttctctgttccggtcacaccacatacgttccgccattcctatgcgatgcacatgctgtatgccggtataccgctgaaagttctgcaaagcctgatgggacataagtccatcagttcaacggaagtctacacgaaggtttttgcgctggatgtggctgcccggcaccgggtgcagtttgcgatgccggagtctgatgcggttgcgatgctgaaacaattatcctgagaataaatgcctttgcctttatatggaaatgg

SEQ ID NO: 5017 - DNA, 1425 bp, Homo sapiens
  SIMILAR (1078)..(1422): 1001254mologous to Plasmid F Protein D,accession number M12987,Smith-Waterman Score=584.
atggggatgacagtacctgctctacttctcgggattgtcatgaggttcaaactaagcgacagagcctatgtgactgtgctggctgttaagctattgtttctcagcactaatccacctctgctctgggatgctggagctgggactctgcaaaccacgctccccctgccagctgctccttgttacgattgccaaaagcggggaatggtcacagggcacgtcccaggacaagcagaggcaagcaagcagggcacctgggacgcagcacgtcaggaggcactgactctctgtgtggaccctgcagttgcccaaccacatggaaatgctaaactctgtccttttaccatctccaatttacggacacagaccctgattagtgatgaaggcttgatgaggttaactgccttgcccaaggttacacatgatgaagcacaggttatcattagtgttagtgtattttatgtgtggcccaagacaattcttcttccaatgtggctcagggaagccaaaagattgaacaccgctgccctaggctttcacattcactcaccactcactgactcacccagagcaacttccagtcctgcaagctccattcatggctgccccagccacctgaaaagcatgccaggacctgaaatagcagccatactcgttggtctgcaaaatgcttttttctgccagtttgatatttttgtcactgtggatcctcatgttctgtatttaaaatatgaagacacttattcaggtataatcaatgcaccaagcaggctatgttctccaggtgggggccctggacagcagcagcagcatcctccggaacttattagaaatgttcctgctcccgccaatcccagacctattgaatccaaaactctaagggtggggcccagccatctgctttttaacaaggcctccaggtgtacagccaaatttgagaaccactgtgccactacacagggcattggaccagatgtcaaatgcagttggcccagggcttcccggtatcaacagggacaccaggatttatttattctgcgaagtgatcttccgtcacaggtatttattcgcgataagctcatggagcggcgtaaccgtcgcacaggaaggacagagaaagcgcggatctgggaagtgacggacagaacggtcaggacctggattggggaggcggttgccgccgctgctgctgacggtgtgacgttctctgttccggtcacaccacatacgttccgccattcctatgcgatgcacatgctgtatgccggtataccgctgaaagttctgcaaagcctgatgggacataagtccatcagttcaacggaagtctacacgaaggtttttgcgctggatgtggctgcccggcaccgggtgcagtttgcgatgccggagtctgatgcggttgcgatgctgaaacaattatcctga

SEQ ID NO: 5018 - DNA, 1404 bp, Homo sapiens
  SIMILAR (1)..(960): 941254mologous to Cloning vector pZC320 SopA,accession number U26464,Smith-Waterman Score=1562.
atgaaactcatggaaacacttaaccagtgcataaacgctggtcatgaaatgacgaaggctatcgccattgcacagtttaatgatgacagcccggaagcgaggaaaataacccggcgctggagaataggtgaagcagcggatttagttggggtttcttctcaggctatcagagatgccgagaaagcagggcgactaccgcacccggatatggaaattcgaggacgggttgagcaacgtgttggttatacaattgaacaaattaatcatatgcgtgatgtgtttggtacgcgattgcgacgtgctgaagacgtatttccaccggtgatcggggttgctgcccataaaggtggcgtttacaaaacctcagtttctgttcatcttgctcaggatctggctctgaaggggctacgtgttttgctcgtggaaggtaacgacccccagggaacagcctcaatgtatcacggatgggtaccagatcttcatattcatgcagaagacactctcctgcctttctatcttggggaaaaggacgatgtcacttatgcaataaagcccacttgctggccggggcttgacattattccttcctgtctggctctgcaccgtattgaaactgagttaatgggcaaatttgatgaaggtaaactgcccaccgatccacacctgatgctccgactggccattgaaactgttgctcatgactatgatgtcatagttattgacagcgcgcctaacctgggtatcggcacgattaatgtcgtatgtgctgctgatgtgctgattgttcccacgcctgctgagttgtttgactacacctccgcactgcagtttttcgatatgcttcgtgatctgctcaagaacgttgatcttaaagggttcgagcctgataaagctactcttttacaagatcccttctatgctagtgagttcagtcctgctattggaagtcaaaagccatatagttggcccagggcttcccggtatcaacagggacaccaggatttatttattctgcgaagtgatcttccgtcacaggtatttattcgcgataagctcatggagcggcgtaaccgtcgcacaggaaggacagagaaagcgcggatctgggaagtgacggacagaacggtcaggacctggattggggaggcggttgccgccgctgctgctgacggtgtgacgttctctgttccggtcacaccacatacgttccgccattcctatgcgatgcacatgctgtatgccggtataccgctgaaagttctgcaaagcctgatgggacataagtccatcagttcaacggaagtctacacgaaggtttttgcgctggatgtggctgcccggcaccgggtgcagtttgcgatgccggagtctgatgcggttgcgatgctgaaacaattatcctga

SEQ ID NO: 5019 - DNA, 873 bp, Homo sapiens
  SIMILAR (526)..(870): 1001254mologous to Plasmid F Protein D,accession number M12987,Smith-Waterman Score=584.
atgtcatatcaggccacaaaaataacaattcatgaaaataccactagttcttcaaactggagttcatcaggattcttaagaaatctggtgcagatcccctttgtggaggtgataatgaaggggaagaaggaagggggagcaggagttgacccagctgctgaggttggttgtgtagagcgccacccagagggggatgggccgagaaccgctggggaggtagcagccagaggtggtcctctccgacccactactctgtcgatcatcactggggaggtggaaagacaaggcaagatcctcattttgttgcctgctcaggcctgtgcgcacttactctccatggacacgacggtgagcgtggagcagcccgcggtctcgctgcccccttcactcccggacccccagcctccccagagtggaggggcaagcacacattggcccagggcttcccggtatcaacagggacaccaggatttatttattctgcgaagtgatcttccgtcacaggtatttattcgcgataagctcatggagcggcgtaaccgtcgcacaggaaggacagagaaagcgcggatctgggaagtgacggacagaacggtcaggacctggattggggaggcggttgccgccgctgctgctgacggtgtgacgttctctgttccggtcacaccacatacgttccgccattcctatgcgatgcacatgctgtatgccggtataccgctgaaagttctgcaaagcctgatgggacataagtccatcagttcaacggaagtctacacgaaggtttttgcgctggatgtggctgcccggcaccgggtgcagtttgcgatgccggagtctgatgcggttgcgatgctgaaacaattatcctga

SEQ ID NO: 5020 - DNA, 2053 bp, Homo sapiens
  SIMILAR (211)..(843): 921254mologous to Mus musculus protocadherin,accession number AF281899,Smith-Waterman Score=1032.
atgtggaagcgactttggagctgggtaacaggcagaggttggaacagtttggaggactcagaagaagacaagaaaatgtgggaaagtttggaacctcctagagacttgttgaatggctttgacaaaaatgctgatagtgatatgaacaataaggtccaggctgaagtagtctcagatgtaggtgaggaacttgttgggaactggagcaaagggactcctgaggattacccacgatttttccatatgcatcctaggacagcagaacttagtctcctggagccagtaaacagagactttcaccagaaatttgatttggttattaaggctgaacaagacaatggtcatcctcttcctgcctttgccggtctacacattgaaatactggatgaaaacaatcaaagtccatattttacaatgcccagttatcaaggctatatcctggaatctgccccagtgggagcaaccatttcggacagtctcaatttgacttcacctttaagaatagtagctctggacaaggacatagaagatacaaaagacccagagcttcacctttttctgaatgactacacctcagtcttcaccgtcacacagactggtattactcgctacctcaccttacttcaaccagtggacagggaagaacagcaaacttacaccttttcgataacagcatttgatggtgtacaagaaagtgagccagtcatcgtcaatattcaagtgatggatgcaaatgataacacgccaaccttccctgaaatatcctatgatgtgtatgtttatacagacatgagacctggggacagtgtcatacagctgctgatggcaacaaaagacactggggactactatggagggagagagggagaagagacaattgaaaaattaactattgtgtactatactcagtatctgggtgacagaatcaatcataccccaaacctcaacatcatgcaatatacccagggggcttccgaggcgatcaagcagtgtcagtcttcagccgctaagccgagaagatctgggaaggagtcagtcagccttgggccagagttccaggggctctgggagtggctgccagtgatcttatttcattatggtgaaagttggaacctcttacgtgccgatcaacgtctcattttcgccaaaagttggcccagggcttcccggtatcaacagggacaccaggatttatttattctgcgaagtgatcttccgtcacaggtatttattcgcgataagctcatggagcggcgtaaccgtcgcacaggaaggacagagaaagcgcggatttggggaagtggacggacagaacggtcaggaacctggatatgtcgaggcgggttgcccgccgctgctgctgacggtgtgacgttcatctgatcccggtccaccacaatacgttccgccattcatatgcgatgcacatggtgttatgcccggtaataccgctgaaagttttgcaaagcctgatgggacataagtccatcagttcaacggaagtctacacgaaggtttttgcgctggatgtggctgcccggcaccgggtgcagtttgcgatgccggagtctgatgcggttgcgatgctgaaacaattatccttgagaataaatgcccttggcctttatatggaaactgggaaactgagtggataatgctgttttttggctgctaaaaaaagaagctgggctgttatccccttgagaagcgaccgaaacaggccgggaaaatctccccttattggggaagatccggattatttaatctaaggaccctggggtaccggttataggaaagaatggttctgtcatgatgcctgcatgcggtaacgaaaacgatttgaatatgccttcaggaacaatacaaatctttctgcgggggtaccttgaattggagcggattatgttagcaatgggccgaacaacctaatgaacacaaaaccatgatggggcctgtccttttacagccagtagtgctcgccgcagtccagcgacagggcgaagccctcgagtgagcgagggagcacccaggaacagcacttatatattctggg

SEQ ID NO: 5021 - DNA, 432 bp, Homo sapiens
  SIMILAR (155)..(196): 851254mologous to Escherichia coli K12 putative transport protein,accession number AE000265,Smith-Waterman Score=56.
atggggccactgggcttcacccaggctgtggtgggcatggggctcacccgggccggcgggtctaaagcccccgggaacggtggcggcaagtactggattttcacaatggctcttgtacatcgaaacaatatcccggacccctgtggaactggagctcaagaactcgaaagtgcgcaaagacgtgctatccccgggccgcacagcctgtatttggtgcaggatgcgcaacttgaacatgctatggagatcgcgaaggtgtctgttcaagccttacaggcatatcgggccccacccccgaggatggagcaagcaaaccccaagaccccgccggacgccaatttatacaagaaagggccatcaccatcaccacgaagggccaacaccacaagactaggctctcgagccacaaagacgatacaccccgacagctga

SEQ ID NO: 5022 - DNA, 1407 bp, Homo sapiens
  SIMILAR (783)..(953): 921254mologous to Escherichia coli FixA protein,accession number D90812,Smith-Waterman Score=259.
ttaaacacgaggagaggctttcagagactctttacatcggtgagcccgaaagctatggtgcaataataaggcgacccgtcgtcgaagatcgtatatctcgatgagacatctcatagtaagattgtgataagacgacagccactcaggtagtaatacaacgagcaggtgtatagaccttatactctcgagggctgggcaactctggaaccggttggaacttggtccggggcggcgggattttgccctggtgcctgggattaacccgtggaactccacggaacaggccttggcacttggcaagcccaagccaccctttgggttaccaagaacttggaaagggcaacaccggcgttcccgttggcactggcccaagtaaacagccggtataaaggctggcaccgggtggcggtaccaccagaggtgttggcgatgtggccccagaaagaattttggccgtggcaatttccaaataatgcaccgggggggttgaaaacgttggggcgttagccccccttggcccagaagcaggcggttgcgtcgcaatctcattccccctgtgggggcttccatcggagatggttccgtatgcgactcacaggagaaatcatgaaaataataacctgctttaagctggtgcctgaagaacaggacattgttgtcactccagaatacaccctgaatttcgacaatgccgacgccaaaatcagccagttcgatctcaatgccattgaagctgtcaagccagctcgcaacagatgacgatgagatagccgcgctgaccgttggcggcgtcattgttgcagaactcgaaagtgcgcaaagacgtgctatcccgcgggccgcacagcctgtatttggtgcaggatgcgcaacttgaacatgcactgcctctcgataccgcaaaagcgctggcggcagcaattgaaaagatcggcttcgatttactgatttggacatcatctcgtatccaagccgtagctctggcgtcaccgctctcgaatacttaacggtgaccacagcacttccattgcgactgaaagcgcattcattcggggtaaatctagtggcaaggccaatgtgatacttgactaggagcccagagcgacgccatcgttgcgtgaaactggtcgggcagttcgcagtaccggccagcaaacacgaaccgtaagtcacactcatatatgcgatacacgattcagctcggaggaccattgcacgaggctggacggaacagtctgaagaaagtccctgaactgaagccggccgggcatcgtcgcgtcttcggtcgtcaattcgagtcggggccgtcttatagtcccaaggatcgtttctcaattggttcacagcaacaccaatcagtgcccacatttgcacactcttgatggccacacacttccacaccaccat

SEQ ID NO: 5023 - DNA, 1672 bp, Homo sapiens
  SIMILAR (551)..(739): 921254mologous to Escherichia coli FixA protein,accession number D90812,Smith-Waterman Score=288.
atgaatattgaatttttcgatccgcctcgcatcgtgagcggtttaaccctcaatcggatcaacatccagcacccatttcaccttacgggaatccggtattgtattgatgagcgccagcgtaccgttaatgatgtgttgcaagcgcacgcgggaagggtgctgcaacaatatctgccagcgccagcgaccgccacgtttaggtgccagagccggaaccggaccgagaacccacagtttctcgtctgccagtgggctggagaggatcagattacgcagttgttgcaggaacaatggcgcgtgctgattgttatgatcttccgcacgcacaatcacatggctggtccacggcgatggttccgtatgcgactcacaggagaaatcatgaaaataataacctgctttaagctggtgcctgaagaacaggacattgttgtcactccagaatacaccctgaatttcgacaatgccgacgccaaaatcagccagttcgatctcaatgccattgaagctgcaagccagctcgcaacagatgacgatgagatagccgcgcgtgaccgttggcggctcattgttgcagaactcgaaagtgcgcaaagacgtgctatcccgcgggccgcacagcctgtatttggtgcaggatgcgcaacttgaacatgcactgcctctcgataccgcaaaagcgctggcggcagcacttgaaaagatcggcttcgatttactgatatttgtgaagggaacttgccttgtccttcttgtggcctttgggttagtcaccacccattttcagccatgcttatttggagtgcagaatggggaacaagagacagttcagattctgctggtgggggttgtgggagggatggaaagagcagagcgcatcatcataccattcacactagccatcaacaaccagcccaccacgcgcctcaccaaaaccatagcacagggcatgcccgcaatcatacaacgcaacattcctaacccccgcatctcactccagccagcacccacgccgagacacagcgcaaacccagcgaccatgcagccacacgcccaagcaactccaactcccaaaccgcacacgaggacatacccgacgcgaccaccacaccctcagcgcagtgccacaccgggaacccaaagaacacccacccccggaccacaaacggcaagagacagagcaccaaaaccagaccacaccagaccacaaacagcacacacagctcaccacacatccaacgacccacaacagagacatcgcacacggcaacgccacacgaacaaacaacacccgcaccccgcacccccacggctccccacactcccacagaacaacaagcgacagaaaccagccgaatccgacacacgcaaacaccatacaccacacatgagacaacccaccgcgcatgcggaaacgacagcacggaacacacaagcggcacaacactgccacacacagaacacaccacaagcaaatagacacgccacaggcgaccgcccagagcaccaccaggcgagagaccgcacaaggatcgaccccaagccgaacccagatccacgaacaattacaggacatacaaaaggaacaacatacgcacacaaacatacccccctggccacccaccacatgacccggccaaccaccggccaccgccacgggacccaccactga

SEQ ID NO: 5024 - DNA, 1452 bp, Homo sapiens
  SIMILAR (642)..(4): 951254mologous to Escherichia coli orotate phosphoribosyltransferase,accession number X00781,Smith-Waterman Score=1024.
ttaaacgccaaactcttcgcgataggccttaaccgccgccagatgttccgccatttccggcttctcttccaggtaagcaatcaggtctttcagggtgatgatagagatcactttgcagttgtaatcacgctcaacttcctgaatcgccgaaatctcgccgcgcccgcgttcctgacgatcgagcgaaatcaacacgccagcaagcgtcgcgccattggcctgaataatctccatcgactcgcgaatcgccgttccggcggtgatcacatcatctaccagcattacgcgtccttgtaacgcgctaccaaccagattgccgccttcaccgtggtcttttgcttctttgcggttaaagcagtacggcaggtccaggtcgtgatgctccgccagtgccacagcggttgtggtggcaatcgggatccctttgtaagcaggggccaacagcagatcgaactcaatgccggaatccaccaacgcttcagcgtaaaaacgggctaacagtgccagatcgcgcccggtattaaacagaccggcgttgaagaaataggggcttttgcgcccgcgattcagcgtaaactcgccacactttaacacctggttgctaagcgccaattccataaactggcgctgatatgggttcatgccttcgctcctcatcttacttttgtgattaaacccgatgggcaggtactcaggagcgtcgttagtcagccggagaatggcctctaccactttacctggccactcgatagcaatgcggcaaccggtatgtggcatattcgcgctaacacgggcgataatcagtatcggatgtgggatttccacgtcgaagattttatgccagagcgcatggcgctgaatctggttttgaattcggcgatatagctgccgaaaatctttcccgcacgctggatgaagttcagttgacgctggatgataaagggcgcggcgaagtttcgctggactaaaaagcgcagaataatccgtattgcagattcgctgtaccgccgggtgctgaatcatccgctcagcaaaaatagcatggtactcttccatcacattctcgacgcgaccaatttctacgacagttttatcggcataaaagtcatatgcataaagcgttggggcaacgaagattgcattgtgcatcgcaccaaaagctttcatcaaagcggcatcatcaaactcgccgaggatttctacgtttaatccctgggagttaaaccagttaagcaatttgcgccctaacattgaacgtcgcccaggaatcaaaagtcgccgttcttccagacaagccgggaacggtttttctggtggtggatttgtacaccagaaactcacgccacattcgccaattctcacggagaacaggccttcctgctgcgtagagtctatcggacagtcagaaatgatcatatccagtttatgctgacttaattgctccagcagcat

SEQ ID NO: 5025 - DNA, 424 bp, Homo sapiens
  SIMILAR (49)..(423): 801254mologous to Escherichia coli similar to,accession number D90883,Smith-Waterman Score=502.
ttaaacgtagaaatcctcggcgagtttgatgatgccgctttgatgaaagcttttggtgcgatgcacaatgcaatcttcgttgccccaacgctttatgcatatgacttttatgccgataaaacactggtaccgttgaccgatgcactggcgaatacgtggcaaaagcagttcccgcttgattacggcaaagggcgactgtggggctcggtggcgtttgtcattggctcggcgctgacgggcaaactggtcactatgtttgattatcgggtgatcctcgcgctgttgacgttgggcgtggcatccatgctgctcggctttctcatccgtccgacgattcagccacaaggggcaagtctccagcaggagagcaccggttggtctgcgtggttggcgctggttcgccagaactggcgctttctggccg

SEQ ID NO: 5026 - DNA, 303 bp, Homo sapiens
  SIMILAR (25)..(135): 971254mologous to Escherichia coli ybaE,accession number Z54355,Smith-Waterman Score=195.
atggaccgcagcagcagttcactggaattcccactgatcggcacgggtccttttcgcttaacacaattcacagcagagctggtgcgcctggaaagccatgattattaccatttacgtcatccgctgcttaaagcggagccgtccttcaacagagcacttaactgtggcatgcagaatgccctttcagagatagttcatatctctgccatctctgccatctctgccaacaagccagtcccatctgccagtgtcttcgactgcaatggtagctaccttttcagctgctactgtagtctggaatga

SEQ ID NO: 5027 - DNA, 771 bp, Homo sapiens
  SIMILAR (771)..(499): 981254mologous to Escherichia coli 4-hydroxybenzoate- octaprenyl transferase,accession number M93136,Smith-Waterman Score =459.
ttactctgctttttcttcgacgggagttgttgaggttaagggtgaagtcaatgccgccagtgagccgcctgaaacgccaatttcattgagcaaggagtcaatcagcggtgcctgtgtgcggtaagagagagcggctgataatgcttgttccgccaggtttccgccccccacattacccgtgtttgcatcacccgcagcgccgccacgattcagaccatcgacctgaataatcttgataccggcgattgacttcagccggcttttccccccgtgtggctcatatcccccgggcctttccaccctacaccttcggtcacccgcgttccgctggagaaagagatccgcaccttcgcgcaacgtctctccgtgctgcacggcatcaacgccccggagttcttcgacaagccgttgttcagttctctggtgctgacactgcgtgatgaagggtatatcagcgatagcggcgatgccgaaccggcagaaacgatgaaggtttatcagttgcagaccaacatagttattattcataaatgctttaaagcaggcttcacgctcgcggttggcaatcagtttttgttgataaacaaacagcgcgccagccaccagaattgaccagtaatatccccagcctaagccatttaactcaccgatgatcgccatcagtgccagtacgccaatctgcaaaataccaataatcaatttatcgtattggccgaacaggattgccgtggatttaatgccaatcttcacatcatcatcgcggtcaaccat

SEQ ID NO: 5028 - DNA, 1732 bp, Homo sapiens
  SIMILAR (1)..(606): 971254mologous to Escherichia coli tdcABC operon transcriptional activator,accession number U18997,Smith-Waterman Score=958.
atgagcactattcttcttccgaaaccgcagcacctggtagtctttcaggaagtcattagaagtggttctatcggctcggctgcaaaagaattagggttaactcaaccgaccgtcagtaaaatcattaacgatattgaagattattttggtgtggaattagtggtgcggaaaaataccggtgtaacattaacacctgccggtcaattgttactctcccgttccgaatccattacccgtgaaatgaaaaatatggttaatgagataagcggtatgtcttctgaggcggtggtggaagtctcatttggttttccttcattgattggttttacttttatgtcagggatgatcaacaagttcaaagaggtgttcccgaaagcgcaggtttctatgtatgaagcgcaactgtcttcgttcttaccggcaatccgcgacggtcgactggattttgcgattggtacgttaagtgcagaaatgaagcttcaggatttacatgttgagccgctgttcgagtccgagtttgtgctggtagccagtaagtcccgaacatgcaccggcaccaccacgctggagtcgttgaagaacgaacaagagatgattatgccgcaacatgaccaattacatcgctatctgtttgaaaactttgccgtgcgcggcgaactggtaaccgtttcggaaaccctgcaacagatccttgagaaccacgattatccgcagcccgttaaaaacgtgctggcagaactgctggttgcgaccagcctgttaaccgctacgctgaagtttgatggtgatatcaccgtacagctgcagggcgacggtccgatgaatctggcggttattaacggtaacaataaccagcagatgcgcggtgtggcgcgcgtgcagggcgaaattccagaaaatgccgacctgaaaacgctggtcggcaatggttacgtggtgatcaccattaccccgagcgaaggcgaacgctatcagggcgtagttggtctggaaggtgataccctggcggcctgcctggaagattactttatgcgttctgaacagctgccgacgcgcctgtttattcgcaccggcgacgtagacggcaaaccggctgcaggcggtatgttgttgcagagtgccaacccgtcgatcaaccgcggtacgctggagaaagagagccgcaccgtcgcgcaacgtctctccgtgctgcacggcatcaacgcgccggagttcttcgacaaggcggtgttcagttctctggtgctgacactgcgtgatgaagggtatatcagcgatagcggcgatgccgaaccggcagaaacgatgaaggtttatcagttgctggcggagttgattacatcagacgtgcgtttgacgattgagagtgcgacgcagggcgaagggtaatcagagagaattgccggatgcggcgaaaacgccttatccggccttccataatctgcaaattcaataaattgcgatgtgttgtgtaggcctgagaagcgccgcgcatcaggcaacccagaagaaagccggatgatcatccggcttttttacatcatcagaaatgccagtaactcattgccagccctaaaaatagtaccagaccaacatagttattattcataaatgctttaaagcaggcttcacgctcgcggttggcaatcagtttttgttgataaacaaacagcgcgccagccaccagaattgaccagtaatatccccagcctaagccatttaactcaccgat

SEQ ID NO: 5029 - DNA, 1818 bp, Homo sapiens
  SIMILAR (1)..(756): 1001254mologous to Escherichia coli sn-glycerol-3-phosphate acyltransferase,accession number K00127,Smith-Waterman Score=1264.
atgcgcaacgtgccctactccacggactctaccgttccttcagccagcgccagcgagcttatcgatcacgcgctgcaaatgaacaagtttgaagtcgagaaagacacaatcggcgacatcatcattctgccgcgcgagcaagcggtgctgatgacctactatcgcaacaacattgcgcatatgttggtgctgccttcgctgatggcggcaatcgtcacccagcatcgccacatctcccgcgacgtattgatggagcacgtcaatgtgctttacccaatgctgaaagcggagctgttcctgcgctgggatcgcgacgagttgccggacgttattgatgcgctggcaaatgagatgcaacgtcaggggctgattaccctgcaagatgatgagttgcatatcaacccggcgcattctcgcacgctacagctgctggccgcaggcgcgcgcgaaacgctgcaacgttatgccatcaccttctggttgttgagtgccaacccgtcgatcaaccgcggtacgctggagaaagagagccgcaccgtcgcgcaacgtctctccgtgctgcacggcatcaacgcgccggagttcttcgacaaggcggtgttcagttctctggtgctgacactgcgtgatgaagggtatatcagcgatagcggcgatgccgaaccggcagaaacgatgaaggtttatcagttgctggcggagttgattacatcagacgtgcgtttgacgattgagagtgcgacgcagggcgaagggggttacgccgcacaccggattttggatcaaagaaagggtacccgtgaacagatgttctattcctacttggatcaccttctcggctcccaagtgcgcgataaaggaggaccccggggccatcttcctgaacgtgctgaagaactggcttgcactcacacggggttatttgcattttacttctcacacattcatatcccctctggtgatagtaccactgccaagactttcatgtgggggacccataccctctacccactctcagtccaaatggttaagtgggtacgttacgcgttgctacgcgacgtggcgctcaacacatcagatactactctcacacgagtactcactcgagtactcatgcgccgatacgcctcaacactgtttctctctgcgaacttcctcgtttgcggtctactgcgcaactacatgagactacagcgatctcttgggttctactcaccaatagatggtctctgctgcaaaaaaaaggagacaacacaaagaaaaaaaccacgaaagacaaaacagaagacggagaagacagaaggggggaccagggcgggacgaggcaaaggacaagagacgagaaagcagaacgccgagaaaggaggagagaaccggcgggcagagaagcggagaaaaacgaaagaagaagggggaagccagaggaacaagaagaagaagagagggagaggaggacaaacagaagacaggacagaagacaaggagacggaacagaagagaagggagcgggaggaagagaaaaaggggaagggcgaagggagcgaagggagaggcgagaggagaaggagaaaaggagaaacacaaaaacgggaaggggagagaaaagcaggcgaggcggagaggccagcgaggagggaaagaagccgggaaaaagcagaaggggacagagagagcaggagaagaagagacaagcagagacgagagagactgcgagagagaaagaaggaaaagaaagacgaggagcgagacggctcagagaacgaggacattaaccatatttttcatttcacgggtaatggattcggaacgggagagtaa

SEQ ID NO: 5030 - DNA, 354 bp, Homo sapiens
  SIMILAR (326)..(18): 951254mologous to Escherichia coli glycerol-3-phosphatase transporter (AA 1 - 452, glpT),accession number Y00536,Smith- Waterman Score=543.
atgcattttatcaagacgatccccagcaggaacagcagcggcggaataccaccaccgacgttgtgcgcacagttccacactgacacaatgccgccacgttctttctgcgaccaccagtgcaccatagtacgaccacacggcggccaccccatcccctggaaccaaccgcagaggaacaacagtacaaacatcaccgcaatgctcgatgtcgcccatggcacaaagcccataaacaacatcactgccgccgccagaatcaaacctgcgggcaggaaaacgcgcggattcgagcgatccgataccgaacccatgagtgaatttagaaaatccatttacattataattagaacctaa

SEQ ID NO: 5031 - DNA, 681 bp, Homo sapiens
  SIMILAR (1)..(561): 241254mologous to Caenorhabditis elegans coded for by C. elegans cDNA yk127b8.5; coded for by C. elegans cDNA yk127b8.3,accession number U39850,Smith-Waterman Score=136.
atgacagataaacagcaaggcgaaaaacagaaacagaagacagaggacaagacaaagacaaaacagaaacagagaaagaacaaaacagacaagaggcgaaagacaaagaccgaaaggaacacacaacggacacccgaaaggcagacgaacacaaaccagacccggacaaaacagaaaggccggatacaggcgtcactcaggcagatactagacaagatactagcgcgcggcgggctaatgcgccagcccagatctgccgcagcctggatggcggcgttgcgtggagcccgtgaccccaaactgatcacaatggttccacactccaaaattagccggtcgatagtccgcaagggcctacctatgacagaaacacagagaagaacagagacaagcaaaaactacagaccaagagaacaacaaacaagaaacaggcaacaacaagacccaagacaacagagaacagtgcagacacatcagcaagaagagagacgagaaacaaaagacaacaacacacacacgaaaccacacgagacactagcaagaagacatcgacgacataatattcacgcgctggcagctgcggacctggtcattgaagcggcgtctgaagtctggaagtcaaaaaagcgctctttgcacagctggcggaagtttgcccccacaaacgctattgaccactaa

SEQ ID NO: 5032 - DNA, 1016 bp, Homo sapiens
  SIMILAR (353)..(679): 1001254mologous to Escherichia coli 3-hydroxybutyryl-CoA dehydrogenase (EC 1.1.1.157) (b- hydroxybutyryl-CoA dehydrogenase) (BhbD),accession number D90777,Smith-Waterman Score=563.
atgttcgacccacggattgattccggggatcctcagatcacacatgttcggaatttactgcctggttttactgtatggacatgtgctgctgaagcgctgacccgcgcaatcgacgggatacacgcgcggctaaattcacgcgtgacgcggggaaaactgactgctgaaacctgtgaacgcacattgaaacgcctgatcccggtgaccgatattcacgcgctggcagctgcggacctggtcattgaagcggcgtctgaacgtctggaagtcaaaaaagcgctctttgcacagctggcggaagtttgcccgccacaaacgctattgaccactaacacttcgtcaatctctatacaccgcgattgctgcggagataaaaaatcctgaacgtgttgcggggctgcatttttttaacccggcaccggtgatgaagttggtggaggtggtcagtgggctggcaacggcggcggaagttgttgagcagttgtgtgaactaacgttgagttggggtaagcagcctgtgcgctgtcattcgactcctggatttatcgttaaccgtgttgcgcgtccttattattccgaggcctggcgggcactggaagagcaggttgctgcaccagaagtgattgacgctgcacttcgcgatggcgctggtttcccgatggggccgctggaattaaccggacctgattgggcaggaccgccattttgctgtcacctgttcggtgtttaacgctttctggcaggagcgtcgttttttaccttcgctggtgcaacaggaactggtgattggtggacggttgggcaagaaaagtgggctgggcgtgtacgactggcgcgcggaacgtgagccagttgttggcctggaagcggtaagcgacagttttagcccaatgaaagtagaaaagaaaagtgacggtgtcacggaaattgacgatgttttattgattgagacaccaaggcgagacggcacaggccctggcaatacgactggcacgcccggtggtagtgatcgataa

SEQ ID NO: 5033 - DNA, 1038 bp, Homo sapiens
  SIMILAR (1038)..(334): 991254mologous to Escherichia coli BipA protein,accession number AJ278218,Smith-Waterman Score=1199.
tgggaagggtaaccatttcccggggaaccctttggcccgtgtttaaatttagagcgggaccggggggcccagtcttttttgccccttttttaggggggatggtttctccgccattgcttaatcctttggggttaaaccagatgaagcatcttacgcttacgccaaaaaagaaagcaattaacggcgtatgactttgcagataattgtgacaaagctctctattgacgtaaccacagacttataagggagatactcgcattggtgtgcgctcacgacaggcaaaaaaaaacctgccatcgctggcaggttttttatgactaaaaaacgaaattaatcgtctttcggtgcgcggttggcgcggcgacgatcgttttccgtcaggtgacgtttacgaatacggatagagctcggagtcacttctaccagttcgtcatcatcgatgaactccagagcttgttccagagtcatgcggataggcggaaccagaacaacggcttcgtcagtaccggaagcacgcatgttggtcagtttcttaccggtcaggcagtttacagtcaggtcgttagagcggctatgaataccgataatctgaccttcgtaaacttctgcaccgtgaccgaggaacagcttaccgcgatcctgcagaccgaacagcgcgaacgcgaccgctttaccctgaccgttagagatcagtacgccgttctgacgctgacccacttcacccggacgtacgtcgtcgtagtggctgaaggtggagtacagcagaccagtaccggaagtcatggtcatgaactcagaacggaagccaatcagaccacggcttgggatcacgtagtcgagacgtacgcggcctttaccgtctggattcatgtttttcaggtcgccttgacgttcgcccagcgcctgcattacagaaccctgatgctgttcttcaacgtccagagtcacgttttcatacggctcttgtttacgaccgtcgatttcacggaagataactttcggacgggataccgccagttcgaaaccttcacgacgcat

SEQ ID NO: 5034 - DNA, 4332 bp, Homo sapiens
  SIMILAR (454)..(1386): 991254mologous to Escherichia coli formylglycineamide ribonucleotide synthetase (EC 6.3.5.3),accession number M19501,Smith-Waterman Score=1557.
atgaagaaggctttacgcttcgtcaccttccaccatgatacgcaccagcgacttttagtgctgcaacgcaacccacaccgaagaaaatcaacaacccggtaccgaggaattcagcaatgcactggcaaacgcggattcaggcacaggcgaacggttactggctggagcgggagcagtggctggcggtgggtgaacaatggttttggcggatggaatggtcaggcccgcatcgagcagccgcaggaaggttatgccatcatcatggaaacgacgccacctggcaccggggttaatttcatctttgtttccgaccctgcgtttgataaaggatatgcgtttgatttcttctgtctggaaccgatgagccatgcgccggatgatcatcatcgcccggaagggggtgatctcattgcgctagcaccaggggaatcaacaacttcagagatgtcgttgcgggtgccggtcgctaactgcgcggtcactaccgccagcctcgacagctactacggtgaagcgatggcgattggcgagcgtgcgccggttgcgctgctggatttcgccgcctctgcccgtctggcggtcggtgaagcgttaaccaacatcgccgcaacacaaattggcgatatcaaacgcatcaaactttccgccaactggatggcggcggcaggccaccctggtgaagatgcgggcctgtatgaagccgttaaagccgtgggcgaagagctttgtccggcgctgggcctgacgatcccggtgggtaaagactccatgtcgatgaaaacccgctggcaggaaggtaacgaagagcgcgaaatgacgtcgccgctgtcgctggtgatttctgcatttgcccgcgtggaagatgtacgtcacaccatcacgccgcagctttctaccgaagataacgcactgctgctgattgatttgggcaaaggcaataacgcgctgggcgcaacggcgctggcgcaggtttatcgtcagcttggcgacaaaccggcagatgtacgcgatgtcgcgcaactgaaaggcttctatgacgcgattcaggcgctggttgcacagcgtaagctgctggcgtatcacgaccgctctgatggcggcctgctggtaacgctggcggaaatggcctttgctggtcattgtggcattgacgcggatatcgccactctgggtgacgatcgcctggcggcgttgtttaacgaagaactgggtgcggtgattcaggttcgtgccgctgaccgtgaagcggtcgagtccgtactggcacagcatgggcttgctgattgtgtccattatgtaggtcaggcggtttccggtgaccgttttgtgattaccgccaacgggcagactgtattcagcgaaagccgcaccacgttgcgtgtctggtgttcgaggttgaacagcaggataatgaaatggtggtctatgctgccccccgtgatgtgcgtgaacgtaaacagattcagtaagatcctgccagttcacgcgtgccagactggaagtcatcagcacgccaacgtaaatcagcgcaccagctgcagcgtaacctggcaccatccccgccagcggcgacagaaagataaccagcaggaacagcagaccaacaaccactgccgtcagaccggtacgaccgccaaccgatacgccggaagaggactcaatataagccgtaacggaagaagtaccgataaacgaaccggtcacggaagagatactgtcgacatacagcgcctgcttcatgcgcgggaatttccccttctcatccgccagacctgctttatcggtcacgccaatcagcgtaccggaggagtcaaacaagttgaccaacatgaaagagaaaatcacccctgccagcccgaggagctaacgctggtgagaaatgaaaggctttttgcgtttatccttgatgcgctacgcgatgtcgacgtcacgaaactgaaaaaaccgctctacattctggcgactgctgatgaagaaaccagccacaccgtggctgagagcaacgacgagaaactgttccgcatagcgaaaatcaggaatcgaaaaatgactaagcccatcgtttttagtggcgcacagccctcaggtgaattgaccattggtaactacatgggtgcgctgcgtcatgcgactcagttcgccgaagtaggcctatcgcatcggtcactggttgtggaatcagggcgtcgcgcactggcaatctttctgcaaaaccaggtttctgtgacgtcccaggtcgatattcacccggcagcaaaaattggtcgcggtatcatgcttgaccacgcgacaggcatcgtcgttggtgaaacggcggtgattgaaaacgacgtatcgattctgcaatctgtgacgcttggcggtacgggtgtgatgattggcgcgggcgcgaaaatcctcggcaatattgaagttgggcgcggcgcgaagattggcgcaggttccgtggtgctgcaaccggtgccgccgcataccaccgccgctggcgttccggctcgtattgtcgaggaatcccccttgccgccggaagcgcagctgatgatgcagttaagcattgagaatggctataaacgctttatcacgctggttgctgatgcgcgtcattcgacgccggagcagattgataaaattgcccaggcccacgtctggaccggtcaggatgcaaaagctaacgggctggtcgatagtctcggggatttcgatgatcttaactgtagcctatatctatactataagttacaccagcaattgtccaatcggatcctgagtgatatatcgcccctgcagcgggtcataatagcggtggcggttgtaatacaggccggactcctcatcatactgctgccccggcagccggataagctgctgcagctgatgcgggttctcttcattgcgaacgtttcacaggtgatgcatatcatcggtgacgttgcaggtcgtgactgcgtactggtcgatgatatgatcgacactggcggtacgctgtgtaaagctgctgaagctctgaaagaatgtctggcctctcttccattctcttcttgtcaacatcgcgacaactttcgtaaaacatccctaccctgcttcaggtatactatgcccctcgattccacaaacatcaggcagaccatgacagacttaatccaacgccctcgtcgcctgcgcaaatctcctgcgctgcgcgctatgtttgaagagacaacacttagccttaacgacctggtgttgccgatctttgttgaagaagaaattgacgactacaaagccgttgaagccatgccaggcgtgatgcgcattccagagaaacatctggcacgcgaaattgaacgcatcgccaacgccggtattcgttccgtgatgacttttggcatctctcaccataccgatgaaaccggcagcgatgcctggcgggaagatggactggtggcgcgtatgtcgcgcatctgcaagcagaccgtgccagaaatgatcgttatgtcagacacctgcttctgtgaatacacttctcacggtcactgcggtgtgctgtgcgagcatggcgtcgacaacgacgcgactctggaaaatttaggcaagcaagccgtggttgcagctgctgcaggtgcagacttcatcgccccttccgccgcgatggacggccaggtgacgtttacgaatacggatagaggtcggagtcacttctaccagttcgtcatcatcgatgaactccagagcttgttccagagtcatgcggataggcggaaccagaacaacggcttcgtcagtaccggaagcacgcatgttgcgctgggcggcggtttcccggtcggtgcgttgttggcaaccgaagagtgcgcccgcgtgatgaccgttggcactcatggcaccacctatggcggtaatccgctggcctcggcggtggcaggcaaagtgctggagctcatcaacacaccagagatgcttaatggcgttaaacagcgtcacgactggtttgttgagcgtcttaatactattaatcaccgctatggtttgttcagtgaagttcgcggcttaggtttgctgattggctgtgtactgaatgccgattacgccgggcaagcgaaacagatctctcaggaagcggcgaaagcaggcgtgatggtactgattgcgggtggcaacgtggtgcgttttgcgcctgcgctcaatgtcagcgaagaagagccgaggttcatcatgatggtcatccgtcccgttgagcgatcagatgtctcggcgctgatgcagcttgccagcaaaacgggcggcggcttcaaacagcttcgaatcagcgataaaagcatcctgacagttaccgcccgcgaaagcccgcgatga

SEQ ID NO: 5035 - DNA, 626 bp, Homo sapiens
  SIMILAR (1)..(102): 1001254mologous to Escherichia coli matches PS00017: ATP_GTP_A and PS00301: EFACTOR_GTP; similar to elongation factor G, TetM/TetO tetracycline-resistance proteins,accession number L19201,Smith-Waterman Score=166.
atgcgtgcttccggtactgacgaagccgttgttctggttccgcctatccgcatgactctggaacaagctctggagttcatcgatgatgacgaactggtagaaggggccgctgccgcttttgaagcgctggagatgatgggctcaggccgcgatcgcgaaattccgctatggcgaaggttcgcccgtggtttgacatccgttctgccctgcggcggtgggatcacgctgacgctccataaactacgcctcggcacagcctctgctccgccgtgctgaaccgcctggaacagaaaaaaccggtggggctgcgctacgatccgcaagcacaatcgctggtgtgcctgcccacgcaaacccggacgggctggaatctcaatggctttgaggccagtataacacacagggccctcagaacctcaagatacgacggacagtattactgtcagggtcctcggaccctcacgatacgacggacagtaataatgacagggtcctcggaccctcacgatacgacggacagtaataatgacagggtcctcggaccctcacgatacgacggacagtattactgtcagggtcctcggaccctcacgatacgacggacagtaataatgacagggtcctag

SEQ ID NO: 5036 - DNA, 519 bp, Homo sapiens
  SIMILAR (94)..(456): 951254mologous to Escherichia coli evolved beta- galactosidase,accession number X03228,Smith-Waterman Score=608.
atgccacgctttcctgcgaagtggtgctggaaaatctcgccgcctcccctgtcgtcacgacgctggaatataccctgtttgatggcgaacgcgctggtgcacagcagcgccattgatcatttggcaattgaaaaactgaccagcgccagtcttgcttttactgtcgaacagccgcagcaatggtcagcagaatccccttatctttaccatctggtcatgacgctgaaagacgctaacggaaacgttctggaagtggtgccacaacgcgttggcttccgtgatatcaaagtgcgcgacggtctgttctggatcaataaccgttatgtgatgctgcacggcgtcaaccgtcacgacaacgatcatcgcaaaaggcgcggcgttggaatggatcgcgtcgagaaagatctccagttgatgaagcagcacaatatcaactccgtgcgtaacgctcattacagaaagaggagaaataaagaagtaagaacgaagaaaaagatagaaagtatagaagagaagtaa

SEQ ID NO: 5037 - DNA, 681 bp, Homo sapiens
  SIMILAR (3)..(26): 1001254mologous to Escherichia coli Rhizopine catabolism protein MocA,accession number D90769,Smith-Waterman Score=47.
atgcttcgtactactgcacccgcaacgtatctggaactggtagctgtctgtgacagccgcctttcccagcggcaggcgctggcagaaaaatacgggaatgcatccgtgtgggacgatccgcaggccatgctgctggcagtgaaacctgatgtggttagcgtctgctcacctaaccgttttcattacgaacataccctgatggcactggaagcgggctgccatgtgataacaggcgcgggaaatgtcgataccgcgcgcaaactgggcaaggtgctggcctacgactttcaccatcgttttgcgctcgatacgcaacagctgcgtgaacaggtgaccaacggcgttttgggagagatttacgttaccaccgcccgcgccctgcgtcgctgcggcgttcccggctggggtgtctttaccaataaagaactgcagggtggtggcccgctgatcgacatcggcattcacatgctggatgctgccgatgtatgtgctgggctttccgcgcgcgtcgaagattcgctgtgtggcaccattgaattacatagcggctgcattctgtggctggagacgtcatttgcgctcaacatccgcgaacatgcgattatgaacatccgcttttgtggtgataaagctggtgcgagcgtgtttccagcacatatctacaccgctacacaacgatga

SEQ ID NO: 5038 - DNA, 294 bp, Homo sapiens
  SIMILAR (19)..(291): 461254mologous to Escherichia coli nitrite extrusion protein,accession number X94992,Smith-Waterman Score=154.
ctactcctttatggtgctatattcggtggacgccgatggacggtttttagtactgcaatcctgattttccttgcgtctggctcggaattgccgtgcaaaatccgaatactcctttgggatatttatcgttatcgctttgctatgcggttttgcaggtgcaaacttgcttcgagcatgggcaatatcagtttcttctttccaaaagccaaacaaggagcgctctgtatttgcctttccggcgtcaatggcgtaccgcaggccgacggttcggtgatgtcgctggcgatgccgcat

SEQ ID NO: 5039 - DNA, 837 bp, Homo sapiens
  SIMILAR (7)..(807): 971254mologous to Escherichia coli Nitrite extrusion protein 2 (Nitrite facilitator 2),accession number D90787,Smith-Waterman Score=1308.
acctctttttattaccccgcattaccctccgtttctggggcattattgcgtgttccctactcctttatggtgcctatattcggtggacgccgatggacggtttttagtactgcaatcctgattattccttgcgtctggctcggaattgccgtgcaaaatccgaatactccttttgggatatttatcgttatcgctttgctatgcggttttgcaggtgcaaactttgcttcgagcatgggcaatatcagtttcttctttccaaaagccaaacaagggagcgctcttgggattaatggcggattaggaaacttaggtgtaagtgtaatgcagctggttgcaccgctggtcatttttgtacctgtatttgcctttctcggcgtcaatggcgtaccgcaggccgacggttcggtgatgtcgctggcgaatgccgcatggatttgggtaccgctactggcgattgccacgatcgccgcatggtcagggatgaatgatatcgccagttcacgcgcctcaattgccgaccagctccctgtcttacaacgcctgcatctctggctgctgagcctgctttaccttgccaccttcggttcgtttatcggtttttctgcgggttttgccatgctggcaaaaacccagttcccggatgtgaatattctgcgcctggcgttctttggcccatttatcggtgccatcgcgcggtcggttggtggtgctatttccgataatttcggcggcgtgcgggtgacgttgatcaactctatttttatggcgattttcagtgccctgctgtttctttaccttaccgggcaaaaccccttgcggccgcatcgaatataa

SEQ ID NO: 5040 - DNA, 212 bp, Homo sapiens
  SIMILAR (2)..(121): 621254mologous to Escherichia coli Protein AraJ precursor,accession number D90797,Smith-Waterman Score=103.
tcagtatgcgtctgcgttggtgagtacggcgattgcgctgttgctggtgatgcctggcattcctgtaccctgcggcgaaccagtgaaatacacctccggggtgctgagtattttctggggggatcccgatggatgatcatcggggcttctgtaaccaggatgcatccggctcgtagtcttgtgaggaattgtgacctggataacaatgttaa

SEQ ID NO: 5041 - DNA, 327 bp, Homo sapiens
  SIMILAR (1)..(318): 891254mologous to Escherichia coli K12 aconitate hydrase B,accession number AE000121,Smith-Waterman Score=487.
atgcagggtggttacaacattcatccgctgatcgacgcgctggatgatgccaaactggcacctattgctgccaaagcactttctcacacgctgctgatgttcgataacttctatgacgtagaagagaaagcgaaacgaggcaacgaatatgcgacaggttatgcagtcctgggcggatgcgaatggttcctgaatcgcccggcgctggctgaaaaactgaccgttactgtcttcaaagtcactggcgaaactaacaccgatgacctttctccggcaccggatgcgtggtcacgcccggatatcccactgcacgcgctgggatgctga

SEQ ID NO: 5042 - DNA, 866 bp, Homo sapiens
  SIMILAR (691)..(864): 671254mologous to Escherichia coli CDP-DIACYLGLYCEROL--SERINE O-PHOSPHATIDYLTRANSFERASE (EC 2.7.8.8) (PHOSPHATIDYLSERINE SYNTHASE),accession number D90886,Smith-Waterman Score=183.
atggggttagcgcaagcgaagctcttgatcgaagccccggtaaacggcggccgtaactataacggtcctaaggtagcgaaattccttgtcggcggtgccagcctgaacgatgtttacctgcatcagcacgataaatatcgctacgaccgttatcatctgatccgtaaccgtgagaagacccatcattatgcccgaatgggttacacagaatattatgaatggccgcggcgttaatcgtctggatgatgttaatcggccaaaaagcccggaaatcaagaacgatattcgtctgttccgccaggagctgcgtgatgccgcttatcatttccagggcgatgccgacaacgatcagctttctgtaacgccgctagtggggctggggaaatcgagtctgttgatcaagcaccattttccatcgtatgcgttgggccgagcagaacctctccatctgttcgtcatccttcaaccggccagcaatctttgtgcgcaatattatccagctgttgcgcgaaggaaaaaaggtcgaaattactgttggtgataaacacgagaatgacttctacattccggaagatgaacctttcaagataattggcgcattgccttatctctatgagatcaatctgcgtcgtttcctgagccgtttgcagtattacgtcaatactgaccagctagtggttcgggtatgggaaagaagacgacaaccacctatcacctggaaaggatggtggggtgatgataagtggatggtgattaccgggaaataaactggacccgcgcgcctggcgtctggatctggaaaacgccattttgatccacgatccgcaacttgagctggcgccacagcgagagaaagaactggagct

SEQ ID NO: 5043 - DNA, 3486 bp, Homo sapiens
  SIMILAR (2131)..(2874): 991254mologous to Escherichia coli K12 6-phospho-beta- glucosidase A; cryptic,accession number AE000373,Smith-Waterman Score=1350.
gttatgttcttctttttgccaggcctgttaatggcgtcctgggcaacccgtacgcctgctatccgcgatattctctctgtctcgatcgctgaaatgggcggagttctctttggtctgtcgatcggttcgatgagcggtattctctgctcggcgtggttagtgaaacgctttgggacacgtaatgtcatcctggtcacgatgtcctgcgcattgatcgggatgatgatattaagtctggcactctggctgacatcgcccctgctctttgccgttggtctcggcgtctttggggcaagttttggttctgcggaagtggcgataaacgttgaaggtgctgccggtgagcgagaaatgaataagacgggtttgccgatgatgcacggcttttatagcctgggcacgctggcaggcgcaggtgtcgggatggcactgacggcctttggcgttccggcaacggtgcacattttattggcggcgctggtagcgcaaattgccgcctggtataaggcgcttcaggaacagatccccgactttattccccgtgcgccgcagcggcagatgattgcggacgtcgccaaaacgctggccggagaagaagggcgacatctggcgattgaagcccccaccggcgttgggaaaacgctctcttatttgattcccggcatcgccattgcccgcgaagagcaaaaaacgctggtggtgagtaccgccaacgtggcattgcaggatcagatttacagcaaagatttaccgctgctgaaaaagatcattcccgatcttaaattcactgccgcttttgggcgtgggcgctacgtttgtccgcgtaatctgacggcgctcgccagtactgaacccacgcaacaggatctgctggcgtttcttgacgacgaactgacgccgaacaatcaggaagagcaaaaacgttgtgcgaagctgaagggcgatctcgatacttataaatgggatggtctgcgcgatcatactgatatcgctatagatgacgatctctggcgtcgtttaagtaccgacaaagccagctgcctcaaccgcaattgttactactatcgtgaatgcccgttttttgtcgctcgtcgggagattcaggaagcggaagtggtggtggcaaaccatgcgctggtgatggcggcgatggaaagcgaagcggccaaaagcgaacgaatttcagacatcagcacccaactgaacgcctttcccggctgtgaagttgctgtcagcgacgcgccgacgttgattgtggtggtggaagcagaagacagcgaaacgctgatccaaaccattgagtcagtacgcaacgtagagggcgtgctggcggtgtcgctggtttatcaccagcaggaagagcaagctaacgccgttgcggccgctgcggcggctgccggtctcagcgtgccgggcgttgccgcgccgttgttggtcagcaggaagccatcaaatgggataaacgccgtccgtttctcggtactggttcggcgtctggtcgacgcacaggactgtgtgctgcaggcaccgacgacggaagaagataaatccaccaaccgcccttatacctcacgttatatcggttcactgggggcggatttccatggtaacctgctgaaaggcggtatttatctctacccaagcaccgccagccacccggacggcaaactgcgtttgctgtatgagtgcacccgatggcattcctggcggaacaagcgggcggtaaagcgagcgatggcaaagagcgtattctggatatcatcccggaaaccctgcaccagcgccgttcattctttgtcggcaacgaccatatggttgaagatgtcgaacgctttatccgtgagttcccggacgccgtccctaataccgttccaacgccaccgctcaaaagcgtaccgccaattaccactgaggcgatacatccagttccacacctacgcccgccagcgcatatccggcctgggtataaatcgagaagacaatccccgccagcgttgccagtccggtggagagcatatagatgcgaatagtggtgctgcgagtggatatccccatcagattcgccgacgtttcgttgccgctaatggcgtataccttgataccaaaccggaattgactcatctggagcctatgatagtgaaaaaactcaccttaccgaaagatttcttatggggcggcgcagttgccgctcatcaggtcgaaggcggctggaacaaaggcggaaaagggccgagcatttgtgacgttctgaccggtggcgcacacggcgtgccgcgcgaaatcaccaaagaagtcttgccaggaaaatactatccaaaccatgaagccgttgatttttatggtcactataaggaagacatcaagctatttgccgaaatgggcttcaaatgttttcgtacatccattgcctggacgcgcatttttccaaaaggcgatgaagctcagccaaacgaagaagggctgaagttctacgatgatatgttcgatgaactgctgaaatacaacatcgaaccggtgatcaccctctcccactttgaaatgccgctgcatctggtgcagcaatacggtagctggaccaaccgtaaagtggttgatttctttgtacgtttcgcggaagtggtatttgaacgctataagcacaaagtcaaatactggatgaccttcaacgaaattaacaaccagcgtaactggcgtgcaccgctgttcggttactgctgctccggcgtggtgtataccgagcatgaaaacccggaagagacgatgtatcaggtgctgcatcaccagtttgtcgccagcgccctggcggtgaaagctgcgcgtcgcattaacccggagatgaaagtcggctgtatgctggcgatgctacgtctttaccgatgtgcactaagcggctattaccggtcctatgtgttgacgattgggaccttccgggatttacatcaaaatggagtgatgcaccatatcactgctaccagccgcgttgtggtaattggtattggcgggctggggcatatcgctataaaacttctgcacgcaatgggatgcgaggtgacagcctttagttctaatccggcgaaagagcaggaagtgctggcgatgggtgccgataaagtggtgaatagccgcgatccgcaggcactgaaagcactggcggggcagtttgatctcattatcaacaccgtcaacgtcagcctcgactggcagccctattttgaggcgctgacctatggcggtaatttccatacggtcggtgcggttctcacgccgctgtctgttccggcctttacgttaattgcgggcgatcgcagcgtctctggttctgctaccggcacgccttatgagctgcgtaagctgatgcgttttgccgcccgcagcaaggttgcgccgaccaccgaactgttcccgatgtcgaaaattaacgacgccatccagcatgtgcgcgacggtaaggcgcgttaccgcgtggtgttgaaagccgatttttga

SEQ ID NO: 5044 - DNA, 850 bp, Homo sapiens
  SIMILAR (590)..(673): 1001254mologous to Escherichia coli yejO,accession number U00008,Smith-Waterman Score=145.
atgttggtgggtaaggtagtggtttctgagggcgcttcttttagaacgcatggtgccgtggataccagcaaagcgtacgtttcgctcgagaatagcggatggaccatcattgccgatatcactacgacgaaccaaaacaccctcctcaacttagccaaccttgcgatgtctgacgcaaatgtgattatgatggatgagccagtgactcgttcatcagtgacggcaagtgcggaaaatttcattacgttgaccaccaataccctgtcgggaaacggcaatttttatatgcgtaccgatatggctaatcatcagagcgatcagctcaacgtcaccggtcaggcaacagcaggagatagccttacactggtaacaacgggcggcggtgatgctgcatttacgttgggcaatgccggacgtgtgtttgatatcggtacgtatgaatataccttgctggataatggcaaccatagctggagtctggcagagaatcgcgcgcaaattactccttcaaccactgatgtgctgaatatggcggccgcacaaccgctggtatttgatgcagaactggacaccgtgcgtgagcgtctttggtagcgtaaaaggcgttagttacgatacggcgatgtggagttcggcaattaacacccgcaacaacgtgaccactgatgcgggactgcgtgcccaggctataaaaaccgtgcatcatcggcaaaaccgtcttattcatttctcgctcaacggcagcaccttcaacgtttatcgccacttccgcagaaccaaaacttgccccaaagacgccgagaccaacggcaaagagcaggggcgatgtcagccagagtgccagacttaa

SEQ ID NO: 5045 - DNA, 1777 bp, Homo sapiens
  SIMILAR (1199)..(1774): 961254mologous to Escherichia coli similar to,accession number D90868,Smith-Waterman Score=975.
  misc_feature (1)...(1777): n = a,t,c or g
agtatatggccttggggagttggccgtgctggcctttctgagatgcacaccttacaccctggagtctgaaccaggggccacaaaggaaccggtcgaacggacccggccaccagggcattggttgcgaacaaacaacaatggaccgggcttcgccaaatggcattacgccaacggttccaccgcgggctatgccgggggtcctggttccatgggcagcctgggtcaaacccaaatccttgggacgggcgccttggtccctggggcgaatccttcctggggcataggacatctccaaaaacccccgctgagccgccaacctttggacggcgacccacggccccgacgggatccatcagcggaaacccccaccggacgccaaacccgcacaccgggcgaaacctatcctccgccgaaccacgactaccttttcgcaagcgccaagaaagaaaagaagaacatcagtcggacccttctcgcggtttatactgacaatacgaaggaactaccgctgatagttatgaagccatcaccgcaacaccgcgaaggggtgaaagatgtgatgcgctttaacgagccgatgtacaaggttggagagcagaacagcgtctgtatgtcctgtcatctgccggaacagttgcaaaaagcgttctggccgcacgatgtccactactctaaggatcccggcaacagcgcggcgagtttttgctggaagggactgtcgggcgaatccccgttcacagccggttcatcgaagcgggcgaaacatcctgacgtcgtaaaactgcgggtaaatgagagacaagcccgcgcacgcggatatgcggtcaacagctcggacaaaggctcaatctcggacaaatacggcagggtaccgaaggccagcagatcggacccggcatccagcaagctaacacgcgcgggcgaagaaacgcctgagctgcctcaacgactacacatgataatcgccacggcaatcagagaccatcgacaagatacgcgcgctcatcaacgtggtgaagcgttgtcggattcgcgtgctcatcgacggcataaacctggtttgccggaagctggaacagatattcatcaacagatgttaagttgcaggttacctacggatgaataccacgccataaggcgctgcgacagtgccgatattctggcttgcgatctcaacggcaagacccgncaggctgacctagagtatcccgatatcgtgctgcgcggcgaatacggcaatctgctggaagcaaagcagcaacgtttggtggaaggagaaatgctgtttattccggcgcgcgcggctaatttaccggtcaacaacaaaccggtgatgctgttaagcctggtgttcgctccgacctggcttgggttatcgttttacgatagccgcaccacgtcgttgttgcatcctgctcgccagatccagcttcccagcctgcaacgcggtgaaggtgaagcgatgcttaccgccctcacccatcttagccgttcgccgctggagcaaaatatcattcagccgctggtgttaagtttgctgcatctttgccgtagcgtggtgaatatgccgccgggcaattcgcagccgcgcggcgattttctctatcacagcatttgtaactgggttcaggataattatgcccagccgctcacccgcgagagcgtggcgcagttttttaatatcacgcccaatcatctgtcaaaactgtttgctcagcatggaacgatgcgtcttatcgagtatgtgcgttgggtgcgaatggcgaaggcgagatga

SEQ ID NO: 5046 - DNA, 1098 bp, Homo sapiens
  SIMILAR (377)..(415): 921254mologous to Escherichia coli similar to,accession number D90868,Smith-Waterman Score=61.
atgaaagcaccaggcttgcccgccgatcaacaatttttcgccgatctgttcagcggcctggtgcttaacccgcaactactggggcgcgtctggtttgccagccagcctgcctcgttgccggtgggcagtttatgtattgattttccccgtctggatatcgtgctgcgcggcgaatacggcaatctgctggaagcaaagcagcaacgtttggtggaaggagaaatgctgtttattccggcgcgcgcggctaatttaccggtcaacaacaaaccggtgatgctgttaagcctggtgttcgctccgacctggcttgggttatcgttttacgatagccgcaccacgtcgttgttgcatcctgctcgccagatccagcttcccaagcttgcaacgcggtgaaggtgaagcgatgctttccggccctcaccctttttagccgttcgccgttggagcaaaatatcattcagccgctggtgttaagtttgctgcatctttgcggtagcgtggtgaatatgccgccgggcaattcgcagccgcgcggcgattttctctatcacagcatttgtacctgggttcaggataattatgcccagccgctcacccgcgagagcgtggcgcagttttttaatatcacgcccaatcatctgtcaaaactgtttgctcagcatggaacgatgcgttttatcgagtatgtgcgttgggtgcgaatggcgaaggcgaggatgattttgcagaaatatcatctgtcaattcatgaagtggcacagcgttgcggttttccggatagcgactatttttgtcgcgttttccggcgtcagtttggtctgacgccgggagagtacagcgcccgttttcagggctaacgtcagaaggttaattctgtttccagcagcgtcaggatactttgtgcatcttgcgcggcaaacaacgactggcggaagtttttattcaccagtttacgcgccagctgcgagaagactttcacatgattcatcccttcgttagcacccagcgtcagcatgatcaccagttcgacttcgcccatttctgactgccagccaatcggtttcgccagccgggcaatgctgatactggaatgac

SEQ ID NO: 5047 - DNA, 639 bp, Homo sapiens
  SIMILAR (86)..(595): 971254mologous to Homo sapiens S2P,accession number AF019612,Smith-Waterman Score=840.
tttcgtggcgcgcgcggtcagctgttggcggtgcagggaggaggacgccggggctcgccttccctcctctgccgccgctgccgccatgattccggtgtcgctggtggtggtggtggtgggtggctggactgtcgtctacctgaccgacttggtgctgaagtcatctgtctattttaaacattcttatgaagactggctggaaaacaacggactgagcatctcccctttccacataagatggcaaactgctgttttcaatcgtgccttttacagttggggacggcggaaagcatggatgctttaccagtggttcaattttggaatggtgtttggcgtaattgccatgtttagctcattttttctccttggaaaaacgctgatgcagactttggcacaaatgatggctgactctccctcttcttattcttcctcctcttcttcctcttcctcctcttcttcctcttcctcttcttcatcttcttcctcttcctcgcttcacaatgaacaggtgttacaagttgtggctcctggtataaatttacccctcaatcaactgacctatttcttcacggcagttctcattaatggcgttgtaccatgaaactggccatgggataaccacctttcagggaaacaagt

SEQ ID NO: 5048 - DNA, 873 bp, Homo sapiens
  SIMILAR (37)..(153): 971254mologous to Arabidopsis thaliana putative protein,accession number AL162506,Smith-Waterman Score=193.
atggtgaacaagtacatctatgatgtgtcacatactgaagaagaagaagaagaagaagaagaagaagaagaagaagaagaagaggaagaggaagaggaagaggaagaggaagaggaagaggaagaggaagaagaagaagaagaagaagatgattttgggaagattttaatacctatatgcaatttttttaatggttatgtttcttttgggtttactctttcctttaggatcaattctgataaattgtattcgtctacaaatgaaatcctccaagcttttagttgggcatgtcagcgaccttcacagcagcctctttcctcaccagccagaggcttagaagggaaaaatggtttcatgggctgggaccagagccctctggctctatgcagcctagggacttggtgccctgcgccccagttgctttggctccagccctggctaaaaggggccaacatatatttcaatcagttgcctcagagtgtgcaagccccaagccttggcatcttacatgtgatgttgggcctgcagatcatcccattgtctctgaagctcttagcagagaggaggacctggagtgggttgctcctctctgtagcaggtcatccctggagtgggaagctcctctctactactggttgtcctgacgttttccagctattggcagagaagctatctcctctctgcagctggttatccatcatctgctcagctctggctgagcccagggcttttatagacctcagagtggaagaagtgcatgctgattcatccatgggcagccatgggcagtcctggaaaaggcaccacaagttccaaatacagtccatgggactggtagcccagctcccagccttcaggtcctccctggcctga

SEQ ID NO: 5049 - DNA, 657 bp, Homo sapiens
  SIMILAR (331)..(119): 541254mologous to Homo sapiens dJ492J12.1 (novel protein similar to zinc finger protein human immunodeficiency virus type I enhancer-binding protein 1 (HIVEP1)),accession number AL121919,Smith-Waterman Score=163.
tttcagtggtttacttttgacggaagcgtgttcccatttggggacttgtgagggctatcaggccagttcaaccgtcccacatcccagttaggtgggtctatttgttgaagcttttacccatggcagcttgactgaccagggcccgagggtgactactggggacacccatcaaggtcagccccaagctgtagcccaactgagccaggtagagtctggggctcagaggcttcctcctaaggcaggcttccacagggtctggccctctatcctgccgtgtcctggcacttttgatgaaggatagtgagttgctcctggtgacaggcatgcattccctctggcaccttcaggtctcagccctgagctcactctccctcagactcagtgctgtgctcaggcaactgtgcagggcctggaggggaccagaagctggtcccagagtgggacaagtagcctgagtccatggtctcacacttccttaagaagaagaagaaaagaagagggagaagaagaagaggaagaggaagaggaagaagaagaagaagaggaagaggaagaagaagaagaagaggaagaggaagaggaagaagaagaagaagaagaagaggaggaagcaaaaacacaatagaaaagtggacaaaagatataaacagacagccc

SEQ ID NO: 5050 - DNA, 552 bp, Homo sapiens
  SIMILAR (301)..(465): 801254mologous to Mus musculus nuclear pore membrane glycoprotein POM210,accession number AF113751,Smith-Waterman Score= 213.
atggaccccgttttggtgctgctggaggccaggtatcccctgagatgcctcttagctcagtgcattcagttcagtgcccacttttcaagagaccccatctcaccgctcagcccagagcaggcctgtgataaagacctggcggctgctgcttggttgtttgggccgttcctctggtcccgaggctcgctctcactggaggagtggaagcagcccttggaatggcggagaccgtgtcagatgccccagatggcagttgctgcagccagcaggctggggctggcaggcatgggaatctggccagtacccttcagcccagatctctatgccaagcagtctgaaatccttctgagcaaccactacaccacctccgaggtcagggtctttggtgtcccagaggttctggagaacttggaggtgaaatccgggtccccggccgtgctggccttggtgaagaagtctcttgggtcacatacacggtcagcgtcgcggaacccgcggcggcagccgggggcctctgtccactaccttgaccttctccagccccgagactaa

SEQ ID NO: 5051 - DNA, 4512 bp, Homo sapiens
  SIMILAR (2838)..(2032): 991254mologous to Escherichia coli K12 putative amidase,accession number AE000365,Smith-Waterman Score=1342.
ttatacaattcgcgcaaaaccggcgtccagatcggcaatcagatcgtcgacatcttccagaccaatatgcaggcgaatcaaggtcccgctaaaatcgatctcgccttgtgggcgaatggcggcgatatgttctggttgatttgccaggatcaacgattcatacccgccccacgagtaggccatgctgaataaactgaagttatccagatagttcgccagctcttcattattgagttttttcttaagcacaaaggaaaatagcccgctgctgcctgtaaagtctcgtttccagaattcgtgacctttactgccaggcagagcagggtggttaactcgcgcaacttgcggatgttctgccagccattcagccactttcagactgctttcatgatgttgacgcaaacgcacacctaatgtgcgcaggccacggctggttatataggcggtatcggcatcgaccatctggcccatcagataggcattttcccgtagctgctcccagcaacgggcattgcacacggcagtgccaatcatcgcataccccaccaccgccaagcacggcgcgttgtgatctaaggatccccgaaaacgtttatccgctacaaacgcatgaagattcaacatgttgcaatagattttgtaggcctgataagcgtagggcatcaggcattgagcacctaatgccggatgcgtcgtgaacgccttatccggcttcgctttggcggtttcttcgccgaccagacctatcttcaggtaacccgcctgatgcagcgtatccattaccttcatcaacgtctcgtaatcgacggttttgtccgctcggaagaagatggtggtgtctttcttgccttcggttaacgcattcaacgccgtaatcattgtttcatcggtgaccggatcgttaccgataaacatcgagttgtctgccttcaccgacagataaaccggtttttccgggcgcggctgcggcgtgctggtagaagcaggcaagttcaccttcacatctaccgtcgctaacggtgccgccaccataaagataatcagcagaaccaacatcacgtcgataaacggcgtcacgttgatatcatgcatttcgccgttatcgtcgaggtttcgttcagatgcattgccatcggatattatcctgcgccgtaattccgtgcgacacgaaccggatgcgcacggggcgggcttcacgatcacggtcccggtttggcgcccaataccctccgagcccgagacagctcgacaccgccggcagagacgctttgccgttcggcagcggctcaacggttccctctttcggcaaccagccgtaataaccggtttccggctcgttcctttctgctgggcattggcagaacgcgcaagaccggtcaggcgataagagtaaacaccgtcatcatccaacgaatcgctaaagtcaaaaccagtctggaacaggctgtcagtaccggctttaaactgaacttctttcagcggttcggtggtcggacgcttgctgaccatattcaacaggccgccaggactgcttttaccgtaaagcacggaaaccgggccacgcataatttcagcgcgttccagcatatacgggtcaatgaccgcatcgttatagaagttgccctgcaacttcaggccattcagatagttattctggctttggccttctgccgcaaagccgcgaatgatcaggtggtcataggtgttggatgcgccacgcgtaccaacagagacacccggcgtgtagctaagcgcttcttttaccgacttcggctgatgcagcgccatctcttcggcggtcacaacagaaatagactgtggcactttttgaatcggcgtatcggttttagtgccggtagcagactgtcgcgccgcaatagttgcagcaagccccatgcgctttcttgggcgcaggtgaacggtaacgtgaagtgtctcttcggtcaacgcgccgtgataaagaatccgtacggtgtcggggctggcatccagggagttgcgtgggctggggtccagtttggggggtctatctttggttgagagcgcaaacacagaggaaccgctcggctgacgactggtaaaggcgtcggcatggatagagacaaacaggtcagcacgctgtttctgggcttttgctacgcgcacttgcaatggaatgaagatgtcttcattgcgcgtcatgtacaccttcatattgccctctttctcgatcagagagcgcaaacggcgagctatttgcaataccacatctttttcgcgcgttttgtatttccccaccgcaccggagtcttcgccaccgtggccagggtcaagcataatgacaatcggacgatcgcgccctgctttacccggttgtggaccactttgcgctggcggcacctgcttttcgaggtcgcctttgttgtaatcctccagcagcgccagcagcgggtcctgcatatcctgtgcattggccggatagaggtccatcaccagacgctctttaaacccggcgaccggcgcaagggcaaacagctgcggttttacgtttggctttaattcaaaaaccatccgtacggtttgcgggtcaaattgcccgacgcgcgccgacttgatgaacgggtcgtctgcacgaatttgtgccgccatccccttgagtaccgagttcaggtttacatcttcgatatccaccaccacgcgttcagggttactcaacgcgaactgcttatatttcagctgacgatttgattccaccgtcacgcgggtgtagctggacgcaggccagacgcgcaccgccacgacctggctgaccgcagccagactgacctgacttacgctcaatagccacatggcacccgcgcttatccccatattggcaatgtcggcaccaatgacgccgatgaagaatcttctcaggtacatgcacaaggtctggtgattcgcgacctgccgctgattgccagcaacttccgtaataccgaagacctctcttcttacctgaaacgccataacatcgtggcgattgccgatatcgatacccgtaagcatgctgcttgtgccgtgcctaatacactcgtggctcgtggtcttaggaagcatctgaagcgggtagcagctccacagcattggattgctggatgaattgactagtgtgtttgctccttgtccaaccaccagtccccacaagctgagagatgtgctgctgcctgaagattgtctgcatgaaggaaccagacttaagtatgccggggatccgtctagactggtgatgactgggcgaagcacatccgcagtggaaaacgtagcagttataccgcaggtgaattggtagtgccgaacggttcgatggtttccgctggggagaaaaaggcaaatggaatctggaatccattgccgccggtacggaaaccgaattgtcgttaaccctgctcggtcaacatgacgctgttgcaggcgtggccttcccctactttggcggcattgaaaatccgcattttcgcagcgtaaaacacaatccggtgctgtccggtggtcagcgtttatgatttggtactggcgaattacggcctcgatcgcgggctggaagatgaaaacagtgcgaaagattacgctgaaatcaaaccgtacaccccagccggcgtgccgcgccagtatattgaaaccatcgcccgtgaatttgccgataccgcccataaaacgcatgggcgctcgatgattatcctcggcgcaggtgttaaccactggtatcacatggacatgaactaccgcgggatgatcaatatgctgatcttctgcggttgtgtcgggcaaagcggtggcggctgggcacactatgtcggccaggaaaaactgcgcccacaaaccggctggttgcactggcctttgcgctcgaccggtaataacacgaaacgttggcgtaaagtagcggatgcgcacatcgctgtcgtcgctgtgcagcagaaaagcagtttccgaatggccgaactcgcgggcgataagctgcatttgcgcttcgctaagattatcggcggggaaaacaacaccggcagaattgccgcgaaacggttgtgaggtaaaagcatcgacgtggtacacaatttgatatcgacgagtaaagtactcaaacggcgcgctccacacatgcaccagtcgggtgaacgggaagagcaggaagatggtcattcccaacaccagatgcaggcggaagacgaacgctacgccgttgagcatctctgacgatccaccacggaaagtgacaatgctttgcgcccaacccaccagcttcatcatttcgctaccatcaggatactgtgctgaaaacggtatggtacttagccccaacagacactggatcagcaaaatgctcatgatgatgatatccggcgtagtggaagtggcacgcacgcgctgatttgtcagcctgcgccacagcagtcctgcgcggcaatctacgtcacacaccgcaaataacggcgagcacaatgccagaattgttcccgccctgcgaaaccagccgtaatacagggggtacat

SEQ ID NO: 5052 - DNA, 1902 bp, Homo sapiens
  SIMILAR (2)..(898): 991254mologous to Escherichia coli Anaerobic dimethyl sulfoxide reductase chain A precursor (EC 1.-.-.-) (DMSO reductase),accession number D90801,Smith-Waterman Score=1580.
gttgaaatatcccatgaagcgcgtcggcaagcgcggtgaaggtaaatttgaacggataagttgggacgaagccctggataccatcagtgataatcttcggcggatcctgaaagattacggcaatgaggctgtacatgtcctgtacggaacaggcgtagatggcggaaacatcaccaactcaaacgtcccgtaccgtctgatgaactcttgcggtggttttctcagtcgctatggcagctacagtaccgcacagatcagtgccgcaatgagttatatgttcggtgccaatgatggcaacagcccggatgatatcgccaatacgaaactggtcgttatgttcggaaataacccggcagaaacgcggatgagcggcggtggtgtcacttactacgtcgagcaagcccgcgaacgttcaaacgcacgcatgatcgtcatcgatccacgttataacgacactgctgccgggcgtgaagatgaatggctgcccattcgccctggcaccgatggcgcactggcctgtgcgattgcctgggtactgattactgaaaacatggtcgatcagccatttctcgacaaatattgtgttggttacgatgaaaaaacgctgcccgccaacgcaccacgtaacgcgcattataaagcctatattctgggcgaagggcctgacggcatagctaaaacgccggaatgggcagcaaaaatcaccagcatcccggcagaaaaaattatccagttggcacgagagatcggttcagcaaaacctgcttatatttgtcagggttgggggccacaacgacattccaacggcgagcaaacatcccgcgctattgccatgctttccgttctcaccggcaacgtcggcataaacggcggcaactcaggcgtacgcgaaggggcaacaggttcggcggttggggaagtcgttttcaatacttcaatgaccggttatcaagaaatcctcactgatccttcctattctcgtcaaatcgttactcttacttatccccatattggcaatgtcggcaccaatgacgccgatgaagaatcttctcaggtacatgcacaaggtctggtgattcgcgacctgccgctgattgccagccaacttccgtaataccgaagacctctcttcttacctgaaacgccataacatcgtggcgattgccgagtatcgatacccgtaagctgacgcgtttactgcgcgagaaaggcgcacagaatggctgcattatcgcgggcgataacccggatgcggcgctggcgttagaaaaagcccgcgcgttcccaggtctgaatggcatggatctggcaaaagaagtgaccaccgcagaagcctatagctggacacaagggagctggacgttgaccggtggcctgccagaagcgaaaaaagaagacgagctgccgttccacgtcgtggcttatgattttggtgccaagcgcaacatcctgcggatgctggtggatagaggctgtcgcctgaccatcgttccggcgcaaacttctgcggaagatgtgctgaaaatgaatccagacggcatcttcctctccaacggtcctggcgacccggccccgtgcgattacgccattaccgccatccagaaattcctcgaaaccgatgttccggtattcggcatctgtctcggtcatcagctgctggcgctggcgagcgatgtggagaaaaacgtggtaatgatcaccgcccagaaccacggttttgcggtggacgaagcaacattacctgcaaacctgcgtgtcacgcataaatcccatgttcgacaggtacgttacagggcattcatcgcaccgatgaaccggcattcagcttccagaggcaccctgaagccagccctggtccacacgacgcccgcgccggttgttcgaccactttatcgaagttaa

SEQ ID NO: 5053 - DNA, 456 bp, Homo sapiens
  SIMILAR (11)..(451): 961254mologous to Homo sapiens KIAA1679 protein,accession number AB051466,Smith-Waterman Score=812.
aacctgacgagcttatgcagttggacgtgtcgagcatgcactgtgtggagaaatgccctttcaggacagcatcctgaagcagctgtgttctgtgccttgcccaggagactgccatttaacagaatggtcagagtggagcacatgtgaattaacctgcattgatggaagaagctttgagactgtgggccgccagtctagatcaaggacttttataattcagtcttttgagaaccaagacagctgcccccaacaggttctagaaacacgcccttgtacaggaggcaaatgttatcactacacatggaaagcaagtctttggaacaataacgaacgaactgtatggtgccagcgttcagatggcgttaatgtcacaggaggctgctcccctcaggcccgtcctgctgccattcggcagtgcattccagcctgcagaaaacctttcttctactgtgcacg

SEQ ID NO: 5054 - DNA, 1228 bp, Homo sapiens
  SIMILAR (520)..(957): 811254mologous to Homo sapiens KIAA1679 protein,accession number AB051466,Smith-Waterman Score=639.
atgaagctcgggctgtggcttcggagagtggaagccccaagccttggcagcttccatgtggtgttgagcctgagggtgcaaagaagtcaagaattgaggtttgggaacctctgcctgtatttcagaagatgtatggaaacgcctgcgtgcccaggcaatagtttgctgctagggcaggcccctcatggaaaaccccctctagggcagtgcagaagggaaatatgggtcgagcccccacacagagtccctagtggggtgctgcctagtggagctgtgagaagagggccattgttctacatcctcgtgaatggtagacccactgacagcttgcaccgtgtgcctggaaaacctgcagacactcaacgccagcccatgaaagcaggcaagagggaggctgtgccctgcaaagccacagggatggagctgcccaagaccatggcaacccaccttttgcgtcagtgtgacctgaaagtgagacctggagtcataggagatcattttggagctttaaaatttgactgccccactggatttcggacttgcctgggccgcataacccctttatttttgccaagttctcccatttggaatggctgtatttttccaatacctgtgccgggtggagactgtggggaaggagttcagatccgcagcctttcctgcatggtccacagtggttcaatatctcatgcagctggacgtgtcgaggatgcactgtgtggagaaatgccctttcaggacagcatcctgaagcagctgtgttctgtgccttgcccaggagactgccatttaacagaatggtcagagtggagcacatgtgaattaacctgcattgatggaagaagctttgagactgtgggccgccagtctagatcaaggacttttataattcagtcttttgagaaccaagacagctgcccccaacaggttctagaaacacgcccttgtacaggaggctgctcccctcaggcccgtcctgctgccattcggcagtgcattccagcctgcagaaaacctttctcctactgtacacagggtggagtctgtggttgtgagaagggctatacagagataatgaaatcaaatggtttcctggattactgcatgaaagtaccaggctcagaggataaaaaagctgatgtgaaaaacctttctgggaaaaacagacctgtgaattcaaaaatacatgatatttttaaaggatggtctcttcaaccacttgatccag

SEQ ID NO: 5055 - DNA, 519 bp, Homo sapiens
  SIMILAR (175)..(519): 341254mologous to Rattus rattus potential ligand-binding protein,accession number X60660,Smith-Waterman Score=191.
atgctgcggatcctgtgcctggcactctgcagcctgctgactggcacgcgagctgaccctggggcactgctgcggttgggcatggacatcatgaaccgtgaggtccagagcgccatggatgagagtcatatcctggagaagatggcagccgaggcaggcaagaaacagccagggatgaaacctatcaagggcatcaccaatttgaaggtgaaggatgtccagctgcccgtcatcacactgaactttgtacctggagtgggcatcttccaatgtgtgtccacaggcatgaccgtcactggcaagagcttcatgggagggaacatggagatcatcgtggccctgaacatcacagccaccaaccggcttctgcgggatgaggagacaggcctccccgtgttcaagagtgagggctgtgaggtcatcctggtcaatgtgaagactaacctgcctagcaacatgctccccaagatggtcaacaagttcctggacagcaccctgcacaaagtcctccctgggctg

SEQ ID NO: 5056 - DNA, 743 bp, Homo sapiens
  SIMILAR (1)..(186): 321254mologous to Rattus rattus potential ligand-binding protein,accession number X60660,Smith-Waterman Score=103.
atgtgtcccgccatcgatgcagtcctggtgtatgtgaacaggaagtggaccaacctcagtgaccccatgcctgtgggccagatgggcaccgtcaaatatgttctgatgtccgcaccagccaccacagccagctacatccaactggacttcagtcctgtggtgcagcagcaaaagggcaaaaccatcaagcttgctgatgccggggaggccctcacgttccctgaggtgttatgccaaaggctcgccgcagctgctggtcccagccaccttcctctctgcagagcttgcccttctgcagaagtcctttcatgtgaatatccaggatacaatgattggtgagctgcccccacaaaccaccaagaccctggctcgcttcattcctgaagtggctgtagcttatcccaagtcaaagcccttgacgacccagatcaagataaagaagcctcccaaggtcgctatgaagacaggcaagagcctgctgcacctccacagcaccctggagatgttcgcagctcggtggcggcgcaaggctccaatgtccctctttcttctagaagagcacttcaatctgaagggccagcactcactgcatgagaaccagctgcagatggccacttctttggacaggagagggaattaactggcttcatcaccagctatctcgaagaagcctacatcccagttgtcaatgatgtgcttcaagtggggctcccactcccggactttctggccatgaattacaa

SEQ ID NO: 5057 - DNA, 3435 bp, Homo sapiens
  SIMILAR (2625)..(2684): 301254mologous to Homo sapiens putative p150,accession number U93574,Smith-Waterman Score=47.
caagaaaaggggctttgcctttgtaacctttgacgaccatgactccatggataagattgtcattccgaaataccatactgtgaatggccacaactgtgaagttaggaaagccctgtcaaagcaagagatggctagtgcttcttccagccaaagaggtcaaagtggttctggaaactttggtggtggttgtggaggtggtttctgtgggaatgacaactttggtcatggaggaaacgtcagtggtcgtggtggctttggtggcagccatggtggtggtggatatggtggcagtggggatggctataatggatttggtaatgatggaagctaagagaccaattataaaacaataaaatactcctctctcccacagttgccttttttctctcttcttgtaattttctcttgctctatttggcccttcttttcacttgtccttccagccagtcaagttctccccaaattcccaggaactcttggggtaggtgtgtgtttttcacatcttaaaggctcacagaccctgcgctggacaaatgttccattcctgaaggacctctccagaatccggattgctgaatcttccctgttgcctagaagggctccaaaccacctcttgacctcaaatttcactttattctttgcatgtttttttttctttctctaggttgtttggttagggctgaatgttttcctgtttgtggatgccttcctgaacctccctaactcattttatgaggccagcatcattctgataccaaagcctggcagagacacaaccaaaaaagagaattttagaccaatatccttgatgaacattgatgcaaaaatcctcaataaaatactggcaaaccgaatccagcagcacatcaaaaagcttatccaccatgatcaagtgggcttcatccctgggatgcaaggctggttcaatatacacaaatcaataaatgtaatccagcatataaacagagccaaagacaaaaaccacatgattatctcaatagatgcagaaaaggcctttgacaaaattcaacaacctttcatgctaaaaactctcaataaattaggtattgatgggacatatttcaaaataataagagctatctatgacaaacccacagccaatatcatactgaatgggcaaaaactggaagcattccctttgaaaactggcacaagacagggatgccctctctcaccgctcctattcaacatagtgttggaagttctggccagggcaattaggcaggagaaggaaataaagggtattcaattaggaaaagaggaagtcaaattgtccctgtttgcagatgacatgattgtatatctagaaaaccccatcgtctcagcccaaaatctccttaagctaataagcaacttcagcaaagtctcaggatacaaaatcaatgtacagaaatcacaagcattcttatacaccaacaacagacaaacagagagccaaatcatgagtgaactcccattcacaattgcttcaaagagaataaaatacctaggaatccaacttacaagggatgtgaaggacctcttcaaggagaactacaaaccgctgctcaaggaaataaaagaggatacaaacaaatggaagaacattccatactctggtgaaatgaagcagctgatggtctctttttctcctctgctgtagtcaacattggcctgtgcccgagcgtctgctctctgcttgaattttaacagcacgctgatcctgcttaaagctggctggcgacatctgaccatgatcattctacatttgtagttttgcagccgcacactgagaaagcaattggatcacaactgttgctgagatgcctcttaacatttcttttcatctttccatttagctattcacatcattgcacacctgtttaactttgactgctatagcagaagccgacaggccacagatggctcccttgcctccattctctccagcctatctcatgatgagtgcacaggtggacattgtgtcaggctgacatttctcctttcacagacagtggagtatgtgacattcaccagcattgctggtctcactggagtgatcatgacaatagccttgattctcatggtaacttcagctactgagttcatccggaggagttattttgaagtcttctggtatactcacccttgcataattctttgtcccaaaccatccttctttgtctatttcagtggaattgtccggggtcaaacagaggagagcatgaatgagagtcatcctcgcaagtgtgcagagtcttttgagatgtgggatgatcgtggattaaagacttaaatgtaaaaccccaaactataaacaccgtagaagacaaccaccctggaagacaacctaggcaataccattcaggacataggccctggcaaagatttcatgatgaagataccaaaagcaaatgcaacaaaaataaaaattgatgaatgggatctaattaaactaaagagcttctgcacagcaaaagcaactaccaagagagtaaacaaacaagacgagagcctgaggagccattatgagtgatggggaatgctcacagactgtgtggtaatgagagatccaaacaccaagcgctccaggggctgtgggtttgtcacatacgccactgtggaggaggtggatgcagccacgaacgcaaggccacacaaggtggatggaaaagttgtggaaccaaagagaactgtctcaagagaagattctcaaagaccaggtgcccacttaactgtgaaaaagatatttgttggtggcattaaagaagacacggagggctttgcctttgtaacttttgacgaccatgactccgtggataagattgtcattccgaaataccatactgtgaatggccacaactgtgaagttaggaaagccctgtcaaagcaagagatggctagtgcttcatccagccaaagaggtcgaagtggtcgtggaggtggttttggtgggaatgaaaactttggttgtggaggaaacttcagtggtcatggtggctttggtggcagccatgatggtggtggatatggtggcagtggggatggctataatggatttggtaatgatggtggttatccaggaggcggccctggttactctggaggaagcagaggctatggaagtggtggacagggttgtggaaatcaggacagtggctatggcaggagtggcagctatgacagctgtaacaagggaggcagaggcggctttggcagtggtagtggaagcaattttggaggtggtggaagctacaatgattttggcaattacaacaatcagtattcaaattttggacccatgaagggaggaaactttggggcagacgctctggcccctagggtgatggaggccaatactttgccaaaccaccaaaccacagtggctatggcggttccagtagcagcagtagctatggcagtggcagaagatgt

SEQ ID NO: 5058 - DNA, 636 bp, Homo sapiens
  SIMILAR (540)..(635): 831254mologous to Homo sapiens hnRNPcore protein A1,accession number X79536,Smith-Waterman Score=159.
atgagagatccaaacaccaagcgctccaggggctttgggtttgtgacatgtgccactgtggaggaggtggatgcagccatgaatgcaaggccatgcaaggtggttggaagaactgtggaaccaaagagagctgtctcaagagaagattctcaaagaccagaagacactgaagaacttcacctaagagattattttgaacagtatgggaaaattgaagtgattgaaatcatgactgaccaaggcagtggcaagaaaaggggctttgcctttgtaacctttgacaaccatgactccatggataagactgtcattcagaaataccatactgtgaatggccacaactgtgaagctaggaaagccctgtcaaagcaagagatggctcgtgcttcatccagccaaagaggtcgaagtggttctggaaactttggtggtggtcgtggaggtggttttggtgggaatgacaactttggtcgtggaggaaacttcagtggtcatggtggatttggtggcagccatggtggtggtggatatggtggcagggggatggctataatggatttggtaatgatggaggtggtggaagctacaatgattttgtcaattacaacaatcagtcttcacattttggacccatga

SEQ ID NO: 5059 - DNA, 3855 bp, Homo sapiens
  SIMILAR (913)..(2187): 991254mologous to Homo sapiens zinc finger protein (583 AA),accession number X51760,Smith-Waterman Score=2444.
atgactggaatctgctacacagaagatgaaagatcatataagaaaaatgctcaaccaacggcagcaagtaaaaagcaaaaagaaacacagaaattctgtctaagagtagacgggcaacaaaaagtgaagctctcggtgctccaggagaaaagcgcgcagctcacagtacaacttaagagccagaagttcctgggccaccccacagcgggccggggtcgcagcgagctctgcctggacctccccgatcccccagaggacccagtggcactggagacccggagtgtgggcacctgggttcgagaacgggacttgggcatgcctgatggggaggctgccctcgccgccaaggtcgctgtgctggagacccagctcaagaaggcgctgcaggagctgcaggcagctcaggcccggcaggctgacccccagccccaggcctggccaccgccggacagcccggtccgcgtggatacagtccgggtggtagaagggccacgggaggtggaggtggtggccagcacagccgctggcgcccccgcacagcgggcccagagcctggagccttacggcacagggctgagggccctggcaatgcctggtaggcctgagagcccacctgtgttccgcagccaggaggtggtggagacaatgtgcccagtgcccgctgcagctaccagcaacgtccatatggtgaagaagattagcatcacagagcgaagctgcgatggagcagcagaaatgaaatgggaggaccagaacattggagatcagtgccaaaatgccaagagaaatctaaggatggcattaacatcctctctgggctgtggatttctccaggttgtgctgagactccagaatttacagcaggtgatagtcagctatttcggccagtgcaagtttggatgcctgcaaggtcaatcatgcgagcatcaggaatatggagagaagccatatacacataagcaacgtgggaaagccatcagtcatcagcactccttccagacacatgaaaggccccccaccggaaagaaacccttctattgtaaagaatgtgcaaaaacctttagttctcttggaaacctccgaagacacatggcggcacaccatggagatggaccttataaatgtaagttgtgtgggaaagcctttgtttggcccagtttatttcatttgcacgaaagaacacacactggagagaaaccgtatgaatgtaagcagtgttctaaagcctttcctttttacagttcctatctaagacatgaaagaatccacacgggagagaaagcgtatgaatgtaagcagtgttccaaagcctttcctgattacagtacctatctaagacatgagagaactcacaccggagagaaaccctataaatgtacacaatgtgggaaagccttcagctgttactattacactcgactacatgaaaggactcacacgggagaacaaccctatgcatgtaagcaatgtgggaaaacgttttatcatcacacaagctttcgaagacacatgataaggcacactggagacggaccacataaatgtaagatatgtgggaaaggctttgattgtcctagttcagttcgaaatcatgaaactactcacactggagagaaaccctatgaatgtaagcagtgtgggaaagtgttatctcatagctcgagctttcgaagtcacatgataacacacacaggagatggaccccagaaatgcaagatatgtgggaaagcctttggttgtcccagtttatttcaaagacatgaaaggactcacactggagagaaaccctatcaatgtaaacaatgtggtaaagccttcagtcttgccggttcccttcgaagacatgaagcaactcacactggagtgaaaccctataaatgtcagtgtgggaaagcctttagtgatctctcttcctttcaaaatcatgagacaactcacactggagagaagccatatgagtgtaaggaatgtgggaaagcattcagttgtttcaaatacctttctcaacataaaaggacccacacagtacaaaaaccttatgagtgtaaaacatgtagaaaagccttcagtcatttcagtaacttaaaagtccatgaaaggattcactctggagagaagccatatgaatgtaaggaatgtggaaaagcattctcttggctcacttgccttctacgacatgaaagaattcacactggagagaaaccctatgaatgtctacaatgtggtaaagccttcactcgttcccgtttccttcgaggacatgaaaaaactcacactggagagaagctgtatgaatgtgtctgcaaggtggacaaacagaaccgtgctggctacagccctattatgctcaccgccctggccaccctgaagacccaggacgacatcgagactgtccttcagctcttccggcttggcaacatcaatgccaaagccagccagccatatgtggcccagggggacctgagtggattccaagacattggtggctacacaaaaaggaaactggacttttattccacgctgttggctggcagtccaggacctcagcatccaggaagtcacctttgtcctcagaccaacctggaaaaatctcgcttttctgcccgtggacaccgccgaagaagcatcgttaaagtctctcttcaccctgccgtcatgtctaagtcagagtctcctaaagagcccgaacagctgaggaagctcttcattggagggttgagctttgaaacaactgatgagagcctgaggagccattttgagcaatggggaacgctcacggactgtgtggtaatgagagatccaaacaccaagcgctccaggggctttgggtttgtcacgtatgccactgtggaggaggtggatgcagctatgaatgcaaggccacacaaggtggatggaagagttgtggaaccaaagagagctgtctccagagaagattctcaaagaccaggtgcccacttaactgtgaaaaagatatttgttggtggcattaaagaggacactgaagttcatcacctaagagattattttgaacagtatggaaaaattgaagtgattgaaatcatgactgaccgaggcagtggcaagaaaaggggctttgcctttgtaacctttgacgaccatgactccgtggataagactgtcattcagaaataccatactgtgaatggccacaactgtgaagttagaaaagccctgtcaaagcaagagatggctagtgcttcatctcagccaaagaggtcgaagtggttctggaaactttggtggtggtcgtggaggtggtttcggtgggaatgacaacttcggtcgtggaggaaacttcagtggtcgtggtggctttggtggcagccgtggtggtggtggatatggtggcagtggggatggctataatggatttggtaatgatggaagcaattttggaggtggtggaagctacaatgattttgggaattacaacaatcagtcttcaaattttggacccatgaagggaggaaattttggaggcagaagctctggcccctatgggcggtggaggccaatacttttgctaaaccccgaaaaccaaggtggctatggcggttccagcagcagcagtagctatggcagtggcagaagattttaattaggaaacaaagcttagcaggagaggagagccagagaagtgacagggaagctacaggttacaacagatttgtgaactcagccaagcacagtggtggcagggcctagctgctacaaagaagacatgttttagacaaatactcatgtgtatgggcaaaaaactcgaggactgtatttgtgactaattgtataacaggttattttagtttctgttctgtggaaagtgtaaagcat

SEQ ID NO: 5060 - DNA, 784 bp, Homo sapiens
  SIMILAR (139)..(315): 411254mologous to Gallus gallus teneurin-2 protein,accession number AJ245711,Smith-Waterman Score=102.
atgaggaggaggctacaacttgactcactccttcatcccccttcttgtttctcctccactctgaaatgtggaaaagctgcagctgcagcttgcgacagcagtgaccagatccaagaaagactgcagacaggccacctgccctgtgaagccagccataccatatgccctccgaaccaccacagccagtcgactctgaggccccctctcccacccccatcacaaccacacgctgtcccatcaccactcgtccgccaactccctcaacaggaactcactgaccaatcggcggagtcagatccacgccccggccccagcgcccaatgacctggccaccacaccagagtccgttcagcttcaggacagctgggtgctaaacagcaacgtgccactggagacccgcttctggtgttgccagagatttttggtgttccctggcctacagctgcaacacctcactctctctctgcctgtgtggtcacacggtgctctccctgtgtctctctgcatctttacgtggctgtcttctcataaggacaccagtcattttggattacgagtccacttgctcagtctgccgctggaagcaaaatattctttctatcctggatgtccagtcttggaaccagctccgaatccattgaaaggcccctggtgtctctggggggttggtaccttcagacgttattgtactacatttttgttcaatgagtcagagccaaaggacttggttggtgaaaaatttaaatcagatcgcctttgccgagaagcgcatctccaggagtag

SEQ ID NO: 5061 - DNA, 1865 bp, Homo sapiens
  SIMILAR (279)..(1073): 981254mologous to Homo sapiens membrane glycoprotein 130,accession number M57230,Smith-Waterman Score=1387.
tttcggattatgaaataaaatgctgttcatccactgaagaacagacccttgcttcctgcactatcttcaaaagtttaggtcggaggagcgcacgaaccccttggcgccaggctgggccagacccgtcggcctggcaggcgcggcccccggttcagctgcgccggggcggcccagcgcgactccgcgggccttttggctgctcgccccggctccggaacactgtcagatccttctccgcagagttgtgtcctttgtggttcttggatgtcatcacccccacattaggcacctgcagggcaacacacaagtttgctgattgcaaagccaaacgtgacacccccacctcatgcactgttgattattctactgtgtattttgtcaacattgaagtctgggtagaagcagagaatgcccttgggaaggttacatcagatcatatcaattttgatcctgtatataaagtgaagcccaatccgccacataatttatcagtgatcaactcagaggaactgtctagtatcttaaaattgacatggaccaacccaagtattaagagtgttataatactaaaatataacattcaatataggaccaaagatgcctcaacttggagccagattcctcctgaagacacagcatccacccgatcttcattcactgtccaagaccttaaaccttttacagaatatgtgtttaggattcgctgtatgaaggaagatggtaagggatactggagtgactggagtgaagaagcaagtgggatcacctatgaagatagaccatctaaagcaccaagtttctggtataaaatagatccatcccatactcaaggctacagaactgtacaactcgtgtggaagacattgcctccttttgaagccaatggaaaaatcttggattatgaagtgactctcacaagatggaaatcacatttacaaaattacacagttaatgccacaaaactgacagtaaatctcacaaatgatcgctatctagcaaccctaacagtaagaaatcttgttggcaaatcagatgcagctgttttaactatccctgcctgtgactttcaagccaagacagtcaattccagcatcttgcagtacggcctggagtccctgaaacgaaagacctcttacattgttcaggtcatggccagcaccagtgctgggggaaccaacgggaccagcataaatttcaagacattgtcattcagtgtctttgagattatcctcataacttctctgattggtggaggccttcttattctcattatcctgacagtggcatatggtctcaaaaaacccaacaaattgactcatctgtgttggcccaccgttcccaaccctgctgaaagtagtatagccacatggcatggagatgatttcaaggataagctaaacctgaaggagtctgatgactctgtgaacacagaagacaggatcttaaaaccatgttccacccccagtgacaagttggtgattgacaagttggtggtgaactttgggaatgttctgcaagaaattttcacagatgaagccagaacgggtcaggaaaacaatttaggaggggaaaagaatgggtatgtgacctgccccttcaggcctgattgtcccctggggaaaagttttgaggagctcccagtttcacctgagattccgcccagaaaatcccaatacctacgttcgaggatgccagaggggacccgcccagaagccaaagagcagcttctcttttctggtcaaagtttagtaccagatcatctgtgtgaggaaggagccccaaatccatatttgaaaaattcagtgacagccagggaatttcttgtgtctgaaaaacttccagagcacaccaagggagaagtctaa

SEQ ID NO: 5062 - DNA, 587 bp, Homo sapiens
  SIMILAR (190)..(498): 331254mologous to Gallus gallus glycoprotein 130,accession number AJ011688,Smith-Waterman Score=163.
atgacggtgaacaccaccggagccgcaaccggtgggaggaaacggccgacgcgagttggtcggcacccccacgagcaggacggggttcggtggacacgctacagaaagagtgtgctccaacgaggcggagatactgggcacagaacgagacagacaaaagacgccgacaaggtcgcgtgtttccccgagaatggaagcaaacagcggccaaggtatcgcgccgggtttccatcagaaggtcctgagaccaaggtggagaacattggcgtgaagacggtcacgatcacatggaaagagattcccaagagtgagagaaagggtatcatctgcaactacaccatcttttaccaagctgaaggtggaaaaggattctccaagacagtcaattccagcatcttgcagtacggcctggagtccctgaaacgaaagacctcttacattgttcaggtcatggccaacaccagtgctgggggaaccaacgggagccagcataaatttcaagacattgtcattcagtgtctttgagattatcctcataacttctctgattggtggaggccttcttattctcatcactagtgcgacca

SEQ ID NO: 5063 - DNA, 552 bp, Homo sapiens
  SIMILAR (2)..(58): 1001254mologous to Homo sapiens dioxin receptor repressor,accession number AF293639,Smith-Waterman Score=99.
gaggcccgccgtgggggcagagaagtccaacccctccaagcgacaccgggaccggcttcaacgccgaggttggaccacctggccagcctgctgccgttcccgcctgacatcatctccaagctggacaagctttctgtcctgcgcctcagtgtcagttacctccgggtgaagagcttcttccaagtgaaacgtcagaggagagagatacatggaaggaattgccaaaagaaaaggaaccagaacttgaaggacaggggttggcagtggcagatgccgaagatgtggatgaccacacgggcgaacgaaggcccatgtcgttcaggaggccccgagcattggacacccaggccctgagacgtactcagttcggtctgcatctgttgatggtgaatattgcaggactgatagccactgaccgcctgtagtgatgtgtgaggacaatgaaggcaatggtgattcacaggcaggccagccccatatgggtgttagttgtaaattcatggttacataacataataaatttacctacgaattcattatttataaaaaaaa

SEQ ID NO: 5064 - DNA, 503 bp, Homo sapiens
  SIMILAR (1)..(96): 781254mologous to Mus musculus AhR repressor,accession number AB015140,Smith-Waterman Score=137.
aggcccctgcagaaacagaggcccgccgtgggggcagagaagtccaacccctccaagcgacaccgggaccgcctcaacgccgagttggaccacctgggccagcctgctgccgttcccacctgacatcatctccaagctggacaagctttctgtcctgcgcctcagtgtcagttacctcggggtgaagagcttcttccaaggacaggggttggcagtggcagatgccgaagatgtggatgaccacacgggcgaacgaaggcccatgtcgttcaggaggccccgagcattggacacccaggccctgagacgtactcagttcggtctgcatctgttgatggtgaatattgcaggactgatagccactgaccgcctgtagtgatgtgtgaggacaatgaaggcaatggtgattcacaggcaggccagcaccatatgggtgttagttgtaaattcatggttacataacataataaatttacctacgaattcattatttataaacaaaa

SEQ ID NO: 5065 - DNA, 1179 bp, Homo sapiens
  SIMILAR (244)..(402): 981254mologous to Homo sapiens hypothetical protein,accession number AL359615,Smith-Waterman Score=282.
atgccaaagctggtgaagtcctggcctcttcccatctcagacaccctcaaggcactgtcctctctctatatcctgaacttggctgcagcaggggtagatgaaaaggaggagaaactgttggataaaaagaaattaaaaaaaaaaaaagccccgctcccactccttcaccctcctctggacctcccgcccatctacccaccccacgcagggaacaagactgcccagtaccaggattttcttcttggggaacataggttgtatctgcagcaaacgctcaatgacactgtgggcaggaagattgtcatggacttcttaggttttaactggaactggattaataagcaacagggaaagcgtggctgggggcagcttacctctaacctgctgctcattggcatggaagtgaaatgtgacacctgctcactatgatgagcagcagaacttttttgctcagattaaaggttacatacgatgcatcttattccctccggatcagtttgagtgcctctacccataccctgttcatcacccatgttacagacagagccaggtgtgacttgacaatcccgactacgagaggttccctaatttccaaaatgtggttggttacgaaacagtggttggccctggtgatgttctttacatcccaatgtactggtggcatcacatagagtcattactaaatggggggataaccatcactgtgaacttctggtataagggggctcccacccctaagagaattgaatatcctctcaaagctcataacaaagtggccataatgaaaaacattgagaaaatgcttggagaggccttggggaacccacaagaagtggggcccttgttgaacacaatgatcaaggggccgatacaactagcctgccaggggtcaaggcctcctgccaggtgactgctatcccgtccacaccgcttcattgatgaggacaggagactccaagcgctagtattgcacgctgcacttaatggactggactcttgccatggcccaggagtcaggtgtttggagcgaggcagggcagttggcactccactcctatttggagggacttcatacccttgcctcttgtgccccagcaccttctctctctgccccccgcctaaagtcctgcattcagtgtgtggagtcccagcttttggttgtcatcaaaaaaaaaaaaa

SEQ ID NO: 5066 - DNA, 927 bp, Homo sapiens
  SIMILAR (237)..(728): 281254mologous to Metarhizium anisopliae CRR1 protein,accession number Y10265,Smith-Waterman Score=133.
atggcgtttcaccatgttggccaggctgatctgaaactcctgacctcaggggaagaacgccaggatgtctacgtggccttcaaggagaaccctgagaagacagcaacaaagggatccgacagtagtcacgtgccgcagacatctctgctatcccttgcatccatggagccttggtcactagtaaaatccatcacaaatagcttttcatcacgactctcagagaacccatactatgacacgaaaagcctggacgacagcgtgagactcggtctcaaaatcatcatcatcatcatcatcatcatcatcatcatcaagagaagattaggatacagacgttcacagagagaccatgagaagacacggagagaagtgactgtccacaagccaagaagagaagccccagaagaaatcaaccctgctgacaccttgattttgaacttccagccgccagagctgccacacaaccggttaacagtggagccagagctggacgtgccggagccacagtgcctcgccacacggccaccttgctccttctgcaccagcgacgtgactatgcaggaggcagcttgtgtgatattgatcgagctcctgatgcaaagcagggtgggaaatcctaggaatcagaaactgactcacggttctggaaagggactgtatgctgagatcacacagccggctgggtacacggccgccccaccaccccacaccactcatcccctgacagccgtaacggaggattccagctgcaccagcagatcgctctggctgctggatggagagagggagccagcaggccaaagcaagagccactgcagcctggaccggagcaggggcagcggaggggccgccgagaaccagtgcaagggaaggcacccagtgggcaccaatcgtggcctgctgaataatgaccattctgagtactga

SEQ ID NO: 5067 - DNA, 876 bp, Homo sapiens
  SIMILAR (145)..(873): 741254mologous to Mus musculus Pro-Pol-dUTPase polyprotein,accession number Y12713,Smith-Waterman Score=996.
atgcgacctgaactgcctatcataaactgggtgctttctggcccatctagccataaagtgggttatgcacagcagcattccatcatcaaatggaagtggtacatacatgatcagtttcgagcaggtcctgaaggcacaaccacccctgtcattgcccaatgggcccatgaacaaagtggccatggtggcaggcatggaggttatgcatggactcagcaacatggacttccactcaccaaggctgacctggctatggccactgctgagtgcccaatttgccagcagcagaaaccaacactgagccctcgatatggcaccattcctcagggtgatcagccagctacctggtggcaggttgattatattggacctcttgcatcacggaaagggcagagatatgggtttgcctatcttgcacgcaatgtttctgccaagactaccatacatggactcatggaatgccttatccaccatcatggtattccacacatcattgcctctgaccaaggcactcactttgtggctaaagaagtgcggcagtgggctcacgctcatggaattcactggtttcaccatgttgcctatcatcctgaagcaggtggattgacagaatggtggaatggccttttgaagtcacaattacaacgccaactaggtgacaatactttgcaggactggggcaaagttccccagaaggccatgtatgctctgattcagtgtccaatatatggtattgtttctcccatagccaggattcacaggtccaggaatcaaggggtgaaagtggaaatggcaccattcaccatcacccctagcgatccactagcaaaatgtttgcttcctgttcttgtgacattacgttctgctggcctatag

SEQ ID NO: 5068 - DNA, 311 bp, Homo sapiens
  SIMILAR (1)..(90): 761254mologous to Mus musculus Pro-Pol-dUTPase polyprotein,accession number Y12713,Smith-Waterman Score=130.
caaatcaccatgcaacctgaactgcctatcatgaactgggtgctttctgtcccatctagccataaaatgggtcatgcacagcagcattcaggaagtggcacaaatgcccagggtctccacccctgccaccctgccttctctcccccagcctgcactgatggccccgtggacagttccctatgatcagttgatggaggaagagaaagctagggcacgatatgcaggcaccatccaaaagtggacagctgcagcactacagcccctttctaggacatccctgaaggacagtggtgaagggacttctaagtggg

SEQ ID NO: 5069 - DNA, 594 bp, Homo sapiens
  SIMILAR (3)..(53): 941254mologous to Mus musculus Pro-Pol-dUTPase polyprotein,accession number Y12713,Smith-Waterman Score=79.
atgacccagcagatccaatggtgcttgaggtgtcagaggcagatagggatgcaggtacccataagtgaatcacagcagaggcctctaggattttggagcaaggccctgccatcttctgcaaataactactctttttttaagagacagctcttggcctgttactgggttttggtggaaattgaacatttgactatgggtcatcaagtcaccatgcgacctgaactgcctatcataaactgcgtgctttctgacccatgtagccataaagtgggtcatgcacagcagcattccatcatcaaatggaggtggtatatacatgattgggctgaaggcacaagtaagttacatgaggaagtggctcaaatccccatggtctccactccttctctcccccagcctgcaccgatggcctcatgggaagttccctatgatcagttgacagaggaagagaagactagggcctggttcacagatggttctgcacgacatgcaggcgccacccaaaagtggacagctgtagcactacagcccctttctgggacatccctgcaggacagcagtgaagagaaatcttcccaatggacagaaatttga

SEQ ID NO: 5070 - DNA, 582 bp, Homo sapiens
  SIMILAR (1)..(363): 801254mologous to Mus musculus Pro-Pol-dUTPase polyprotein,accession number Y12713,Smith-Waterman Score=536.
gtccaggctgctgtgctagctgctttgcaacttgggccatatgacccagcagattcaatggtgcttgaggtgtcagtgtcagatagggatgctgtttggcgcctttggcgggcacccataggtgaatcacaacggagatctctaggattttggagcaaggttctgccatattctgcagataactactttccttttgagagacagctcttggcctgttactgggctttgttggaaactgaccgtttgactgtgggtcatcaagtcaccttgcaacctgaactgcctatcatgaactgggtactttctgacccatctagccataaagtgggtcatgtacaccagcattccatcatcaaatggaagtgccacccctgtcatcacccaatggatacccatgaacaaagtggccttagtggcagggatggaggttacgcatgggctcagcaacatggacttccactcaccaaggctgacctggctatggccactgctgagtgcccaatttgccagcagcagagaccaacactgagccctagatatagcatcattcctcggggtgatcagccagctacctggtggcag

SEQ ID NO: 5071 - DNA, 635 bp, Homo sapiens
  SIMILAR (271)..(633): 801254mologous to Mus musculus Pro-Pol-dUTPase polyprotein,accession number Y12713,Smith-Waterman Score=536.
gcaggcattgacttggcaaatgcctttttctccattcctgtccataaggcccaccagaagcaatttgtcttcagctggaaaagccaggaatatacctttactgtcctacctcagaggtatatcaactctccggctttgtctcataatcttattcggagagaacttgatcacttttcacttctggacgatatcacactagtccgttacattggtgatattatgcttattggatccagtaagcaagaagtagtaaacacactggacttattggtccaggctgctgtgctagctgctttgcaacttgggccatatgacccagcagattcaatggtgcttgaggtgtcagtgtcagatagggatgctgtttggcgcctttggcgggcacccataggtgaatcacaacggagatctctaggattttggagcaaggttctgccatattctgcagataactactttccttttgagagacagctcttggcctgttactgggctttgttggaaactgaccgtttgactgtgggtcatcaagtcaccttgcaacctgaactgcctatcatgaactgggtactttctgacccatctagccataaagtgggtcatgtacaccagcattccatcatcaaatggaagtg

SEQ ID NO: 5072 - DNA, 1540 bp, Homo sapiens
  SIMILAR (485)..(1537): 711254mologous to Mus musculus Pro-Pol-dUTPase polyprotein,accession number Y12713,Smith-Waterman Score=1344.
tttttttcctattggattttggaggcaacacattcctcgtttgagtgtgttactccagcacatttattgagtgacctgaaaggctgccagttttgagtggggtccaaaacaggagaaagctctatgacaggtccaggctgttgtgcaagttgctctgccacttgggccatatgacccagcagatccaatgttgcttgaggtgtcagtggcagataaggatgctggctgcagcctttggcaggcccccataggtgaatcacagtggcggtctctaggctttcggagcaaggccctgccatcttctgcagataactactcttcttttgagagacagctcttggcctgttactgggctttggtggaaactgaatgtttgactctgggtcatcaagtcaccatatgacctgaactgcctatcatgaactgggtgctttctgacccatctagccataaagttggtcatgaacagcagcattccatcatcaaatggaggtggtatatatgtgattgggctgtagtaggtcgtgagagcacaaccaatggtttggctggatggtcagagacttggaagaagcatcattgggaaatgggtgaaaaacaaatttggggaagaagtatgtggatggaactttctgagtggtcaaaaactgtgaagatatttgtatcctatgtgagtgcccaccaatgtgtaacctcaacagaggaggatttcaataatcaatgggatggaatgacctgttctgtggacaccactcatcctctttccctaaccacctctgtcatcgccaagtgggcccatgaacaaagtgaccatggtggcaggtatggaggttatgcaggggctcagcaacatggacttccacttaccaaggctgacctggctatgaccactgctgagtgcccaatttgccagcagcagagaccatcactgagccctcaatatggcaccatttctcagggtgatcagccagctacctggtggcaggttgattatattggacctcttccatcatggaaagggcagaggtttgtcctcactgtaatagacacttactccggatatgggtttgcctatcctgaacacaatacttctgccaagaccactgtcaatggacccatggagtgccttatccaccgtcatggtattccacacggcattgcctctgaccaaggcactcgctttacagctaaagaagtgtggcagtgggctcatgctcatggaattcactggttttactatgttccccatcatcctgaagcagctggattaataggatggtggaatggccttttgaagtcacaattacaatgccaactaggtgacaatactctgcagggctggggaaaagttcttcagaaggctgtgtgtgctctgaatcagcatccaatatatggtactgtttctcccgtagccaggattcatgggtccaggaatcaaggggtggaagtggaagtggcaccattcatcatcacctctagtgaccgactagcaaaatttttgcttcctgtttcctcgacatcatgttctgctggcctatag

SEQ ID NO: 5073 - DNA, 966 bp, Homo sapiens
  SIMILAR (582)..(346): 911254mologous to Homo sapiens Hydrophobic domain containing protein clone HP10508 protein sequence,accession number Y78805,Smith-Waterman Score=394.
atattaaaagagaagttactttattacaatttgttatctcatcccgaggtcagggccccttgcttagtgggaaaaaaaaccctttaggactgagtctcggaacagcacctgctggacagaggggagaaccaacccaggtcagaggggaaagcagcatggcaagacctagacccagttctaagagcacttccttgtccccgctcttacccgggccaccaccttcaaggcccattacctgtcctaaacccaacttctctgtgatgcccggatttcttgattttgatccagtagctgctcattttcctgccttttacatttaggagattcaagctctgtcatttcctctagctgcccctgaagtccgtccttcctgcagggcccaactccacgtagagtgagtgcagccacacagcagtaaccagatagagcagcctgccctgcagacatgagcaaagaagggatccagagagccaaggctgtatcatagattcttgtggggtcaaaggggcagtcagtatgtcccggcccctcatccagtggtaccagaggatccagcagtcctggggtggcagtcagcaataaggcggcggccaccgttgggccacagtgagtgacacagcaagaaggaggcccagggagcaggcaacggacaagagcaggttcaccagagctagtgccagcaggacccagtgcagtggagggcgaagaaggttcctggacgccaggagggccacaagtcccacggaaacgctcagcagccccgagccgacagagatgacattggctacggtgtactccggcgtgacagcgccgcggggattggccacgtgccgcaggacggtgccatgcagcacggcccccagcagcaggttcacgtgcgcccaccaagatcagcgcgaggcccacacgcatcagccgcctgggcccccgggcggcgtcgaaagcgcagagactgcagcgcctcat

SEQ ID NO: 5074 - DNA, 1374 bp, Homo sapiens; identical to SEQ ID NO: 348
  SIMILAR (268)..(483): 291254mologous to Caenorhabditis elegans weak similarity to collagens; glycine- and proline-rich,accession number AF000298,Smith-Waterman Score=45.

SEQ ID NO: 5075 - DNA, 5652 bp, Homo sapiens
  SIMILAR (3)..(2696): 991254mologous to Homo sapiens Human phosphodiesterase interacting protein, myomegalin,accession number Y71159,Smith- Waterman Score=4442.
tgttgcttgagaaacttcgccagcgaatacatgataaagctgttgctctggagcgggctatagatgaaaaattctctgctctagaagagaaagaaaaagaactgcgccagcttcgtcttgctgtgagagagcgagatcatgacttagagagactgcgcgatgtcctctcctccaatgaagctactatgcaaagtatggagagtctcctgagggccaaaggcctggaagtggaacagttatctactacctgtcaaaacctccagtggctgaaagaagaaatggaaaccaaatttagccgttggcagaaggaacaagagagtatcattcagcagttacagacgtctcttcatgataggaacaaagaagtggaggatcttagtgcaacactgctctgcaaacttggaccagggcagagtgagatagcagaggagctgtgccagcgtctacagcgaaaggaaaggatgctgcaggaccttctaagtgatcgaaataaacaagtgctggaacatgaaatggagattcaaggcctgcttcagtctgtgagcaccagggagcaggaaagccaagctgctgcagagaagttggtgcaagccttaatggaaagaaattcagaattacaggccctgcgccaatatttaggagggagagactccctgatgtcccaagcacccatctctaaccaacaagctgaagttacccccactggccgtcttggaaaacagactgatcaaggttcaatgcagataccttccagagatgatagcacttcattgactgccaaagaggatgtcagcatacccagatccacattaggagacttggacacagttgcagggctggaaaaagaactgagtaatgccaaagaggaacttgaactcatggctaaaaaagaaagagaaagtcagatggaactttctgctctacagtccatgatggctgtgcaggaagaagagctgcaggtgcaggctgctgatatggagtctctgaccaggaacatacagattaaagaagatctcataaaggacctgcaaatgcaactggttgatcctgaagacataccagctatggaacgcctgacccaggaagtcttacttcttcgggaaaaagttgcttcagtagaatcccagggtcaagaaatttcaggaaaccgaagacaacagttgctgctgatgctagaaggactagtagatgaacggagtcggctcaatgaggccttacaagcagagagacagctctatagcagtctggtgaagttccatgcccatccagagagctctgagagagaccgaactctgcaggtggaactggaaggggctcaggtgttacgcagtcggctagaagaagttcttggaagaagcttggagcgcttaaacaggctggagaccctggccgccattggaggtgcagctgcaggggatgacaccgaagatacaagcactgagttcactgacagtattgaggaggaggctgcacaccatagtcaccagcaacttgtcaaggtggctttggagaaaagtctggcaactgtggagacccagaacccatctttttcccctccttctccgatgggaggggacagtaacaggtgtcttcaggaagaaatgctccacctgagggctgagttccaccagcacttagaagagaagaggaaagctgaggaggaactgaaggagctaaaggctcaaattgaggaagcaggattctcctcagtgtcccacatcaggaacaccatgctgagcctttgccttgagaatgcggagctgaaagagcagatgggagaagcaatgtctgatggatgggagatcgaggaagacaaggagaagggcgaggtgatggttgagactgtggtaaccaaagagggtctgagtgagagtagccttcaggctgagttcagaaagctccagggaaaactgaagaatgcccacaatatcatcaacctcctcaaagaacaacttgtgctgagtagcaaggaagggaatagtaaacttactccagagctccttgtgcatctgaccagcaccattgaaagaataaacacagaactggttggttcccctgggaagcaccaacaccaagaggaggggaatgtgactgtgaggcctttccccagaccccagagccttgaccttggggctaccttcacagtggatgcccaccaattggataaccagtcccagcctcgtgaccctgggcctcagtcagcgtttagcctaccagggtccacccagcacctgcgctcccagctgtcacaatgcaaacaacgctatcaagatctccaggagaagctgctgctatcagaagccactgtctttgctcaggctaacgagctggagaaatacagagttatgcttacaggtgaatccttggtgaagcaggacagcaagcagatccaggtggacctccaggacctgggctatgagacttgtggccgaagcgagaatgaggctgaacgggaggaaaccaccagtcctgagtgtgaggagcacaacagcctcaaggaaatggtcctgatggaggggctgtgctctgagcagggacgccggggctcaacactggctagttcctctgagaggaagcccttggagaaccagctagggaagcaggaagagttccgggtatatggaaagtcagaaaacatcttggtcctacgaaaggacatcaaagatctgaaggcccaactgcgaaatggccacaagggcaattcaaaacctcaagagccgggtccggtccctctcagttacaagtgattattcgtctagtctggaaagaccccggaagctgagagctgttggcaccttggaggggtcttcacctcatagtgtccctgatgaggatgaggggtggctgtctgatggcactggggctttctactctccagggcttcaggccaaaaaggacctggagagtctcatccagagagtatcccagctggaggcccagctcccaaaaaatggactagaagagaagctggctgaggagctgagatcagcctcgtggcctgggaaatatgattccctgattcaggatcaggcccgggaactgtcttacctacggcaaaaaatacgagaagggagaggtatttgttatcttatcacccggcatgcaaaagatacagtaaaatcttttgaggatctcctaaggagcaatgacattgactactacctgggacagagcttccgggagcaactcgcccagggaagccagctgacagagaggctcaccagcaaactcagcaccaaggatcataaaagtgagaaagatcaagctggacttgagccactggccctcaggctcagcagggagctgcaggagaaggagaaagtgattgaagtcctgcaggccaagctggatgctcggtccctcacaccctccagcagccatgccttgtctgactcccaccgctctcccagcagcacctctttcctgtctgatgaactggaagcctgctctgacatggacatagtcagcgagtacacacactatgaagagaagaaagcttctcccagtcactcagattccatccatcattcgagtcattctgctgtgttgtcttctaaaccatcatcaaccagtgcatctcagggggctaaggccgaatccaacagcaaccccatcagcttgccaactccccagaatacccccaaggaggccaaccaggcccattcaggctttcattttcactccatacccaagctggctagccttcctcaggcaccattgccctcagctccatccagcttcctgcctttcagccccactggccctctcctccttggctgctgtgagacaccagtggtctccttggctgaggctcagcaggagctacagatgctgcagaagcagttgggagaaagtgccagcactgttcctcctgcttccacagctacattgctgagcaacgacttggaagccgactcttcctactacctcaactctgcccagcctcactctcctccaaggggcaccatagaactgggaagaatcctagagcctgggtacctgggcagcagtggcaagtgggatgtgatgaggcctcagaaagggagtgtatctggggacctatcctcaggctcctctgtgtaccagcttaactccaaacccacaggggctgacctgctggaagagcatcttggtgaaatccggaacctgcgccagcgcctggaggagtccatctgcatcaatgaccgcctacgggagcaactggaacaccggctgacctctactgctcgtggaaggggatccacttctaacttctacagtcagggcctggagtccatacctcagctctgcaatgagaacagagtcctcagggaagacaatcgaagacttcaggctcaactgagtcatgtttccagagagcactcccaggaaacagaaagcctgagggaggctctgctgtcctctcgatcccaccttcaagagctggaaaaggagctggagcaccagaaggtggaaaggcagcagcttttggaagacttgagggagaagcagcaagaggtcttgcatttcagggaggaacgtctttccctccaggaaaacgactccagtgggccttgcctctccctggtcagactgcagcacaagctggttctcctgcagcaacagtgtgaagagaaacagcagctctttgagtccctccagtcagagctacaaatctacgaggcactttatggcaattccaagaaggggctgaaagcttacagcctggatgcctgtcaccaaatccctttgagcagtgacctgagccacctggtggcagaggtacgagctctgagagggcagctggagcagagcattcaggggaacaattgtctgcgactgcagctgcaacagcagctggagagcggtgctggcaaagccagcctcagcccctcctccattaaccagaacttcccagccagcactgaccctggaaacaagcagctgctcctccaagattcagctgtgtcccctccagtccgggatgttggtatgaattccccagctctggtcttccccagctctgcttcctctactcctggctcagaaacgcccataatcaacagagcaaatggcttgggtttggatacttctccagtaatgaagacccctcccaagctagagggtgatgctactgatggctcctttgccaataagcatggccgccatgtcattggccacattgatgactacagtgccctaagacagcagattgcggagggcaagctgctggtcaaaaagatagtgtctcttgtgagatcagcgtgcagcttccctggccttgaagcccaaggcacagaggtgctaggcagcaaaggtattcatgagcttcggagcagcaccagtgccctgcaccatgccctagaggagtcggcttccctcctcaccatgttctggagagcagccctgccaagcacccacatccctgtgctgcctggcaaagtgggagaatcaacagaaagggaacttctggaactgagaaccaaagtatccaaacaggagcggctccttcagagcacaactgagcatctgaagaacgccaaccagcagaaggagagcatggagcagttcatcgtcagccagctaaccagaacacatgatgttttaaagaaggcaaggactaacttagaggtgaaatccctaagggctctgccatgtactccagccttgtga

SEQ ID NO: 5076 - DNA, 1332 bp, Homo sapiens
  SIMILAR (387)..(199): 821254mologous to Homo sapiens Human secreted protein, SEQ ID NO: 7284,accession number G03203,Smith-Waterman Score=270.
ttatttaggaagacatctttgtcttttttcagagcatgaggagcacagcagccgcaaggaaatggtcctggtggaggggctgtgctctgagcaggggcgccggggctgaacgctggctagttcctctgagaggaagcccttggagaatgaacgttgagccactatggagaggatcaagaaatgacgctcttggaaggagagaagcttgggcagtatgaccattttcacgatagtgattcttcctacccatgagcgtggaatgttcttccatttgtttgtatcctcttttattttgttgagcagtgttttgtagttctccttgaagaggtccttcacatcccttgtaagttggattcctaggtattttattctctcattggcccaggtgctgctctccctccggttgtctgctttcagccctgcctgggaaatcaggccggcgccctgatcttcctgactctcattttgtgaggaacctgaacggatgagccatcgctcttgtcccacacgttctgtccaaaaggtgccctcctctctgcttgctcgggggcctgccctctgagctctggcactcaggctgggatgccgcccagtacagaggctctgcagccctgcaggggtctgactgttccacaccagcaggataaaggccacagggcatgttccccttggcggctctggcagcagattggtcggttgagtggcagaaaggcagacggggactgggcaaggcactgtcggtgacatcacggacagggcgacttctatgtagatgaggcagcgcagaggctgctgcttcgccacttgctgcttcgccacgaaggagttcccgtgccctggcaggggagataccatgatcacgaaggtggttttcccagggcgaggcttatccattgcactccggatgtgctgaccccatatcatgttccctgagataggatggctgggggttgggggtgaacagtatttgggagggaaaatcagggactctgttttggacacaatccattggagttgcaggtagacgttccagtagagaagacaagtggctggctggctctctgagcctggagttgagggggtgatgtgggctggagattggactttggcatcatcagtgttggtgaggcagctacaatcatgactctggatgagctcattgatgggggcagcaagtgtggacagagaagcaggaggtctgaagactgaggtctgaggtgtttggggagaagaggaggaaccttcaaaactattgtatgatttcacaaacaggacactgacattgatagagtccagattcagaacatgtccgtcatcaccaaggtccctcat

SEQ ID NO: 5077 - DNA, 909 bp, Homo sapiens
  SIMILAR (763)..(602): 871254mologous to Xenopus laevis unidentified open reading frame 2,accession number X02585,Smith-Waterman Score=249.
tgcctcctgcagcaaccaggccagggggaatctggattcctattacacttctgaggaaggtggtcagggagtgtggaggatgtgggtgggagggggtgaggttgagggcaggagtacactgtggtcttctgtcttctacctcattggcccaggtgctgctctccctccggttgtctgctttcagccctgcctgggaaatcaggccggcgccctgatcttcctgactctcattttgtgaggaacctgaacggatgagccatcgctcttgtcccacacgttctgtccaaaaggtgccctcctctctgcttgctcgggggcctgccctctgagctctggcactcaggctgggatgccgcccagtacagaggctctgcagccctgcaggggtctgactgttccacaccagcaggataaaggccacagggcatgctgtggtggaaggctctggcagcagattggtcggttgagtggcagaaaggcagacggggactgggcaaggcactgtcggtgacatcacggacagggcgacttctatgtagatgaggcagcgcagaggctgctgcttcgccacttgctgcttcgccacgaaggagttcccgtgccctgggagcggggataccatgatcacgaaggtggttttcccagggcgaggcttatccattgcactccggatgtgctgacccctgcgatttccccaaatgtgggaaactcgactgcataatttgtggtagtgggggactgcgttcgcgctttcccctgactttctggagtttcaggtcatgtcttttttcgtattggtttgtgtcttagttgttaatcctacagtggaggcctggggaataagcagcggcaggcccagcttgtgcagcggctgcagggcaaggtcagggccacccattcctgctcttt

SEQ ID NO: 5078 - DNA, 585 bp, Homo sapiens
  SIMILAR (32)..(151): 851254mologous to Homo sapiens Human phosphodiesterase interacting protein, myomegalin,accession number Y71159,Smith- Waterman Score=167.
ttatttaggaagacatctttgtcttttttcagagcatgaggagcacagcagccgcaaggaaatggtcctggtggaggggctgtgctctgagcaggggcgccggggctgaacgctggctagttcctctgagaggaagcccttggagaatgaacgttgagccactatggagaggatcaagaaatgacactcttggaaggagagaagctcattggcccaggtgctgctctccctccggttgtctgctttcagccctgcctgggaaatcaggccggcgccctgatcttcctgactctcattttgtgaggaacctgaacggatgagccatcgctcttgtcccacacgttctgtccaaaaggtgccctcctctctgcttgctcgggggcctgccctctgagctctggcactcaggctgggatgccgcccagtacagaggctctgcagccctgcaggggtctgactgttccacaccagcaggataaaggccacagggcatgcctccttgaggacctgggttttcaggcccccgaggttggtcaatgtggagtctttcccactgttcatctgggaactgaaggaatatcccat

SEQ ID NO: 5079 - DNA, 994 bp, Homo sapiens
  SIMILAR (560)..(991): 1001254mologous to Homo sapiens dJ163M9.1,accession number AL021920,Smith-Waterman Score=763.
tgagtgcggcggaattcctggaagaagagaggtgagccggcggtcaggcagaggctggcctggcagcgggtcttgactgcgcccctgaggtggaggtaccaagtgacactgtttctccttctaggaagcagaagcgttggagaaccagtcccagccttgtgacactgggcccaatcagcatttagcccaccagggtccacccagcacccgcgctcccagctgtcacaatgcaaacaacgctatcaagatctccaggagaagctgctgctatcagaagccactgtctttgctcaggcgaacgagctggagaaatagagagttatacttagtaggtgaacccttgctgaagcaggacagtaaacaggtccaggtggacctccaggacctgggctatgagacttgtggccaaagcaagaatgaggctgaacaggaggaaaccaccagtcccgcacctacttggtcccgcgcgctccctcgtgtcgcccctcggagcagcagccgccgcggtcgccgctacccggaaagaagtcagagacgccgcgaggtcgccgccaccgccatgcccaagaataaaggtaaaggaggtaaaaatagacgcaggggtaagaatgagaatgaatctgaaaaaagagaactggtattcaaagaggatggtcaggagtatgctcaggtaatcaaaatgttgggaaatggacggctagaagcaatgtgtttcgatggtgtaaagaggttatgtcacatcagaggaaaattgagaaaaaaggtttggataaatacctcggacattattttggttggtctccgagactaccaggataacaaagctgatgtaattttaaaatacaatgcagacgaagctagaagtctgcaggcatacggcgagcttccagagcatgctaaaatcaatgaaactgatacatttggtcctggagatgatgatgaaattcagtttgatgacattggagatgatgatgaagatattgatgacatctaa

SEQ ID NO: 5080 - DNA, 550 bp, Homo sapiens
  SIMILAR (16)..(525): 551254mologous to Homo sapiens Human secreted protein clone aw92_1,accession number W73624,Smith-Waterman Score=389.
cggcggtatcgaccccgacgtgttcaagatcctggtggacctgctgaagctgaacgtggcccccctcgccgtcttctaaatgcgcgagtccatgtgtgccgggcagaggctagcgagcgagccccaggaccctgcggccgtgtctctgcccacgtcgagcgtgcccgagacccgaggcttgagtgacaacttgaggacaaggcggcgcctcgacaagatttcacacagcagctacgggggccagagaagcagcaccgcatggtgtggcaggagaaggaggacatgcacaagcaattggttgaagcttcagagacattgaaatcccaagccaaagaactgaaagatgcccatcagcagcaaaagctggccctgcaggagttcttggagctcaatgagctcatggcagagctctactcccagaagcagaaggtgtgggacaaggaggaggagatggaagtagccatgcagaaagctgacatgatgtggcaggagatctgaagatccaagaagctcagaaagaggatgctgtttagccagatgcggtggctcc

SEQ ID NO: 5081 - DNA, 638 bp, Homo sapiens
  SIMILAR (556)..(636): 401254mologous to Homo sapiens Human TANGO 125a (T125a)amino acid sequence,accession number Y52138,Smith-Waterman Score=67.
tttttttttttttgacctggaccctctgcatctcaaaaaggtttattatcaattgaaggaggtaacatgtagctttttgctggggacaaaaatgcaacaagtctttgccccatcctaggtgctgccccgtgtagggctctttcccaggccccgccccccttgggcaaaccttggtaacgctgggcttggcgtggcaatcctctggctggatccttcgcggctggctcgttccgcccagggccaaatgctccccccgagggcaagcgcttgccatttgtctctcccttcggggtctcggggcacgctcgacgtgggcagagacacggccgcagggtcctcggggctcgctcgctagcctctgcccggcacacatggacttgagcatctggaagacgggcgacggggggccacgttcagctttcagcaaggtccaccagggatctttgaacacgttcggggtcgataccgccgcccgccgcctgagccaagctcgtacagctccatctccttcggtgctcagcaccttcttccgccgcagcgccagcttctgccgggccgcctccagccccgggggcgccgccgaccccggcccaggccctacgccctgcgccgccatccccgcggcccgcggaaaggtg

SEQ ID NO: 5082 - DNA, 787 bp, Homo sapiens
  SIMILAR (235)..(564): 351254mologous to Zea mays extensin-like protein,accession number AF159297,Smith-Waterman Score=112.
cccggaagcagatcgcgctggggaaaggccacgtcgctatgagtgtgtttcagtctacctggattaaacgtttgcttctcttcgtctaccttgattaaacgtgcacttcgcagtcctcggttctccatacccgtgacctggggatcgctacggaccttaaaatacccgcaacagccccttcgtcccaagtaggtaggagaattgctcccctttcggtttaaaatctctctgaggccgttccttgctctctgcctttcttccttaggaccatgtagacaaccccattcaggtagtgttcccgcttaaaaccctctgcttgggccccgcgccaagtcgagtcctcattcgggatgtggactagcgcccttcgcgatccccgagctcctccgtcgtctgcccctggaggggagcgcccactgtccggctcctgaaggagccgcttctcctcccacgtcctgggattctgcagaccctccctgtcgagagacatcgatcttcgcgccacctcgtgtcgtcctcacgccagggccttccgctccccaggcttccccttcacagccactgcttttcttgactccccgttgggacaggttacctgagtctgtcttgtgacacccagtgttcttccttcccaaattttactccactggaaaatgtgctcttccgggaggagggcatcctattcctcccctttcctcccgaatgggtgggtgagagggatcaggagaggaaaaagacggggaacgacggagcaaaaggaaaaactgatgagaaaagaaatgaggaa

SEQ ID NO: 5083 - DNA, 2633 bp, Homo sapiens
  SIMILAR (423)..(980): 831254mologous to Homo sapiens ferredoxin,accession number M34788,Smith-Waterman Score=716.
gggtatgcggaacagaacacagtggtctagctaaccgatttccgctagacgtccagctatctttcaaaatattttgtttctgcacggcaacttcagccgctaaaaaagcatccagcttacaacggaacctggagggttggtaaaggccccctgcgctggccccgccccatgggaccgggcggcgtgggcgtgagaggcggggcggggcgcgctctgcttgccaatgtctttataggtcacccggaaggcacgcggaacctcggcgcggtgcttccagcagggtctctccgccactccagccccgcgcccctcgccgcggccctcgggcgtctgcgccgcagctgccgcccccgcctctttggagtctctcgcggcctcaaagcgcggcctgcgtcgcttccggcagttcccgaccgcgggcgatggctgccgctgggggcgcccggctgctgcgcgccgcttctgctgtcctcggcggcccggccggccggtggctgcaccacgctgggtcccgcgctggatccagcggcctgctgaggaaccgggggccgggcggtagcgcggaggcgagccggtcgctgagcgtgtcggcgcgggcccggagcagctcagaagataaaataacagtccactttataaaccgtgatggtgaaacattaacaaccaaaggaaaagttggtgattctctgctagatgttgtggttgaaaataatctagatattgatggctttggtgcatgtgagggaaccctggcttgttcaacctgtccacctcatctttgaagatcacatatatgagaagcttagatgcaattcactgatgaggagaatgacaatgctcgatctgggcaatggactacccagccagatccccggttgctgccaaatcctgtttgacaaaaatctatggacaatatgactgttcgagtgcctgaaacagtggctgatgccagacaatccattgatgtgggcaagacctcctgaactagaacaaatagggaatattttcatggaaaatttacctatttttataattattatttcttaaagtgattaaattgagaacatggatgagtggacttcatattatgactagctttactattttaattcaccttgcataactactgaattttgtcattcttgaaagtatgcaatttttattttggttatattacaaaaatgtcaatcaaatattaaaaaatagttaatgtgatagaaaaaccttacatatttttttctcatgtgtgtgtatcgcgacttgcgcaatgtgttttcataatatctcatctggtttaccctggaagattgggttaagaaaatattttattattcctggtttgaagtgggttgaaggccagagatcttaccctggcttggtttagggccataccaactatttacaaactctgtactagaccctgtgtccttattcctataagctatggtgttcagactgaaactggagaaattatgactaatttatttatagtagtagttaaattccgagtggtgtatggcacaaaaaatatttattggctcagtaaagctgcttaacttcaaaagatagttattgccctttataaataaatatttcaaaattttgatgcggaaggactaagtctggccgtagacgattataatgctatcaaagaagtttgatctctgttttgactaaactagaggaaaaatgattggatgtgtttattcttttctaagcagaatggtttaactttgtactctttgaaaaataatgctgatttataaatctctgcctataacagaatggaaaccttatgaatgaattgtgtttctctgtcctgagctcggtacccctggagaagggaatgagcaggctgacacgttgcacagccccaggtggcgccattctctcacgcaaggatggggctgcagggtgagcagcgtgggctgcagtgtgtcagtcccaggagtgagggagtggcaagcaccacagattaccacgtatgtgtggaagacattcgtactcttatctttactataaataaattcataaaagttaacaaaggggtacacagtatggtctttggaaatataataaaacatcaactaacttggactaattgtgaggaaagagcagaccaaattagtagaaagaggttataagacaattgagttagcttcatgtgtattattgcagcttgatcatttatataaatatttgtctagtacaatgcttgacatacagcattgtgttatgcccattggggacacagaggtgaacaagacaaggaatgccatcagggaattcaccttttattaggaaaatataaaatatgtatgtatgtgcagataatttgcttgaactaaactgactagttctgctaaataagattttaaactaattcatatgtaaaaagtgattaggaagaacttgaagtatcatttgatgcttaataactattgagtaggtttttttttttttttttggtggggggagcgggggacagggtcttactctgtcactcaggccagagtacaatagtatgatctcggctcactgcaacttctgcctcccagtttcaagggattctcgtgcctcagcctcccaggtagctggtactacaggcacggaccaccacgcctgggctaatt

SEQ ID NO: 5084 - DNA, 933 bp, Homo sapiens
  SIMILAR (3)..(698): 291254mologous to Mus musculus retinitis pigmentosa GTPase regulator,accession number AF286473,Smith-Waterman Score=279.
atgaggatggagactgggaccagagaagaggaggtgaggctggagaccaggaccagaggagaggaggtgaggatgaagaccaggaccagagaagaggaggtgaggatggaaacagggaccagaagagagatggtgaaaatggagactgggactggaagagagaagatgaaaataaagaccaggatgaaaagagagaaggtgaagatggaaaccaggaccagaggagaggaggtgaggatggagaccaggaccagaggagaggaggtgaggatggaaaccaggaccagaggagaggaggtaaggatggagaccaggaccaggggagaggaggtgaggatggagaccaggaccaggggagagaaggtgaggatggagaccaggaacagaggagaagaggtgaggatggagagtgagaccagaggagaggaggtgaggatggaggccaggaccagaagagaggaggtgaggatggaaaccaggactggagcagagagggtgaggatagagactgacactggaggagaggaggtgaggttggagagtgagaccagaggagaggaggtgaagatggagagtgaggccagaggagaggcagtgaggatggagactgggaccggagcagaggaggtgaggatggagaccaggaccagaggagtgttggtcatctgtgtcactctcaaggtcctccagcatctggttgtgtcagctgagatggtgggcaaggccttggtgccttattaccgtcaaatcctccctgtcctgaacatctttaagaatatgaatgaatcccacaatgaacatgctggtccactttatgatgttccacagctccacattcagaagcagcaatcagaacacaggtccccaagttttggaggaaagggtccttttcacctgcactggctcccacaagctgtgtgcaagctactctag

SEQ ID NO: 5085 - DNA, 882 bp, Homo sapiens
  SIMILAR (542)..(339): 571254mologous to Leishmania major L8840.12,accession number AC018749,Smith-Waterman Score=222.
  misc_feature (1)...(882): n = a,t,c or g
tgaattgcatatgaaaattatagtttattgtctatacaactgaaggtttaactcggactcctgcttctgtcggagctgtataaagaagcaattcttctcttagaacaaataagcacagtacactattgtaatctaagaaacaggcactatttatgtattggaaagccttgctctcaatagggctaacagtccaatggcccataagccactattttagcagctgtagaaaagaaagctgtggaagtcacaaggaatgagatgctaaaagcaacagagacagatgatcccaacacccancgggaggtttcaagtcccagctgctgccactgttagtttagcaagcaagactcgtaggttgggaccacgtacttaatgttgataaaggcattttctcctccgtagcgctcgaaggcctccagtgtctcctggatcaagtccccaatgttctccctcttctgctggctgtagtcaatgccgtctccggagttcacattcatattcttaaagatgttcaggacagggaggatttgacggtaataagggcaccaaggccttgcccaccatctcagctgacacaaccagatgctggaggaccttgagagtgacacagatgacctgtcggtttcggaggttcaaggcattttttatcgggataatgagctgtggaaggacaggtaggatcttgttccccccgtgttccagcatgtcgtggattccttgccgagcaaaaaactcatagggaaatgtcatttcacaaagcccatcaaaaaacagaggcagataatgatggtaatccagcttctcaatttctaccttccaggcgattttgtttcctttcgaatcatgctcaagggcaattgggaagtcacccggacgcgtggg

SEQ ID NO: 5086 - DNA, 1353 bp, Homo sapiens
  SIMILAR (131)..(1249): 841254mologous to Homo sapiens dJ423N22.1.1 (KIAA0289) (isoform 1),accession number AL022145,Smith-Waterman Score=1636.
gtatgggagactgcagggtcagtgttggtcagcgacggaccctgctctcagcatgctctttctgcctgactgctttcagtgtctgcagcagctgctagcagggtgagagaggaggaagagagcagtcggaggctttgacctggttttgggagagcagccctctgataaaatatttaggtaagtgattgtctagggacttgctttgtggttgcccctcagcaagagctttgtgattccaccagccgaactggccatcaatccatcagcaaagtgcaagacggacatgactgtgatggaggatgctgtggaggtcaggtgagtctggcttcaggactgaggcctcgacagcctggaggttctcttagattcctttgggccggtgcgcgactgcagcaaagataacgggggctgcagtaagaatttccgctgtatttcagatcgcaagctggactccactggttgcgtggtaggtctgccctgcaagctagtagtggacagctctggctgctatgaccgccacatcggggtggactgttccgacggcttcaacggcggctgtgagcagctgtgcctccagcagatggcgcccttcccggacgaccccaccttgtataacatcctcatgttctgtgggtgagttgagctgccagcgaggccactggatggacgctcttgccaactcatcacggagacctgtccagagggaagtgactgtggggaaagcagggagcttcccatgaaccagaccctctttggggagatgttctttggttacaacaaccattccaaggaagtggctgccggacaggtgctgaaaggaacattcaggtaaacctcatatacatagaactgataccagcaactgccagatggtcttgtggtggccactgtgcccctggagaatcaatgcctagaggagatctcggagcccacccctgaccctgacttcctgactggtgagtgtgccttctcaaccttattcgggtaccctgtgctgcagcactggaaggtccggtctgtgatgtaccacatcaaactcaaccaagtggccatctctcagggtgagcactgctgcaggctatcctgcgatggggctacatctcgtgcagattttgtggcgctgttggaccagttcggcaaccattacatccaggaagctatctacggctttgaggagtcctgttctatctggtacccaaacaagcaggtccagcggcgactctggctggagtatgaagacatcagtaaaggtgagtggcatgcttgttggcaaattctctccacatttccctggattgtcatttccctgcataactgtcttccataataatagacttgacagtatttaccata

SEQ ID NO: 5087 - DNA, 482 bp, Homo sapiens
  SIMILAR (3)..(152): 1001254mologous to Oryctolagus cuniculus glucose-regulated protein GRP94,accession number AF001631,Smith-Waterman Score=262.
gtttctattccgccttccttgtagcagataaggttattgtcacttcaaaacacaacaacgatacccagcacatctgggagtctgactccaatgaattttctgtaattgctgacccaagaggaaacactctaggacggggaacgacaattacgtgagtatgaccaattccttataagaattaatagtcatggtgaggatcttgactctccagttctattctctgagcaaatgacttattctgggccttaattttcctgccttataaaatgaggaaacagaactgttgtcacttgaagaaatgtttgaggacctgcaaagggccaggcacaaaggtttgtgattgctgttgtacatggagggtataaagtaggaaatagcagcagcttccccaagggagaaggcttcttgggtacccacagaggaggcactgctttgtcagtttcccaggttagaagagtaatttgtctgtggagcatcctgat

SEQ ID NO: 5088 - DNA, 2726 bp, Homo sapiens
  SIMILAR (469)..(2460): 821254mologous to Homo sapiens precursor polypeptide (AA -21 to 782),accession number X15187,Smith-Waterman Score=2636.
  misc_feature (1)...(2726): n = a,t,c or g
atgagggccctgtgggtgctgggcctctgctgcgtcctgctgaccttcgggtcggtcagagctgacgatgaagttgatgtggatggtacagtagaagaggatctgggtaaaagtagagaaggatcaaggacggatgatgaagtagtacagagagaggaagaagctattcagttggatggattaaatgcatcacaaataagagaacttagagagaagtcggaaaagtttgccttccaagccgaagttaacagaatgatgaaacttatcatccattccttgttatagaataaagggattttccttgagagacttatttccaattcctcctgttgctttggataggttaagcctaatatcactgactgatgaaaatgctctttctgtaaatgagtaactaacagtcaatcattaagtgtgataaggagaagaacctgctgcatgtccagcacaccggtgtaggaatgacccagagaagagttggttaaaaacccttggtaccatagcccaaatctgggaccaagcgagttttttaaacaaaatgncctgaagccacaggaagatgggcccagtcaaccttcctgaattgattggcccagtttgggtgtccggtttcctattcccgccttcccttgtagcagataaggttattgtcacttcaaaacacaaacaaccgataccccagcacatctggggagtctggactcccaatggaattttcttgtaattgctggacccaagagggaaacactcttaggaccgggggaaccgacaatttaccctttgtccttaaaaagaagaagcatctgatttaccttggaatttggataccattaaaaatctccgtcaaaaaaatattcacagtttcataaaacttttcctaatttatgtatggaggcagcaagactgaaactgtttgaggagccccatggggggaagaagaagcagccaaagaagagaaagaagaatctgatgatgaagctgcaggtagaggaagaagaagaagaaaagaaaccaaagactaaaaaagttgaaaaaactgtctgggactgggaacttatgaatgatatcaaaccaatatggcagagaccatcaaaagaagtagaagaagatgaatacaaagctttctacaaatcattttcaaaggaaagtgatgaccccatggcttatattcactttactgctgaaggggaagttaccttcaaatcaattttatttgtacccacatctgctccacgtggtctgtttgacgaatatggatctaaaaagagcgattacattaagctctatgtgcgccgtgtattcatcacagacgacttccatgatatgatgcctaaatacctcaattttgtcaagggtgtggtggactcagatgatctccccttgaatgtttcccgcgagactcttcagcaacataaactgcttaaggtgattaggaagaagcttgttcgtaaaacgctggacatgatcaagaagattgctgatgataaatacaatgatactttttggaaagaatttggtaccaacatcaagcttggtgtgattgaagaccactcgaatcgaacacgtcttgctaaacttcttaggttccagtcttctcatcatccaactgacattactagcctagaccagtatgtggaaagaatgaaggaaaaacaagacaaaatctacttcatggctgggtccagcagaaaagaggctgaatcttctccatttgttgagcgacttctgaaaaagggctatgaagttatttacctcacagaacctgtggatgaatactgtattcaggcccttcccgaatttgatgggaagaggttccagaatgttgccaaggaaggagtgaagttcgatgaaagtgagaaaactaaggagagtcgtgaagcagttgagaaagaatttgagcctctgctgaattggatgaaagataaagcccttaaggacaagattgaaaaggctgtggtgtctcagcgcctgacagaatctccgtgtgctttggtggccagccagtacggatggtctggcaacatggagagaatcatgaaagcacaagcgtaccaaacgggcaaggacatctctacaaattactatgcgagtcagaagaaaacatttgaaattaatcccagacacccgctgatcagagacatgcttcgacgaattaaggaagatgaagatgataaaacagttttggatcttgctgtggttttgtttgaaacagcaacgcttcggtcagggtatcttttaccagacactaaagcatatggagatagaatagaaagaatgcttcgcctcagtttgaacattgaccctgatgcaaaggtggaagaagagcccgaagaagaacctgaagagacagcagaagacacaacagaagacacagagcaagacgaagatgaagaaatggatgtgggaacagatgaagaagaagaaacagcaaaggaatctacagctgaaaaagatgaattgtaaattatactctcaccatttggatcctgtgtggagagggaatgtgaaatttacatcatttctttttgggagagacttgttttggatgccccctaatccccttctcccctgcactgtaaaatgtgggattatgggtcacaggaaaaagtgggttttttagttgaattttttttaacattcctcatgaatgtaaatttgtactatttaactgactattcttgatgtaaaatcttgtcatgtgtataaaaataaaaaagatcccaaat

SEQ ID NO: 5089 - DNA, 416 bp, Homo sapiens
  SIMILAR (347)..(195): 351254mologous to Oryzias latipes DLX1,accession number AF288040,Smith-Waterman Score=69.
ttttttttttttttaccaggccaaattttttaatttttttgtagagatggggtctcgccatgttccccagtctggacaacaagagtgaaactctgtctcaaaaaaaaaaaaaaaaagatctatgtccccacatttcatttgaaatggatctgaccacggcagatgcccgctgggtgcaagacgcagccacgaggctcctggctaccactcggtgtccaccaaactccagaggtagtcgctgatgaatttcctggagagctgggtgctgtcctggtggatgggctgggccacactggggccatgatggatgcctttgaccatccctggctcacactcataatcccactcaattttactaacttggtgaggatctctcgcagctgcttctcggcaccgtcttgcgtttccagcagccg

SEQ ID NO: 5090 - DNA, 477 bp, Homo sapiens
  SIMILAR (22)..(474): 531254mologous to Mus musculus unnamed protein product,accession number AX052751,Smith-Waterman Score=383.
atggccgccttccgcgacatagaggaggtgagccaggggctgctcagcctgctgggcgccaaccgcgcggaggcgcagcagcgacggctgctggggcgccacgagcaggtggtggagcggctgctggaaacgcaagacggtgccgagaagcagctgcgagagatcctcaccatggagaaggaagtggcccagagccttctcaatgcgaaggagcagctcaccagagagctggaagagctcaaggagattgaggcggatctggagcgacaggagaaggaggtcgacgaggacacgacagtcacaatcccctcggccgtgtacgtggctcaactttaccaccaagttagtaaaattgagtgggattatgagttccatcatggccccagtgtggcccagcccatccacctggacagcacccagctctccaggaaattcatcagcgactacctctggagtctggtggacaccgagtggtag

SEQ ID NO: 5091 - DNA, 864 bp, Homo sapiens
  SIMILAR (72)..(383): 301254mologous to Zea mays viviparous-1,accession number AJ001635,Smith-Waterman Score=83.
tcaggactgggtcatgggggtggtctgccagccagcagaggcacaggaaggacagagggctggactctgctggctctgggtgggtgagccacatccttcctgttcccgctcctccgccggctgatgcacgtccctcggcgagcagatggagaaggcagggaagccatcctctcccaggaaggacagagtgtccctccgtccagccactctgcctgcctcctccagcaggacatcatagaaatcacagcatagcaagcccatctcagactccacctccaaggagccttccaggatcccaagacaaatccctctttcttccaagggataggagaacaggggagggagagggacatatgaattaggccccactgagtgcaccaggtacctcatgtaggtcaggtggctccacgtcctggcttcctgagattctgggccccacacagtgaaagaaatcccagactgttcttctacccgagtccccctgcggcttaggcggtacctgacacaaagcctgggccccagctgggctggggagagcggggaggggagaggaagagaagcgctgtgggcctcagtcactcggcagtgcttggtaaatgatactgctgttggcactggtactggtgctgcggtcatgtctcctttttgatttgttaaatcgtcatggttgcatgttaaggagtcctctgggaagaagtgggtgaacaacatccctgcagctcctccagaagcctggggagtatgactaagttgtctcctccacctccttgtcttcttcttccctgctgctttgatacaggaggagggggcgagagttggggggactcctgcatcagcttcagggaaatgaccttgaagggccat

SEQ ID NO: 5092 - DNA, 633 bp, Homo sapiens
aaatcccttaagattcttttctataattagttttctttgaagaagcttggaaagttttctgcattgagatttagaatccacagtgtttctgtaatttagctttccaggaattttgaattttaatttttgtttttactttttatgtacacagtataatgatgttagtgttaaatattaaaaatctgactcttcactgggacttttttatagatacaaatgtatctgtggtagtacaaggactttgttactttggcgtgcagtcttatcaaggagttgtgtgtgtgttttgcatacaactttacaatttcatagttgaaagctgttacaaaatgaaagttttgtgtatggtaggatatcttcaaggtgggtggatgttttctgtttaaaagattaagatgccaacagcgtttttttcttttaattttttcatcaagcacccagtcagcttgaagagtttcaaatggaccctaccactgagaaatcaagatggcagtctactatggggaattgaggaaaaatggattaatacaagagtcctgtgataatatacaaccaagacagggttcttttaacatggattccatgcagtgaatgaagacaggtttcttacccaacacaaatggacagtggatt

SEQ ID NO: 5093 - DNA, 557 bp, Homo sapiens
cattcgacatcgatgatcactagtccagagtggtggaattccgcgctcggacccggttctccaacggaggagctttttaacctctttccggtgaggagggaactcatcttcatgatcgaatttaaaagaacaatggaaccctgactacgtttcaacaaaaataaaacttgtttttttccctcctatagggtggtggcttttaactctttcaaagccgattttgaaacggctgcagtgatacatgcgaaggtgacttaagagattaaaattaatttggttgctgttggttctgaacaaataaagagttcttttatttgaggtatgccattttgaaaactgagacgttggagttttatcctacaggatacaggaaatctttgggaaaggcagtattgtatatagcaaaaatatgaacctcaaactgaatcctgtaaaggccccatacaatgaagtagacattggtggaaacatttacacccagtcagcttgaagagtttcaaatggaccctaccactgagaaatcaagatggcagtctactatggggaattgaggaaaa

SEQ ID NO: 5094 - DNA, 1078 bp, Homo sapiens
  SIMILAR (719)..(1006): 391254mologous to Mus musculus plenty-of-prolines-101; POP101; SH3-philo-protein,accession number AF062655,Smith-Waterman Score=141.
  misc_feature (1)...(1078): n = a,t,c or g
actcggcaacctacaaaggccaaagtattactaaaattaaaacttaaacattttaattaaaccttcccactttaaaanaaaaaaaaccccaaacctgagaaattttttaagtgttacaaatttttattaaaaattaacatttcaagaggtcatacggtatacaaatcaaactgcaaaaaaattccaggcataaaaactattatctggggtaagtgtgcccatctttcttctcccaaatggtcaaaaatggtcccaccaaaaaaagtctttaggaaaagtccaaatcccactgtcccatttgtggttggggtaagaaacctatgtcttcattcactgcatggaatccatgttaaaaggaacccctgtcttggttgtatattatcacaggactcttgtattaatccatttttcctcaattcccccagtagtagactgcccatcttgatttctcagtggtagggtccattttgaaactcttcaaagctgactggggtgtaaatgtttccaccaatgtctacgttcattggtatgggggcctttagaggattcagtttgaggttcatatttttgctatataaaatactgactttcccaaagatttcctttatcctctaggataaaactccaacgtctcagtcttcaaaatggcatacctcaaataaaagaactcgattatttgttcagaaccaacagcaaccaaattaattttaatctcttaagtcaccgggtccgagcgcggccaccggcacctcctggtcgcccaaatccgagtcccgggccggaccgcccgcccgagcctcccgcccgcgccgggtccagccgccggggcccgggggagcctccgagacggcaaccgcagcggcgctttcggcgtcgtgggcccgaccgccctgggcgcctctcccgcgggctgtgacgccgacgcgcgcggcccgcctcgcctcagccgcggcagcaccactcccgcgggcctgctggccgtccgggcgtagctccccgccggccggcgggcctcgcggccgcggcggaacgcctgacagctcggggtgctgctgcctctccggccatccctcgtgcc

SEQ ID NO: 5095 - DNA, 455 bp, Homo sapiens
  SIMILAR (293)..(442): 621254mologous to Rattus norvegicus L1 retroposon, a portion of its ORF2 sequence,accession number X61295,Smith-Waterman Score= 176.
  misc_feature (1)...(455): n = a,t,c or g
gggtaagccggttcnnnnncaatgagactaagacatgcggnggcatctaaggaacagaacgaggcctcacaaataacaccacacatctacaaccacctgatctttgacaaaccctatttaatatatggtggtgggaaaattggctagccatatgcagaaagctgaaactggatcccttccttacaccttatacaaaaattaactcaagatggattaaagactaaaatataagacctaaatccataaaaaacctggaagaaaacctaggcaataccattcagcacttaggcatggcaaagacttcatgactaaaacaccaaaagcaatggcaacaaaagccaaaattgacatatgggatctaattaaactaaagagcttctgtacagcaaaagaaactatcatcagagtgaacaggttacctacataatgggaaaaaatttttgcaatctacccat

SEQ ID NO: 5096 - DNA, 861 bp, Homo sapiens
  SIMILAR (331)..(789): 741254mologous to Homo sapiens putative p150,accession number U93572,Smith-Waterman Score=571.
atggataaattcctggacacatacaccctcccaagactaatccaggaagaagttgaatccctgaatagaccaatcacaggctctgaaattgaggcaataattaataggctaccaaccaaaaatgtccaggaccagacggattcacagccgaattctaccagagagaataaaatacctaggaagccaacttataagggatgtgaaggacctcctcaaggagaactacaaaccgctgctcaacgaaataaaagaggacacaaacaaatggaagaacattccatgctcatggataggaagaatcagcatcgtgaaaatggccatactgcccaagccatatgcggaaagctgaaactggatcccttccttacaccttatacaaaaattaattcaagatggattaaagacttaaatgttggacctacaaccataaaaaccctagaagaaaacctaggcaataccattcaggccataggcatgggtgaggacttcatgactaaaacaccaaaagcaatggcaacaaaagcaaaaattgacaaatgggatctaattaaactaaagagcttctgcacagcaaaagaaactaccatcagagtgaacaggcaacctacagaatgggagaacatttttacaatctacccatctgacaaagggctaatatccagaatttacaaagaacttaatcaaatttacaagaaaaaaatcaaggaaccccatcaaaaagtaggtgagggatatgaacagacatttctcaaaagaagacatttatgcagcccacagacacatgaaaaaatgctcatcattactggacatcagagaaatgcaaatcaaaaccacaatgagataccatctcacaccaattag

SEQ ID NO: 5097 - DNA, 372 bp, Homo sapiens
  SIMILAR (6)..(200): 531254mologous to Homo sapiens Human secreted protein, SEQ ID NO: 7534,accession number G03453,Smith-Waterman Score=165.
aactaaagagcttctgcatggcaaaagaaactaccatcagagtgaacaggtaacctacagaatgggagaacatttttgcaatctacccatctgaaaaagggctaatatacagaatctacaatgaagccacaaataaagaccttgtacggaggtctggccctctgaaaacacccaaaaagaaaagccaactgaccgtactcaacttagtcacctttaaaagaacaccagccctctcagaggagaaagaatcagcacaagtactctggcaatttaaaaagccagagtgtgtacttacttccaaaagagtccactagctccccggtaatggttcttcttgcattcaattacacataatcaatgtacagaatgttc

SEQ ID NO: 5098 - DNA, 1866 bp, Homo sapiens
  SIMILAR (1)..(1836): 761254mologous to Homo sapiens putative p150,accession number U93568,Smith-Waterman Score=2311.
atgaatattgatgcaaaaatcctcaataaaatactggcaaaccgaatccagcagcacatcaagaagcttatccaccatgatcaagtgggcttcatccctgagatgcaaggctgggtcaacatatgcaaatcaataaacataatccagcatataaacagaaccaaagacaaaaaccacatgattatctcaatagatgcagaaaaggcctttgacaaaattcaacaacgcttcatgctaaaaactctcaataaattaggtattgatgggacatatctcaaaataataagagctatctatgacaaacccacagccaatatcatactgaatgggcaaaaactggaagcattccctttgaaaactggcacaagacagggatgccctctctcaccactcctattcaacatagtgttggaagttctggccagggcaatcatgcaggagaaggaaataaagggtattcaattaggaaaagaggaagtcaaattgtccctgtttgcagatgacatgattgtatatttagaaaaccccatcgtctcagcccgaaatctccttaagctgataagcaacttcagcaaagtctcaggatacaaaatcaatgtgcaaaaatcacaaacattcctacacaccaataacaggcaaagagagagccaaatcatgagtgaactcccattcacaattgcttcaaagagaataaaatacctagaaatccaacttacaagggatgtgaaggacctcttcaaggagaactacaaaccactgctcaatgaaataaaagaggacacaagcaaatggaagaacattccatgcttatggataggaagaatcaatatcatgaaaatgtccatactgcccaaggtaattcataaattcaatgccatccccatcaagcgaccaattactttcttcacagaattggaagaaactactttaaagttcatatggaaccaaaaaagagcccgcattgccaagacaatcctaagcaaaaagaacaaagctggaggcatcacgctacctgacttcaaactatactacaaggctaacagtaaccaaaacagcatggtactggcagaaaaacagagatacagaacaatggaacagaacagaggcctcagaaataatgccacatatatctacaactatctaatctttgacaaacctgagaaaaacaagcaatgggggaaaggattcccttatttaataaatggtgctgggaaaactggcttagccatatgtagaaagctgaaacttggatcccttccttacaccttatacaaaaattaattcaagatggattaaagacttaaatgttagacctaaaaccataaaaaccctagaagaaaacctaggcaataccattcaggacataggcatgggccaagaacctcatgactaaaacaccaaaagccaatggcaacaaaagccaaaattgacagatgggacctaattaaactaaagagcttctgcacagcaaaagaaactatcagcagagtgaacaggcaacctacagaatgggagaaaatttttggaatctacccatctgacaaagggctaacatccagaatctacaatgaactccaacaaatttacaagaaaaaaacaaacaaccccatcaaaaagtgggccaagcatatgaacaaacacttctcaaaagaagacatttatgcagccaaaaaacacatgaaaaaatgctcatcaccactggccatcagagaaatgcaaatcaaagccacaatgagataccatctcacatcagttagaatggcaatcattaaaaagtcaggaaacaatagtgtgtccgacatttctctagcttggctaaattgtgacatgatccaagttactggtctggcagcagggagaaaagag

SEQ ID NO: 5099 - DNA, 430 bp, Homo sapiens
  SIMILAR (103)..(426): 351254mologous to Escherichia coli MreC protein,accession number M31792,Smith-Waterman Score=103.
gggggagtcttcttcctgcggacccccacagactgctgcgggatgttgcagggtgcagccggaagcactgggttctacgcatctgaagcgagacccagagggccagcctgctctctggataggggctcgagttctctcctctcttggggtctgcatcaggaccctctttttccagcagcaaagcaacacaggagggaggctggacgcgctgaccagaactctcctcgccctcgtctgagcacaggctgacagacaccgaccctctagcgtagaccggcagcggccacgggtagacggcgggctcagcccccacgggcgacttcagtctcagctccagcttctcccccatgtccgcgcgcgcggccgccgcaccatgctcggcctcccagagtgctggcatgtcagccgtgagccaccgcgcccggcccat

SEQ ID NO: 5100 - DNA, 478 bp, Homo sapiens; identical to SEQ ID NO: 3840
  SIMILAR (1)..(258): 951254mologous to Homo sapiens putative p150,accession number U93563,Smith-Waterman Score=429.
  misc_feature (1)...(478): n = a,t,c or g

SEQ ID NO: 5101 - DNA, 1336 bp, Homo sapiens
  SIMILAR (3)..(1334): 931254mologous to Homo sapiens putative p150,accession number U93563,Smith-Waterman Score=2221.
tgttggaagttctggccagggcaattaggcaggagaaggaaataaagggtattcaattaggaaaagaggaagtcaaattgtccgtgtctgcagatgacatgattgtatatctagaaaaccccattgtctcagcccaaaatctccttaagctgataagcaacttcagcaaagtctcaggatacaaaatcaatgtgcaaaaatcacaagcattcctatacaccaacaacagacagagagccaaatcaataaaatacctaggaatccaacttacaagggatgtgaaggacctcttcaaggagaactacaaaccactgctcaaggaaataaaagaggatacaaacaaatggaagaacattccatgctcatgggtaggaagaatcaatatcgtgaaaatggccatactgcccaaggtaatttacagattcaatgccatccccatcaagctaccaatgcctttcttcacagaattggaaaaaactactttaaagttcatatggaaccaaaaaagagcccgcatcgccaagtcaatcctaagccaaaagaacaaagctggaggcatcacactacctgacttcaaactatactacaaggctacaataaccaaaacagcgtggtactggtaccaaaacagagatatagatcaatggaacagaacagagccctcagaaataacaccgcatatctacaactatctgatctttgacaaacctgagaaaaacaagcaatggggaaaggattccctatttaataaatggtgctgggaaaactggctagccgtatgtagaaagctgaaactggatcccttccttacaccttatacaaaaatcaattcaagatggattaaagacttaaatgttagacctaaaaccataaaaaccctagaagaaaacctaggcattaccattcaggacataggcatgggcaaggacttcatgtctaaaacaccaaaagcaatggcaacaaaagccaaaattgacaaatgggatctaattaaactaaagagcttctgcacagcaaaagaaactaccatcagagtgaacaggcaacctacaaaatgggagaaaattttcgcaacctactcatctgacaaagcactaatatccagaatctacaatgaactcaaacaaatttacaagaaaaaaacaaacaaccccatcaaaaagagggcgaaggacatgaacagacacttctcaaaagaagacatttatgcagccagaaaacacatgaaaaaatgctcaccgtcactggccatcagagaaatgcaaatcaaaaccacaatgagataccatctcacaccagttagaatggcaatcattaaaaagtcaggaaacaacag

SEQ ID NO: 5102 - DNA, 528 bp, Homo sapiens
  SIMILAR (1)..(108): 831254mologous to Mus musculus reverse transcriptase,accession number U15647,Smith-Waterman Score=155.
atgaacatcgatgcaaaaatcctcaataaaatactggcaaaccgaatccagcagcacatcgaaaagcttatccaccaagatcaagatggcttcatccctgggatgcaagagaataaaatacctaggaatccaacttacaagggatgtgaaggacctcttcaaggagaactacaaaccactgctcaaggaaataaaagaggatacaaacaaatggaagaacattccatgctcatgggtaggaagaatcaatatcgtgaaaatggccatactgcccaaggagtgaagctgcagacattcgtggtgagtgttacagctcataaagacagtgtggacccaaagagtgagcagcagcaagatttattgcaaaaagtgaaagaaaaatgcttccacagtgtggaaggggacatgagtgggttgcagctgctggctctggcagcctgcctttattccctcatctggcctcacgcacatcctgctgattggtccattttacagagagctgattggtccattttgacagggtgctga

SEQ ID NO: 5103 - DNA, 1371 bp, Homo sapiens
  SIMILAR (25)..(954): 861254mologous to Homo sapiens putative p150,accession number U93569,Smith-Waterman Score=1387.
atggtgagcattttttcatgtgttttttcagcaccacaccacaccaattccaaaattgaccacatacttggaagtaaagctgtcctcagcaaatgtaaaagaacagaaattataacaaactatctctcagaccacagtgcaatcaaactacaactcaggattaagaatctcactcaaaaccattcaactacatggaaactgaacaacctgctcctgaatgactactgggtacataacgaaatgaaggcagaaataaagatgttctttgaaaccaaggagaacaaagacacaacataccagaatctctgggacgcattcaaagcagtgtgtagagggaaatttatagcactaaatgcccacaagagaaagcaggaaagatccaaaattgacaccctaacatcacaattaaaagaactagagaagcaagagcaaacacattcaaaagctagcagaaggcaagaaataattaaaatcagagcagaactgaaggaaatagagacacaaaaaacccttcaaaaaattaatgaatccaggagctggttttttgaaaggatcaacaaaattgataaaccactagcaagagtaataaagaaaaaaagagagaagaatcaaatagacacaataaaaaatgataaaggggatatcaccaccattcccacagaaatacaaactaccatcagagaatactacaaacacctctacgcaaataaactacaaaatctagaagaaatggataaattccccgacacatacactctcccaagactaaaccaaccaataacaggatctgaaattgtggcaataatcaatagcttaccaaccaaaaagagtccaggaccagatggattcacagccgaattccaccagaggtacaaggaggaactgagaataaaatacctaggaatccaacttacaagggatgtgaaggacctcttcaaggagaactacaaaccactgctcaaggaaataaaagaggagacaaacaaatggaagaacattccatgctcatgggtaggaagaatcaatatcgtgaaaatggccatactgcccaaggtaatttacagattcaatgccatccccatcaagctaccaatgactttcttcacagaattggaaaaaactactttaaagttcatatggaaccaaaaaagagcccgcatcgccaagtcaatcctaagccaaaagaacaaagctggaggcatcacgctacctgatttcaaattatactacaaggctacagtaaccaaaacagcatggtactggtaccaaaacagagatatagatcaatggaacagaacagagccctcagaaataacgccacatatctacaactatctgatctttgacaaacctgagaaaaacaagcaatag

SEQ ID NO: 5104 - DNA, 1071 bp, Homo sapiens
  SIMILAR (1)..(402): 991254mologous to Homo sapiens putative p150,accession number U93574,Smith-Waterman Score=684.
atgagtgaactcccattcacaattgcttccaagagaataaaatacctaggaatccaacttacaagggatgtgaaggacctcttcaaggagaactacaaaccactgctcaaggaaataaaagaggatacaaacaaatggaagaacattccatgctcatgggtaggaagaatcaatatcgtgaaaatggccatactgcccaaggtaatttacagattcaatgccatccccataaagctaccaatgactttcttcacagaattggaaaaaactactttaaagttcatatggaaccaaaaaagagcctgcatcgccaaggcaatcctaagccaaaagaacaaagctggaggcatcacactacctgacttcaaactgtactacaaggctacagtaacgaaaacagcatgtttgttaaacagaagggctctccccctggcaaaccggggaagaaaaaaccctgtttttggggggcccccaaaaacggtgccgatatccccagccaaagttggcggccatccggaaacccgggaacaaccccccctctcccgaaaccccccagttttttccctggggcccccagaatggggcaatcccaagcttggggccacaaaggcttttggttcaaaaagggcaagccaaccgaaccccccggaaaaaaggcccgggttaaaaagccccccgggggccaatcccccaaggccattggacccacccgtggcccgggaaaaccaccaaaacccgatatgcgggcccccaagccccccacagattccggtcaccaaacccagaagccctcatgaccggcagacagcgctttcacaccgcacatcaacgtttcacggtccgaccccagaaccaccgctcgctcatccagcgccgaccgtgtcaacgccagcgagtacccaacatccagcgaggagacatcaggtcgctcgtccagataggtcatcaacgccgttgcctgcgcggatagcgcttcgggtgttttgcccgacaccatccacggcaccaccggaacatccacgacagaacccgaacccggccccgcagactgactcggcactcccgggggct

SEQ ID NO: 5105 - DNA, 1208 bp, Homo sapiens
  SIMILAR (1)..(399): 781254mologous to Homo sapiens putative p150,accession number U93569,Smith-Waterman Score=522.
atggataaattcctcaacacatacactctcccaagactaaaccaggaagaagttgaaactctgaagagaccaataacaggagctgaaattgaggcaataatcaataacttaccaaccaaaaacagtccaggaccagatggattcacagccgaattctaccagaggtacaaggaggaaatggtaccattccttctgaaattattccaatcaatagaaaaagagggaatcctccctatctcattttatgaggccagcatcattctgataccaaagcctggcagagacacaaccaaaaaagagaattttagaccaatatccttgacgaacatagatgtaccggaagtcctagctggagcaatcagaccagagaaagaaataaagggcattcacatcgataaagaggaagtcaaactgtccctgtttgctgacaatacgattgtttaccttgaaaaccctaaggactcctccagaaagttcctaaaactgatcaaagaattcagcaaagtttctggatacaagattaatagagcgacctggcagctctgcagcactagtaaagggaaccccactacagcaagtggactggcatgggaaacctatttgaccctgtgggctgaggactcttttccccaacttgggaaaaccaggaagccccgactttggaagctctttctgtctcctcagcaaatcctggttcaaacagaaactgcgacctaccagggctgtcagctgaagacgttgcaagcttaccttgtacatgctttgagtctcaccaagctcctgtgcattagaataaaatacctaggaatccaacttacaagggatgtgaaggagctcttcaaggagaactacaaaccactgctcaatgaaataaaagaggatacaaacaaatggaagaacattccatgctcatgggtaggaagaatcaatatcgtgaaaatggccatactgcccaaggagtgaagctgcagacattcgtggtgagtgttacagctcataaagacagtgtggacccaaagagtgagcagcagcaagatttattgcaaaaagtgaaagaaaaatgcttccacagtgtggaaggggacatgagtgggttgcagctgctggctctggcagcctgcctttattccctcatctggcctcacgcacatcctgctgattggtccattttacagagagctgattggtccattttgacagggtgctga

SEQ ID NO: 5106 - DNA, 504 bp, Homo sapiens
  SIMILAR (281)..(451): 411254mologous to Rattus norvegicus PR-Vbeta1,accession number X77816,Smith-Waterman Score=100.
ttttttttttttacatgaaaatcgttttatttatttaacaaacacaaacaattgaacaaacaaacaatggaagcaagtccttttgcctaaaggaacacagagggtcatgcggatgttgctcctccaaggatttcggtgttccccaacggctagttttgggtctagttcttctggaagatcttattcttggggagctacaggttctggcgtttggggctctttcaggttctatctccattttcccctcaattcctccccattctgctataataaaaaaaaattctcacctccggaagatcccgcctgtgcctccccgccagcctttcaggaggtctggacgtctggtccaccgctccccggcttctttccccgcttttgcttttcccctcccctgctcccgccctccggcctcaggacccgaccaccgcccagctgagcccccgcggctccacagagcagaaggtgcactggaggccctgcccgttgccgccccgcggggtgcca

SEQ ID NO: 5107 - DNA, 878 bp, Homo sapiens
  SIMILAR (155)..(313): 961254mologous to Homo sapiens Human secreted protein, SEQ ID NO: 7284,accession number G03203,Smith-Waterman Score=278.
atgacaagtcatgaagtaaaaggaccaggtgataaaatgaggtctccaaaatccaaagcatcaaagttctcagttagtggatttaaaaatgaagaagagtttgctccaatgtatgtttcaatatctcattgttttacaataatatttgaaataatacctaggaacccaacttacaagggatgtgaaggacctattcaaggagaactacaaaccactgctcaaggaaataaaagaggacacaaacaaatggaagaacattccatgctcatggataggaagaatcaatatcgtgaaaatggccatactgcccaaggacccgaccaccgcccagctgagcccccgcggctccacggcgcagaaggggcactggaggccctgcccgttgccgccccgcggggtgccaagaagtccacggggacccacgagccaccctcaccacgatccctgccctggtggagcccccgtgcggaacacaggatccgaaagatggcagcggaagctccgcagcggccccaaaagcgactgggcagggagggcacaggctccctcactgggtgaaggcggcgcaaagaacgggaagagccatcccgggagccaccgggcgttcagcctccctagggcccccaggcggctcgggccggggtctcaaccggggcgtttccgggggtttctgaagcaggcgaggggcagggcgggcgaaggccattcggctatccttctggctccagaatctcccaacgcgcaggtgtccaacgtgaccagcgcgacttaccgctccaatctctccggtcttccaaggccttgctcagtcgtcctgctgggagggccctgaggatgcaagggacggaggaagtttcgtgcgtgcgcccttcctatag

SEQ ID NO: 5108 - DNA, 2234 bp, Homo sapiens
  SIMILAR (756)..(2231): 721254mologous to Homo sapiens putative p150,accession number U93563,Smith-Waterman Score=1795.
atgaaggcagaaataaagacgttctttgaaaccaacgagaacaaagacacaacataccagaatctctgggacgcattcaaagcagtgtgtagagggaaatttacagcactaaatgcccacaagagaaagcaggaaagatccaaaattgacaccctaacatcacaattaaaagaactagaaaagcaagagcaaacacattcaaaagctagcagaaggcaagaaataactaaaatcagagcagaactgaaggaaatagagacacaaaaagcccttcaaaaaattaatgaatccaggagctggtgttttgaaaagatccacaaaatagatagaccgctagcaagactaataaagaaaaaaagagagaagaatcaaatagacgcaataaaaaatgataaaggggatatcaccaccgatcccacagaaatacaaactaccatcagagaatactacaaacacctctacgcaaataaactagaaaatctagaagaaatggataaattcctcgacacatacactctcccaagactaaaccaggaagaagttgaatctctgaatagaccaataacaggatctgaaattgtggcaataatcaatagcttaccaaccaaaaacagtccaggaccagatggattcacagccgaattctaccagaggtacaaggaggagctgagaataaaatacctaggaatccaacttacaagggatgtgaaggaccttcttcaaggagaactacaaaccactgctcaacgaaataaaaagaggacacaaacaaatggaagaacattccatgctcatgggtaggaagaatcaatatcgtgaaaatggccatacttgcccaaggtaatttgtagatttataaattcaatgctatttccattaaactaccatttactttcttcataggattgggaaaaatcttacttttaagttcatatgggaaccaaaaaaggagcctgcattgccaagtcaatcctaagccaaaagaacaaagctgggaggcatcacactacctgactttcaaactattacttacaaggctacagtaaccaaaacagcatcggtactggtaccaaaacagagatatagatcaatggaacagaacagagccttcagaaataacaccgcatatctacactattctgatcctttggacaaacctgagaaaaacaagcatgggggaaaggcatccctaatttataaaatggctgctggggaaaactggctagcccatatgtaggaagctgaaactggatcccttccttacaccttatacaacaattaattcaagatggattaaagacttaaatcttagatgccaaatcataaaaaccctagaagaaaacctagacaataccattcaggacacagacatcggcaaggacttcatgactaaaacaccaaaagcaatggcaacaaaagccaaaatagacaaatgggatctaattaaactaaagagcttctgcacagcaaaagaaactaccatcagagtgaacaggcagcctatagaacgggagaaaatttttgcaatctacccatctgacaaagggctaatatccaaaatctacaaagaacttaaacaaatttacaagaaaaaaaacaaacaaccccatcaaaaagtgggcgaaggatatgaacagatacttctcaaaagaagacatttatgtagccaacagacacatgagagcatggctcatcatcactggccatgcagggagatgcaaatcaataccactatgagatatcatctcacaccagttagaatggcaatcattaaaaagtcaggaaacaacaggtgctggagaggatgtggagaaataggaacacttttacactgttggtgggactgtaaactagttcaaccattgtggaagtcagtgtggcgattcctcagggatctagaactagaaataccatttgacccagccatcccattactgggtatatacccaaatgactataaatcatgctgctataaagacacatgcacacgtatgtttattgcggcattattcacaatagcaaagacttggaaccaacccaaatgtccaacaatgatagactggattaagaaaatgtggcacatatacaccatggaatactatgcagccataaaaattgatgagttcatgtcctttgtagggacatggatgaaattggaaatcatcattctcagtaaactatcgcaagaacaaaaaaccaaacaccgcatattctcactcataggtgggaattga

SEQ ID NO: 5109 - DNA, 4604 bp, Homo sapiens
  SIMILAR (32)..(1396): 1001254mologous to Homo sapiens Human vitamin D receptor (VDR) gene transcript 6 amino acid sequence,accession number Y09035,Smith-Waterman Score=2392.
ggaacagcttgtccacccgccggccggaccagaagcctttgggtctgaagtgtctgtgagacctcacagaagagcacccctgggctccacttacctgccccctgctccttcagggatggaggcaatggcggccagcacttccctgcctgaccctggagactttgaccggaacgtgccccggatctgtggggtgtgtggagaccgagccactggctttcacttcaatgctatgacctgtgaaggctgcaaaggcttcttcaggcgaagcatgaagcggaaggcactattcacctgccccttcaacggggactgccgcatcaccaaggacaaccgacgccactgccaggcctgccggctcaaacgctgtgtggacatcggcatgatgaaggagttcattctgacagatgaggaagtgcagaggaagcgggagatgatcctgaagcggaaggaggaggaggccttgaaggacagtctgcggcccaagctgtctgaggagcagcagcgcatcattgccatactgctggacgcccaccataagacctacgaccccacctactccgacttctgccagttccggcctccagttcgtgtgaatgatggtggagggagccatccttccaggcccaactccagacacactcccagcttctctggggactcctcctcctcctgctcagatcactgtatcacctcttcagacatgatggactcgtccagcttctccaatctggatctgagtgaagaagattcagatgacccttctgtgaccctagagctgtcccagctctccatgctgccccacctggctgacctggtcagttacagcatccaaaaggtcattggctttgctaagatgataccaggattcagagacctcacctctgaggaccagatcgtactgctgaagtcaagtgccattgaggtcatcatgttgcgctccaatgagtccttcaccatggacgacatgtcctggacctgtggcaaccaagactacaagtaccgcgtcagtgacgtgaccaaagccggacacagcctggagctgattgagcccctcatcaagttccaggtgggactgaagaagctgaacttgcatgaggaggagcatgtcctgctcatggccatctgcatcgtctccccagatcgtcctggggtgcaggacgccgcgctgattgaggccatccaggaccgcctgtccaacacactgcagacgtacatccgctgccgccacccgcccccgggcagccacctgctctatgccaagatgatccagaagctagccgacctgcgcagcctcaatgaggagcactccaagcagtaccgctgcctctccttccagcctgagtgcagcatgaagctaacgccccttgtgctcgaagtgtttggcaatgagatctcctgactaggacagcctgtgcggtgcctgggtggggctgctcctccagggccacgtgccaggcccggggctggcggctactcagcagccctcctcacccgtctggggttcagcccctcctctgccacctcccctatccacccagcccattctctctcctgtccaacctaacccctttcctgcgggcttttccccggtcccttgagacctcagccatgaggagttgctgtttgtttgacaaagaaacccaagtgggggcagagggcagaggctggaggcaggccttgcccagagatgcctccaccgctgcctaagtggctgctgactgatgttgagggaacagacaggagaaatgcatccattcctcagggacagagacacctgcacctccccccactgcaggccccgcttgtccagcgcctagtggggtctccctctcctgccttactcacgataaataatcggcccacagctcccaccccacccccttcagtgcccaccaacatcccattgccctggttatattctcacgggcagtagctgtggtgaggtgggttttcttcccatcactggagcaccaggcacgaacccacctgctgagagacccaaggaggaaaaacagacaaaaacagcctcacagaagaatatgacagctgtccctgtcaccaagctcacagttcctcgccctgggtctaaggggttggttgaggtggaagccctccttccacggatccatgtagcaggactgaattgtccccagtttgcagaaaagcacctgccgacctcgtcctccccctgccagtgccttacctcctgcccaggagagccagccctccctgtcctcctcggatcaccgagagtagccgagagcctgctcccccaccccctccccaggggagagggtctggagaagcagtgagccgcatcttctccatctggcagggtgggatggaggagaagaattttcagaccccagcggctgagtcatgatctccctgccgcctcaatgtggttgcaaggccgctgttcaccacagggctaagagctaggctgccgcaccccagagtgtgggaagggagagcggggcagtctcgggtggctagtcagagagagtgtttgggggttccgtgatgtagggtaaggtgccttcttattctcactccaccacccaaaagtcaaaaggtgcctgtgaggcaggggcggagtgatacaacttcaagtgcatgctctctgcaggtcgagcccagcccagctggtgggaagcgtctgtccgtttactccaaggtgggtctttgtgagagtgagctgtaggtgtgcgggaccggtacagaaaggcgttcttcgaggtggatcacagaggcttcttcagatcaatgcttgagtttggaatcggccgcattccctgagtcaccaggaatgttaaagtcagtgggaacgtgactgccccaactcctggaagctgtgtccttgcacctgcatccgtagttccctgaaaacccagagaggaatcagacttcacactgcaagagccttggtgtccacctggccccatgtctctcagaattcttcaggtggaaaaacatctgaaagccacgttccttactgcagaatagcatatatatcgcttaatcttaaatttattagatatgagttgttttcagactcagactccatttgtattatagtctaatatacagggtagcaggtaccactgatttggagatatttatggggggagaacttacattgtgaaacttctgtacattaattattattgctgttgttattttacaagggtctagggagagacccttgtttgattttagctgcagaactgtattggtccagcttgctcttcagtgggagaaaaacacttgtaagttgctaaacgagtcaatcccctcattcaggaaaactgacagaggagggcgtgactcacccaagccatatataactagctagaagtgggccaggacaggccgggcgcggtggctcacgcctgtaatcccagcagtttgggaggtcgaggtaggtggatcacctgaggtcgggagttcgagaccaacctgaccaacatggagaaaccctgtctctattaaaaatacaaaaaaaaaaaaaaaaaaaaatagccgggcatggtggcgcaagcctgtaatcccagctactcaggaggctgaggcagaagaattgaacccaggaggtggaggttgcagtgagctgagatcgtgccgttactctccaacctggacaacaagagcgaaactccgtcttagaagtggaccaggacaggaccagattttggagtcatggtccggtgtccttttcactacaccatgtttgagctcagacccccactctcattccccaggtggctgacccagtccctgggggaagccctggatttcagaaagagccaagtctggatctgggaccctttccttccttccctggcttgtaactccaccaagcccatcagaaggagaaggaaggagactcacctctgcctcaatgtgaatcagaccctaccccaccacgatgtgccctggctgctgggctctccacctcaggccttggataatgctgttgcctcatctataacatgcatttgtctttgtaatgtcaccaccttcccagctctccctctggccctgcttcttcggggaactcctgaaatatcagttactcagccctgggccccaccacctaggccactcctccaaaggaagtctaggagctgggaggaaaagaaaagaggggaaaatgagtttttatggggctgaacggggagaaaaggtcatcatcgattctactttagaatgagagtgtgaaatagacatttgtaaatgtaaaacttttaaggtatatcattataactgaaggagaaggtgccccaaaatgcaagattttccacaagattcccagagacaggaaaatcctctggctggctaactggaagcatgtaggagaatccaagcgaggtcaacagagaaggcaggaatgtgtggcagatttagtgaaagctagagatatggcagcgaaaggatgtaaacagtgcctgctgaatgatttccaaagagaaaaaaagtttgccagaagtttgtcaagtcaaccaatgtagaaagctttgcttatggtaataaaaatggctcatacttatatagcacttactttgtttgcaagtactgctgtaaataaatgctttatgcaaacc

SEQ ID NO: 5110 - DNA, 604 bp, Homo sapiens
tgtaaccttttctcgctctctgtgtgactgagatatggaaaggcttctgtggggcatttttgcccttgcattgttgccttttgggtcaacaaccttgacacttaaacaaacagcagactgggaatcctctttgtaccagtgtgttgctgggtgctgctgataaaagggactagagagtaaaggccttctggtcagcaggtcacttagtcaacagctcttgtgtgtatgtgggggtgtgggttctgccttgctgtcagcactagggtgtgttccctcttaagcctggaattaggagttccagattcctagtacttaactaaaatttggccaggcgcggtggctcacacctgtaatcccagcactttgggaggccgaggcgggtggatcacctgaggtcaggagttcgagaccagcctggccaacatggtgaaaccccatctctactaaaaatacaaaaattagccaggtacggtggcgggtgcctgtaatcccagctactcgggaggctgaggcaggagaatcacttgaaccttgggggcggaggttgaagtgagccaagatggtgccactgcactccagcctgggcgacagagcaagctcgtgc

SEQ ID NO: 5111 - DNA, 1134 bp, Homo sapiens
  SIMILAR (95)..(3): 831254mologous to Homo sapiens Human secreted protein, SEQ ID NO: 6574,accession number G02493,Smith-Waterman Score=142.
atggggtttcgccatgttggtcaggctggtctcgaactcctgacctcaggtgatccacccacctcgggctcccaaactgctggaattacaggaaccaccaaggtggatccacgacttaaaccaggacactccctctgctctgtgtcagcatgtcctttagtgctgcagatgggaggtcccccaggtgccataggaaacaccagaaactgcacagcagtccagctggtggtggatcccagccatccccagggaaattcaaccccaagaggagaagactcaccctggatgagaaccactatgagcaggaccaagaaggaagagggcaagaacactaggagaggaagaaggaaatcaccagagtgcctagagggcacccaggtagctttgggaagtgcagcttccaagagacagaggagtaccttggtaggaaggggcaggatgcctccgaatcagtggctggggaaggaccagggaagctctgggcttgttgaaacccacccaagaaatacaaatgttacagatatagctgaagcctattataaactccccccgaacccaagatgccactgtcctgaaattgatggctactttggtgaagcacgcttttatgctattactgcttggggtcccggcgcccctccgagcggcggtagggcggcagggccgggaaggagggaaaggagactggaggccgtgacaccagtcttggttcctccgccccctgcttccccgccaccgccgctctccaaattggcgcggaaccggcttctccacagcatttcgcctccacaaccccctctccccgctggtccaggagggaggcgggacgtggtgggcgctgcccaagccccactcccggtgtacgggggagagggtggaggacccagaaaaacccgtttgaggaagatgtgcctccctgcgcgttcaaggtgtcaggagtgcttggtaaatttttggacactcgcgttccagctgtacattcagttgaggaaatgcaggcttgtatccaaaatgaattaccatgagctagctaacatagcacagaagatggcagggtcacagggcccaggccccttcggagggactgagctttcacctgcgaatcagcgtcttactggcacttggagaatgtga

SEQ ID NO: 5112 - DNA, 430 bp, Homo sapiens
  SIMILAR (108)..(284): 621254mologous to Homo sapiens PRO2550,accession number AF130089,Smith-Waterman Score=181.
  misc_feature (1)...(430): n = a,t,c or g
ggtctcgctcttgttgcccaggctggagtgcagtggcatgatctcagctcactggcaaccttgcgncctcccaggctcaagcgattctcctgccccaagcctccctgagtagctgggaccacaggtgcacaccaccacacccagcccaatttttgtatttttagtagagatggggtttcaccatgttggtccaggctggtcttgaactcctgacctcaggtgatccacccaccttggcctcccaaagtgctggaattacaggcgtgacacccggcgcccggccaacatctatctttttaaaccaacagaattgccttgcttaatttaaggaaacagaagttctggaattgagaataatctgacttaatttataatttgtgaaattcaattgaaaaattccaagaataaaaagtacatcttcttttttcta

SEQ ID NO: 5113 - DNA, 3287 bp, Homo sapiens
  SIMILAR (3211)..(2477): 1001254mologous to Homo sapiens thiopurine methyltransferase, TPMT {EC 2.1.1.67},accession number S62904,Smith-Waterman Score= 1324.
  misc_feature (1)...(3287): n = a,t,c or g
gggcaaactgggcagtacctaccngtaanagtcatgtcttcatgnttgcagcattggcacttccatggatgtgtcaagaccggaaaagccacacttgacctgtcagctggtccttgaacagctgtaggtttttttttttttggagacagagtctccctctgtggtccaggctggagtgcagtagcgcaacctcgactcactgcaacctctgcctccaggttcaagtgattctcctcctcagactcctgagtagctgggattacaggcacatgccaccatgcccggctgatttttatatttttagtagagatggggtttcaccatgttggccaggctggtcttgaactcctgacctcaagtgatccacccacctcggcctcccaaagtgctgggattacaggcgtgagccaccacacccggcctgtaggttttaactaataattagggtattactctatcattctctatcattcaaattctccaggtactgacctggtttttattttatttatttatttatttacttatttatttttgagacagagtcttaggctctgtctcccaggctagagtacagtagtggcacaatcttggctcactgcagtctccacctcctggggttctattgattcctgtgcctcagcctccccaagtagctgggattacaggcacgtgccaccacgcctggctaatttttttgtatttttagtagagacggggttgcttttctattcccaagtccaaaagcctatgaagagggccagcgcaatggctcatacctgtaatcctagcactttgggtggccaagacaggaggactgcttgaggcctcacgtcaagttcaacatcagcgtggccaacaaagtgagaccctgtctctacataaaagtaaaatcaaaagtctctggagagaattgtgttggtccagctcgggttagttgtccattcaaccggtgatacaggcagagttggggagtcatggcttctgaagcccacagtatcgactgggagcaggtctcagagaagcaagaatcactgtgagcaaggagttgcttcaaattaatagccttacaaatctattagaatacatcgatggcagagagcttctagggtagaagtttgtacatgcaggccaaggggaactagagaggctgacaagacatatctctggggagagtaccgtagctttcaccagtgttaaaggggaccccaaaccttgcattaacaacctttaagccagcacatgtgcgtgcatgcgtgcacacacacacgtaactcgttttttataatacacaaccatcctattaacatgagctaaacaatctaaaccatttagttgttgggtagtacagagttatagaggactgtctgatataacaaaatgtggttaaagaagaactgagaaatctaacctttcataataaacagccatgaatccagctctaagtacattatattttataagacctgatgatttaaacagattaaattataaaaaacaacaattgccaaactcagagaaaacttaaagaaaaatttattcttagaatttgggaatgtttgttccatatagattgtttaattaaaatgtatttgtttcttgattctgttacagattgtttaattaaaatttgtttcttgattctgttatatacatggagaaaccatgtgaaaagggatgctaggatctgagtaaaagacaagggtttatagtaaaaactaatcttttatataacttttgggaccaccttgaaccctactgaaatgttatagttcttcaacaattctaaatttcataaagaatgtcaggccaggtgcagtggctcacgcctgtaatcccagcactttgggaggccgaggtgggtagatcacctgaggtcaggagctcgagatcagcctgaccaacatggtgaaaccctgtctctactaaaaatacaaaaaattagctgggcgtggtggcgcacacctgtaatcccagctactcaggaggctgaggcaggagaatcacctgaacctgggaggcagaggttgcagtgagctgagattgcaccattgcactccaggttgggcaacaagaacgaaactccatctcaaaaaaataaaacaaaataaatgccagtttttctgtgtgtattatatttaatatgcattgcattttgaaatatttttttaattgtacaggtaacacatgctgattggtaaaatatcttgcaatctgcaagacacataggcataatctttcacatcataatctcctctccaaaggagctactttaaaagtttagttacatctttttcttctaaaacttttttagaaaaagtaaatggctttactaaaaagccatttttagtaaagatctatcatatgatttataaacaattttaaaaattcatccattacattttcaggctttagcataattttcaattcctcaaaaacatgtcagtgtgattttattttatctatgtctcatttacttttctgtaagtagatataacttttcaaaaagacagtcaattccccaacttttatgtcgttcttcaaaagcatcaaccttctcaagacaacgtatattgcatattttaccaaacaacctttcaatttcagcatgtggaacataaaatggtggacctggatgtttagttggatcataagaaagaacacacaggagatactgaaacttctttcccaggagggaaaacattgtatctgcatagcatttgcgatcacctggattaatggcaactaatgctcctctatcccaaatcatgtcaaatttgccaatatttgtcctgggaagatcaaaaatactgcaacagtacaatgaaatgttccccgaagaactcttaaatactttggttccaggaatttcggtgattggttcttctgagtaagaaagattctgctctgtaaaaaattcttgtatcccaagttcactgatttccacaccaactacactgtgtccccggtctgcaaaccatttcatctcaaccgcttttccgcaaagaggaaaaaataccctcagtccactcttgcctttaaggaaagtatctaaatgcttctttaatagctgatgtccttgttcctgatgaaaagcagtcttgccgttcacccacttgtcttgccattcttccagagttagtacttggtttttctgtacctcagtatccgagtactcttcaatgtcaagtgaagttcttgtaccatccatagtttcagagacacctttgtctcacaagcatatgtcttccgtgcctcgcttacagctggttgccggccattgcctc

SEQ ID NO: 5114 - DNA, 617 bp, Homo sapiens
  SIMILAR (226)..(471): 671254mologous to Homo sapiens PRO2550,accession number AF130089,Smith-Waterman Score=256.
attttcaaaaacataatgattaatgttccaattatgcatcacttccccccagtataaatcaggaaatgtttgtgagaaacccattgggaactatactctttttatttttattttttaattttttttattatttttttttttggggacggaagtgtcccctccttgttgcccccaggctggaagtgcaaatggccgtgatcttggctcactgcaagccttcgcctcccgggttcaaagtgattctccctgcctcagccctccccgagtagctgggattacaggcatgctcccacccatgcccagcctaattttgtatttttagtagaaacggggtttcaccatattggtcaggctggtctcgaactccagacctcaggtgatccgcccacctcggcctcccaaactgctgggattacaggcgtgagccaccgcgcctggccagggactatactctttttaaaatagacatttgtggggctcacacaatatatgaaatagtaccctctaaaaaagagaaaaaaaaaatcaggcggtcaaacttagagcaacattgtcttattaaagcatagttatttcactagaaaaatttaatatcaaggactattacatacttcatt

SEQ ID NO: 5115 - DNA, 4651 bp, Homo sapiens
tttttttttttttctgaaaagatacaaagttttattaaataaacctggaatcaacagtattattacataaattagacagcagtaaaattttcctagggcatatgtacaaatcacagtgatttccattgtgcaacaaacagacaggattaaaaataggcactcccctccccgaccccccatgagaaggggtcaccccgcggggttcccagttctggctcgccaaggggtgcacaaacctgccaaggcactctgcctgtgtgcgcggcatccagcggcagtgacaggggccccagaagcacgttggcaacatggtgaggctgcccagtgttcagcgcaaagaaagaattcagctacgacagttgagcagagctcaacagccatctcagagcacaaggactgtggaaaggcttcaagtctcatctgctaaaacacaattgtaatgccttttacatacagaacagacgtgtccaccatggaagatcaaactaagcctcaacagaacttcccaacacacgataatttacagaaaaaccatgacagagcatccctgctattaggaagggactgttctgcggggtgcaaggccataaggtttgcaaagcaaacttgattatgaaaaggcttggtgaaaatacagcccctcaccttcaccaagacacacacacacacacacacacacacacacacacacacaccccgcaaagaaactatccaaatgcattaagacacctgttcgtgtgcttttcttcttgcttttcttaagtgaatcccatccgtttaacttagactaattagaaggcctgcttgcctccatcagcaacagaaaaacagtgcatacgactcctccaatgtgtgtaaaatgcatgctaggtagcttgaaggaaaaacgagagcaacccgggcaccccatttcaaatctctacaactggagaaatcaaaggctgcaaggactgtgtagacctgatgcaaagttaactggctgcaaaaatacaacccaagccagtgctgtcttgcaccctgttcactcagtagctggagcaatgaatgattgtgacattctggtggggtatttgtgcagcctgaggtgcacctggctacagagtggagccttggggtctttaacagtattaagccatagttcacagttacaatggtccaaagaattacaggccatgtaggtcaaacacagaaatggcgaacacatcccaaaccactcaactgtttagttccactggtgattttttttaatggacagtgatttcaaatgatttggtgtttttgttcttgtttttgctttttcttcaaagcaaacaaatgatttggtctttaagtatggacagaaagaaacaaaacgctgaatgggaaattcagtaacaagtgattgtgcagttgtttgatgggcatggagagggagtggggctgagctgcattttgaggggatgaagcgcgcaatcttaccccactgctggggggtttctgcttcttattctatcatgctgacagcaaatataatttgcccatcgctggctatagatatgtttaggctaagcaggatttagacttctgttgcgaaggaattagaagaattcagtagagacagtgtatactatttggttgtgactttatttccttcctggctttatcaatgcctatgaaagcaggccggtggcatttcccttcagaaaaacaagacttgccccaatacacttcttcttgtaacatatccatgtcctattctcttagagtattccaatttaagaaaatattgccaactcgtaaaattacatgaagcaaagtaaatttgtaatgtttttctgatacaaatgttgtgattatggtaatgaattttcctccacattttgcgcagtgattgtttgtcatgatcatccatacggacattccgcaccgtgattgtttcgtgatcatccatgcggacatttcgcaccgtgattgtttcgtgatcgtccatgcggacattttggaatgcccacccgggtcagctatttgtattttttttatttttatgttttgagacggagtcttgctctgtggcccaggctggagtgcagtggcacgatctcggctcactgcagcctctgcctcccgggttcaagcgattctcctgcctcagcctcccgagtagccaggattacaggtgcccgccaccacacctaatttttgtattttagtagagacgggggttttgccatgttggccaggctggtctcgaactcctgacctcaggtgatccacctgcctcggcctcccaaagtgctgggattacaggcgtgagccaccatgcctggccaggtaaactattttaaaattatacagtgattgctccatgtttatagctcattttgattaaattaacctctacatgacattgggccatttaaactatgaccccgccatgggcagttaccaggtagcttgtgtcacttcaaatgctgaaatgtgtgtgatggtccaaagtgggtttcacaccatcacacgttctaggaatcgcttctaatttctcatttgttctgtatggctggaggctgatcacgacgtctgtaaagaacaaggtcaccaatgtgcttgcatatttcattttcctgcatatcagttcacaattaaggcatttcaggctttcctgatgctaattctcatctgagtatgaaatcctggataataaaacagacaacctaaaaataggcatatggactcatggatttatgtactttttaaagtgtgctcaagtgtttcatttatggttttattaataatttttaaagtagaatgttcaatattattactatgatttatttttatagtcagcaaacatgagacttaaaagcttttccttctagctccacatgtcggtgcacagtgtaaccttttcttaaaaaaatatggaatgctgcatgaatctgcagatcttcctcgcgcagggggccatgctaatctcctctgtgtcattccaattttagtatacctgctgccgaagtcagcaccagtttcaccttttcacattcacggtaaaactgatgggaaaccgcacgctaaatgtttaggcagcgatggccctcaactgttaatcccaacaggatggtgagtgagaagcacaggctgaaaatagagttgtctaaaacatttccacatttcaccatctgaacatcattttccactgagttattaattgtaaagagtttattctgctgaacctactaattattctcacctactgagttgacctccacgtgaagaaaaggtcactgatgaaaaagggtggctatgttctgtttctgtaatttcactgttttaacatctttttttttatatagagatggggtctcgctatgctgcccaggtcagtctcgaactcctaggctcaatcttcctgcctcagcttcccaaagtcccagggttacaggagtgcaccaccgcacccagcttcactgtcttttaaagccttaaggtggacgttctcttcaatccatcttcaaaagcacaaagccattgccttcttttttttttttttttttttggacagggtctcactcttgttgcccaggctgcagtgcagtggtgcgatctttgtggctcactgcaaacctgcaacctccgcctcctgagttcaccccaggtctcctgcctcagccttcccgagtagctgggattataggcatgtgcaccaccacgccctggctaatttctttgtgtattttttttagtagagacaggggtttcaccatgttgggtcaggctggtcttgaactcctgacctcaggtgatccaccctcctcggcctcccaaagtgctgggattacaggcgtgagcaacccggcgcctggcccagtgtaatatttttgaaagaggagggacaattgtgaaatcagtaggttatctttaatctttacactacatgcagatccatagtatcctttgtagtgttgtaaatacttttgctttgaaaactttttcattgtcctaaatcaccctgactctgaccagtctttcagttctccaaaagcccaatttaattgtatagttttgtcatggcttcatataataaagagcctattttaagttgaaagtagtagtcagaaaattgttaatttcctaaagctcaggaaactagggtgtcactttttttgcactgcagcatatacactaactagcttattaaaatttacaaaatgtctttttgaatgtatcaaggatatatttagtttgagtggaatttgtcagcagatatcagtaacttattgccgcttatattgtacaatgttaaacttcaattcctgtaacctggttagtattaatgtcagtgactaaaaaacttagagttagttttagggcactttttattttgagagcatgaagtgtggaatgtgtcactacgattgttgataaagctgaggccacttgcaacttgattttttaaatgaaatagataaagtctttttgaataatatagtatgcactgctatttgcttgattatgtaatgtcaaaagtttaactatattccaagtacaaaaacatactggattacattgaggatgttgaatagcattcatgatggctttgttttggtttggggcagctgtcaccagctaaagcaatgttgttaaaattagctcaataaaaatgtctttaaaatgt

SEQ ID NO: 5116 - DNA, 252 bp, Homo sapiens
  SIMILAR (251)..(177): 881254mologous to Homo sapiens Human secreted protein, SEQ ID NO: 7176,accession number G03095,Smith-Waterman Score=114.
ctagctagcatcatcattattgtcagcatcaccatcatcatcatcatcatcaccatcaccatcatcatctcccagccccttgtaggaatctacgtgtttgacccgtttgttttcgctataaactttgttttcactatggaaaacaacatctgctgtttcttgactttttattaagtcattctgaatggtgtgagatggtatctcattgtggttttgatttgcatttctctgatgattagtgatgttgagcat

SEQ ID NO: 5117 - DNA, 387 bp, Homo sapiens
  SIMILAR (359)..(36): 281254mologous to Homo sapiens Human secreted protein HUSXE77, SEQ ID NO:180,accession number Y86265,Smith-Waterman Score =89.
tcacagatacaaagccattgtcgtgcagctcatgccctcctcgggggaagaagccagtaagtcacagagatcagtaacgcaggtggggacgaaggtgtagaggagagccaggcacggaggcctgttggagtgcgggtgctttgcaattttagaagccgaggtccaggggaggccggacttcaaagatgacgtctgggccaagtgcagagaaaggtggcggatgagctggaaggaagcctgggagaaggcactttgggcgtagggttttgagacacagctgtgttttgcccgtggcacgggagctctggggccggcatggcccgtgtggctggaggcagaagaatgtcccctggaagtggtctgagctgcttcctgtggtggccccat

SEQ ID NO: 5118 - DNA, 349 bp, Homo sapiens
  SIMILAR (7)..(261): 301254mologous to Homo sapiens salivary proline-rich protein precursor,accession number K03206,Smith-Waterman Score=89.
atgccccctcccccgccgccctccgagagcccagggcccggccctgttggctcccggctccccccggggccagcagtgactggaaacgagaaggaactgaggggaaatccctgagtcggcctggccccgccgcgtccgcggttccgcgcgtcacgccgggaaggagttaccgggaaagtacaccggcccaaccggctgcagctccgtgctccaccaaaaggctgatctgaccaaagaggccaaaacgtgcctcctagcgaggcgaagtcgctatgctgatgggataccagaaggacctcctcgatccaggaaggtgtttccgctctaccgggagatggccctcgtctag

SEQ ID NO: 5119 - DNA, 3285 bp, Homo sapiens
  SIMILAR (1)..(3285): 1001254mologous to Homo sapiens KIAA0456 protein,accession number AB007925,Smith-Waterman Score=5636.
cggacgcgtgggttggattttttccgtggatctatcaattcacaattcgaatttggaagaaagaaggaaaacatgacgtctccagccaaattcaaaaaggataaggagatcatagcagagtacgatactcaggtcaaagagatccgtgctcagctcacagagcagatgaaatgcctggaccagcagtgtgagcttcgggtgcaactgttgcaggacctccaggacttcttccgaaagaaggcagagattgagatggactactcccgcaacctggagaagctggcagaacgcttcctggccaagacacgcagcaccaaggaccagcaattcaagaaggatcagaatgttctctctccagtcaactgctggaatctcctcttaaaccaggtgaagcgggaaagcagggaccataccaccctgagtgacatctacctgaataatatcattcctcgatttgtacaagtcagcgaggactcaggaagactctttaaaaagagtaaagaagtcggccagcagctccaagatgatttgatgaaggtcctgaacgagctctactcggtgatgaagacatatcacatgtacaatgccgacagcatcagtgctcagagcaaactaaaggaggcggagaagcaggaggagaagcaaattggtaaatcggtaaagcaggaggaccggcagaccccacgctcccctgactccacggccaacgttcgcattgaggagaaacatgtccggaggagctcagtgaagaagattgagaagatgaaggagaagcgtcaagccaagtacacggagaataagctgaaggccatcaaagcccggaatgagtacttgctggctttggaggcaaccaatgcatctgtcttcaagtactacatccatgacctatctgaccttattgatcagtgttgtgacttaggctaccatgcaagtctgaaccgggctctacgcaccttcctctctgctgagttaaacctggaacagtcgaagcatgagggtctggatgccatcgagaatgcagtagaaaacctggatgccaccagtgacaagcagcgcctcatggagatgtacaacaacgtcttctgcccccctatgaagtttgagtttcagccccacatgggggatatggcttcccagctctgtgcccagcagcctgtccagagtgagctggtacagagatgccaacaactgcagtctcgcttatccactctaaagattgaaaacgaagaggtaaagaagacaatggaggccaccctgcaaaccatccaggacattgtgactgtcgaggactttgatgtgtctgactgcttccagtacagcaactccatggagtccgtcaagtccacggtctctgaaaccttcatgagcaagcccagcattgctaagaggagagccaaccagcaagagacagagcagttttatttcacaaaaatgaaagagtacctggagggcaggaacctcatcaccaagttacaagccaagcatgaccttctgcagaaaaccctgggagaaagtcagcggacagattgcagtctagccaggcgcagctcaactgtgaggaaacaggactccagccaggcaattcctctggtggtggaaagctgtatccggtttatcagcagacacggactacagcatgaaggaattttccgggtgtcaggatcccaggtggaagtgaatgacatcaaaaatgcctttgagagaggagaggaccccctggctggggaccagaacgaccatgacatggattccatagctggtgtcctgaagctttacttccgggggctggaacaccctctcttccccaaggacatctttcatgacctgatggcctgcgtcacaatggacaacctgcaggagagagctctgcacatccggaaagtcctcctagtcctgcccaaaaccactctgattatcatgagatacctctttgccttcctcaatcatttatcacagttcagtgaagagaacatgatggacccctacaacctcgccatctgcttcgggccctcgctaatgtcagtgccagagggccacgaccaggtgtcctgccaagcccacgtgaatgagctgatcaaaaccatcatcatccagcatgagaacatcttcccaagccccagggagctggagggccctgtctacagcagaggaggaagcatggaggattactgtgatagccctcatggagagactaccccggttgaagactcaacccaggatgtgaccgcagagcaccacacgagcgatgacgaatgtgagcccatcgaggccattgccaagtttgactacgtgggccggacagcccgagagctgtcctttaagaagggagcatccctgctgctttaccagcgggcttccgacgactggtgggaaggccggcacaatggcatcgacggactcatcccccatcagtacatcgtggtccaagacaccgaggacggtgtcgtggagaggtccagccccaagtctgagattgaggtcatttctgagccacctgaagaaaaggtgacagccagagcgggggccagctgtcccagtgggggtcatgtagccgatatttatcttgcaaacatcaacaagcaaaggaagcgtccagaatctgggagcatccggaaaacttttcggagtgacagccatgggctgagcagttccctgactgactcctcctccccaggggtgggggctagctgccgcccatcctcccagcccatcatgagccagagcctccccaaagaagggccagataagtgttccatcagtgggcacgggagcctcaactccatcagccgccactcatccctgaagaatcggctggatagtccacagatccggaagactgccacagcgggaaggtcaaaaagcttcaataaccatcggcccatggaccctgaggtcattgctcaggatattgaggcaacaatgaactcggccctgaatgagctacgggaactagaacggcagagcagtgtcaaacacacccctgacgtggttctggacaccttggagcccctcaaaacctccccagtggtggcccccacgtcagagccctccagccctctgcacacccagctcctcaaggaccccgagcccgccttccagcgcagcgccagtactgctggggacatcgcctgcgccttccggcctgtcaagtctgtcaagatggctgccccggtcaaaccaccagccacacggcccaagcccactgtcttccccaaaacaaatgccactagccctggtgtcaactcatcaacttccccacagtctactgacaagtcttgtactgtc

SEQ ID NO: 5120 - DNA, 456 bp, Homo sapiens
  SIMILAR (255)..(416): 411254mologous to Homo sapiens HCF-binding transcription factor Zhangfei,accession number AF039942,Smith-Waterman Score=93.
tcattcctctttccttgcagagtaaagaagtcggccagcagctccaagatgatttgatgaaggtcctgaacgagctctactcggtaaatcagatgggttgcttggctctttaacaagcagagggaagcagcatttggcagcttgcagccatagtacatcagcaacagaactgaactccctcatggggtcagtagggccactgtatggctttaagccagggaaggacaggagaggtttctgtaactgtggctgtaatgatggaagcgtctggaggcggagaggaggctccagccggtgcagccagccggcgccggcgtgcgtgtccttgaggcggaagaggcggcggttccggagtgcggcccacgtaccacagcatgcccgcggtcgaacggcccaggccagcagcagcagcagccccgccacgaacacgatcagcccatactggctgctcagcat

SEQ ID NO: 5121 - DNA, 844 bp, Homo sapiens
  SIMILAR (523)..(831): 331254mologous to Drosophila melanogaster spliceosomal protein,accession number X97197,Smith-Waterman Score=107.
atgaggaactgggcggtgccgggcagccacctgctccggcccaccccagctgccacaccctcgaatcctgatctgcagcaggagaaagcacaagcctctgctgaggtgagtacaagggaggtagaagtgagagaggatggagaacctaccctggaagacttcctggaggaggacatagtccacgctggagcgctgagcatcagactcaagaaaagcttgcgtggatttgcagacccaccaacaagggctccaggttctggagttgtggaggcaaactgcctaaaagacactcgcaattgcacggaggcccgcctgggtaacccatgctactctcgagcctcagctcaaattccataatgtcatcgaaactgcaaagtccttttgccgcgtaagccggcccctcacgcgactctcatctcagtctccaggacctgatgaagaaaggcatccttcaagcagctgcacctcagtgacgggtgagactctatctcaaaaaccaaaaaaggaatctgcgcctgagttcaagcccctggaaaatgccatgctcaaatgccagctcctgcagctcctgtacctctcggtcgtagcaggaaccccgggaggctggcatcagctgttcctgtgtcttcattacttagattccttcctttccttcaacccatacccccttcagatattctacctctcagctttgaagctgtcccttcctctccagctgcagagtctggccttcatccctgcacaagacgaagaaaaagagccaggccatcctgttaagttcctggcctcctgctctctcctcagccccaccctcctccgcacgtctggagaaaaggcattttag

SEQ ID NO: 5122 - DNA, 794 bp, Homo sapiens
  SIMILAR (138)..(509): 341254mologous to Mus musculus 28kD interferon alpha responsive protein,accession number AJ251364,Smith-Waterman Score= 229.
tttcgtggatttttagaccgtggagactgcgctgccctgccctgcacctaccctcactctccgtgttctcactaaggtggaaattgccttccctcactactgacgagaccatgtgtaaaagcgtgaccacagatgagtggaagaaagtcttctatgagaagatggaggaggcaaagccggctgacagctgggacctcatcatagaccccaacctcaagcacaatgtgctgagccctggttggaagcagtacctggaattgcatgcttcaggcaggttccactgctcctggtgctggcacacctggcagtcgccctacgtggtcatcctcttccacatgttcctggaccgcgcccagcgggcgggctcggtgcgcatgcgcgtcttcaagcagctgtgctatgagtgcggcacggcgcggctggacgagtccagcatgctggaggagaacatcgagggcctggtggacaacctcatcaccagcctgcgcgagcagtgctacggcgagcgtggcggccagtaccgcatccacgtggccagccgccaggacaaccggcggcaccgcggagagttctgcgaggcctgccaggagggcatcgtgcactggaagcccagcgagaagctgctggaggaggaggcgaccacctacaccttctcccgggcgcccagccccaccaagtcgcaggaccagacgggctcaggctggaacttctgctctatcccctggtgcttgttttgggccacggtcctgctgctgatcatctacctgcagttctctttccgtagctccgtataa

SEQ ID NO: 5123 - DNA, 432 bp, Homo sapiens
  SIMILAR (3)..(179): 941254mologous to Homo sapiens melastatin 2,accession number AF325212,Smith-Waterman Score=284.
caagaatcggtcaaggtgttcctgtggtgcactcataagtggaaggaggacccaatgtgatctcgattgttttggagtaccttcgagacacccctcccgtgccagtggttgtctgtgatgggagtggacgggcatcggacatcctggcctttgggcataaatactcagaagaaggcgggtaggtaactttccaggccccatggaagaaccctaaagcctgtttggaaacgagggtatgagtggattatgttttcagtagctcaaccaagacctcaaatcaaaacaagctatggaacaaattgtctaaaaaatgtctgtcatgggagggctgtggtgaagaacagagaaacatattctaaatgtcctgtgaagtgggaaattctatgaaagctacacggataataaaaagggtgaggaaaagagaggaaaaaa

SEQ ID NO: 5124 - DNA, 1329 bp, Homo sapiens
  SIMILAR (490)..(1326): 961254mologous to Homo sapiens p40,accession number U93573,Smith-Waterman Score=1383.
atggatcaggaacaaagtaagcccactccactaggaactgtgttgaaaaatttcaagaaaggatttaagggagattacagtgttactatgacaccaggaaaacttagaacattgtgtgaaatagactggccagcattagagatgggttggccatcagaaggaagcctggacaggtctcttgtttcaaagcacaatgctaggcaaggtctaactgttccacctggcatacaggcttatggagcagccccctttgaagaactccaagtagacttcactgagatgcacaaatgtggagatctcatccctaggtttagactgcccttacaaatcagcttggacaatgagccagcatttgtggctgacttggtacagaaaacagcaaagggtattccaacagacctgcagctgagggtcctgtctgttagaaggaaaactaacaaccagaaaggacatctacaccgaaaacccatctgtacatcaccatcatcaaagaccaaaagcaaagaagttgaaaactttgaaaaaaatttagaagaatgtataactagaataaccaatacagagaagtgcttaaaggagctgatggagctgaaaacccaggctcgagaactacgtgaagaatgcagaagcctcaggagccgatgcgatcaactggaagaaagggtatcagtgatggaagatcaaatgaatgaaatgaagcgagaagggaagtttagagaaaaaagaataaaaagaaatgcgcaaagcctccaagaaatatgggactatgtgaaaagaccaaatctacgtctgattggtgtacctgaaagtgatgtggagaatggaaccaagttggaaaacactctgcaggatattatccaggagaacttccccaatctagcaaggcaggccaacgttcagattcaggaaatacagagaacgccacaaagatactcctcgagaagagcaactccaagacacataattgtcagattcaccaaagttgaaatgaaggaaaaaatgttaagggcagccagagagaaaggtcgggttaccctcaaaggaaagcccatcagactaacagcggatctctcggcagaaaccctacaagccagaagagagtgggggccaatattcaacattcttaaagaaaagaattttcaacccagaatttcatatccagccaaactaagcttcataagtgaaggagaaataaaatactttatagacaagcaaatgctgagagattttgtcaccaccaggcctgccctaaaagagctcctgaaggaagcgctaaacttggaaaggaacaaccggtaccagctgctgcaaaatcatgccaaaatgtaa

SEQ ID NO: 5125 - DNA, 618 bp, Homo sapiens
  SIMILAR (300)..(133): 501254mologous to Homo sapiens Human secreted protein, SEQ ID NO: 7115,accession number G03034,Smith-Waterman Score=126.
ttacagtgttactatgacaccaggaaaacttagaactttgtgtgaaatagactggccagcattagaggtgggttggtcatcagaaggaagcctggacaggtcccttgtttgaaaggtattgtgtccagaattggttccttccggtgggttcttggtctcgctgacttcaagaatgaagccgcagaccctcacgggcagtgttaaagttcttaaagatggtatgtctggagtttgttccttcaggtgttcagatgtgtctagagtttcttccttctggtgggttcgtggtctcgctggctggtcaactacattactcagaaagctctgcgttgaatgaatgccgtcagagccaatgagggctcggaaagaagcatttccgtgtgtgcgcctaatgtagggccgagacttccggggtcctcttgtagcggccacgttgatctgcgatacgcgtgtttgcccagtgagtggccccggactgctacgtgggaccggcgtagggacactgaggcgctggcaggaggggtccctgtgtaaacgtccagtggattcaccttgccagctgcctgagctaggtccctcagtgtggctgctgccatcaactgtgggtggagtaggcat

SEQ ID NO: 5126 - DNA, 751 bp, Homo sapiens
  SIMILAR (472)..(317): 441254mologous to Murine leukemia virus gag p15 protein,accession number X14576,Smith-Waterman Score=123.
agataaccattccttttttttttttttaaagcaaactttctttatgcctttggactagactgtctaaggccacaagattagaagttaccataatacatgttatactgttaatttttagcaaacttcacttttgttgaaaaccttgtaagtttgggatttcaattatcctttgctattaataagaccttgtttagtctaaattaacttagaattggtatagatggcctttttttctctctgctggtctttccttgcctctgccagctgcttatgctgctgttctctcaaccaccgtgggggtacggaggtggtctaaaaccagctgtaaccaagtgtctatgtatggaaactggtctgggtgccttggcttacgggttaccttgtgtcatacctttgaaacaagggacctgtccaggcttccttctgatggccaacccacctctaatgctgggcagtctatttcacacaaagttctaagttttcccgggtgtcacagtaacactggtaaatctcccttaaattctttcttgaatttttttttaacatagttcctagtgaagtgggcttactttgtgcctgacccatgcttctttgagacaaaacaccacgctcacaccacacgcacaccacaaaacaaagaacaggtaaaaagggcacacatacacttttaccgtttacaccaaaccagaatcaaaacccaaatcagagtatccagaaatccaagccaggtcaaaaccaaaacgaaagtatg

SEQ ID NO: 5127 - DNA, 459 bp, Homo sapiens
  SIMILAR (18)..(374): 311254mologous to Neospora caninum subtilisin-like serine protease,accession number AF139114,Smith-Waterman Score=105.
tcagccaggcttttctcccagcggccagtcggcgggagcgaccaccagagcctgtcgaccccaaggccacagacccgcgttccggtactcgccggctgccaccgcggcttccctgccagtggacaacccctgaacactcccacacttcgcagctgaacctgagccgtgcctttcccaaagagccgaacccggcggccacacagtaaaacccaagcggagcttccccacgcgaaagacctcatgcacgcgctcaggaagaccggaacggcgaatgctgagaaggtaacgggagccgacctgacttggaagaggaagcatcgactccacgagcctccccgactccttcggattagcctttgtggttgcacccgccgcggccacttgttctggaaacaccactgctacaactctgacttcaataagttctccattccattgaccccacctgttatctgccat

SEQ ID NO: 5128 - DNA, 771 bp, Homo sapiens
  SIMILAR (682)..(768): 961254mologous to Homo sapiens vasopressin activated calcium mobilizing receptor-like protein,accession number X81882,Smith- Waterman Score=143.
tttttttgcattcaacacatatttactgggcgcattctatgcacgagttattgaagacagctgttgtaagcatttcaggacaatgcacctcccttaacaccgagtccgggatttggggcggggtgccggaaaacgccaggtcccgccagcagagggcacggtcccggcctcgctgcagcctcgggacccaccgaggcttccaggctcccacgctcgctcccgagcgcgtccccgccctcgcgtcacgtgacgtggccgccggaacctgagctgcggggcctaagccgagctaaattcgttgcaggtggccgccggcgggtgcaaccacaaaggctaatccgaaggagtcggggaggctcgtggagtcgatgcttcctcttccaaagtcaaggtcggctcccgttaccttctcagcattcgcctgttccggtcttcctgagcgcgtgcatgaggtctttcgcgtggggaagctccggtgaccatgtaggggacaagagtgaggaagctcctggtgcttgggacgaggtcagcgctgtcggcgcgctgctccagcgcccacatacaccctggtgctgggccgacgggccctgggccctggtgggagctccggcctccggtcaaggcctgaccgggagcgccacgaattctcgcgtcgtctcgcgagagtccaagttaaagaacatggcgacgtctaatctgttaaagaataaaggttctcttcagtttgaagacaaatgggattttatgcgcccgattggtttgaagctttac

SEQ ID NO: 5129 - DNA, 366 bp, Homo sapiens
  SIMILAR (177)..(302): 561254mologous to Homo sapiens Fragment of human secreted protein encoded by gene 75,accession number Y76381,Smith-Waterman Score=109.
tcaactcttgccagagcctctggagatttcggcttcctcgctgtgggagtggaaggcatttacatctttggactctctgacagtcagtatcttccccatcatggttcccacagtttcctgttcaggttcagaaagtaccttgttaccaagtctatcgtggagatctggtggtttgaaagcatgtagcacctcccccttcactcccttcctccttctctggccatgtaagacatgactgcttcccttttgccttccatgatgatcgtaagtttcctgaggcctccccagccatgcttcctgtaagctctttgggtccgcactacctttaatagctgtaacacttgccgcgaaggtccgcagcttcat

SEQ ID NO: 5130 - DNA, 801 bp, Homo sapiens
  SIMILAR (613)..(657): 731254mologous to Homo sapiens Human secreted protein, SEQ ID NO: 6960,accession number G02879,Smith-Waterman Score=60.
ctaaagcttgtactgccttgtggagttccaatttgagacacaacgagtaagaatgagaacagggccttcatggagctcctgttctggactagactgtgaggattccagctctttctccctttggctgtaagcttttttgtgcttcacttttctcatctgtaaaatgggaattacagcagtaacttcctttgctgggttgctgtgagggcttacacttggctgtattccctctagcacgatagacttggtaacaagggactttctgaacctgaacaggaaactctgggaaccatgttggggaagatactgactgtcagagagtccaaagatgtaaatgccttccactcccacagcgaggaagccggaatctccagaggctctggcaagagttgagtcaattgcatgcctgcctagtccagctccgtccacatgaatgctctccacaagcttcagaggaaacaggataaaatggactcccaaatatttagggtggtgaaaatactctgcatgatactagaattgtggatacaggtgattatatatgtgtccaaacctacagaaggtacaacaccaagggtgaaccctcaggtaaactacagaggctgggtgaccatgatgtttcaatgtcggttcattagttgtgacaaatgcaccactccaccactctggtggggatgctgccagtgggggaggctatgtatgtgtggggacagagcgtatgtgggaagctctgtactttctgctcaaatttgctgtgaacctaaaactgctctaaacattaaagcctaatcaaaaaaatga

SEQ ID NO: 5131 - DNA, 2427 bp, Homo sapiens
  SIMILAR (1)..(2424): 741254mologous to Homo sapiens ELKS,accession number AB015617,Smith-Waterman Score=3032.
cttcaggcccagctgaaagaactgcagagagagaatgacctcctccggaaagagctagacatcaaggacagcaaattgggatcttccatgaacagtattaagactttctggagtcctgagcttaagaaggagagagtcttgaggaaagaagaggcagcgcggatgtctgtcctcaaggagcagatgagggtttcccatgaagaaaatcagcacctacagttgacaatccaggcccttcaagatgagctgcgaacccagagagacctcaaccacctcctccagcaagagagtggcaaccgaggagcggagcacttcaccatcgagctgaccgaggagaactttaggcggctccaagccgagcatgacaggcaggctaaggagctgttccttttgaggaagacattagaggaaatggagctgagaattgaaacgcagaaacaaaccctcaatgcccgagatgagtcaattaaaaaacttcttgagatgttgcaaagtaaaggcttgccatccaaaagcctggaggatgacaatgagcgaacgcggcggatggcagaggctgagtctcaggtcagccacttggaagtgattttagatcagaaagagaaggaaaacatacatcttagagaggaattgcaccgaagaagccaacttcagccggagccagccaagacgaaggctctccagactgtcatcgaaatgaaggacacaaaaatcgcttcattggaacgaaacataagggatcttgaggatgagatccagatgttaaaagccaatggtgtgctgaacactgaggaccgcgaagaagagatcaaacaaattgaggtttacaaaagtcactccaagtttatgaagaccaagattgatcagctgaagcaggaactttcaaagaaagagtcggaacttcttgccttacaaacaaagcttgaaaccctcagcaatcaaaattcagattgcaagcaacacattgaagtgctcaaagagtcacttactgccaaagaacagagggctgccatccttcagactgaggtagatgcgctgagattacgactggaagaaaaagaatctttcctcaataaaaaaacaaaacagctacaggacctcacagaagagaaggggacactggccggtgaaattcgtgacatgaaagatatgttagaagtgaaggaaagaaaaatcaatgttcttcagaaaaagattgaaaacttgcaagaacaacttagggataaagacaagcaactgaccaacctgaaagacagagtgaagtccttgcagacggattccagtaatacagatactgcactggcgacgctagaggaagctctgtcagagaaggagagaataattgagcgcttgaaagaacagcgagaaagagatgatcgggaaagactagaagagatagaatccttccgaaaagagaacaaagacctgaaagagaaggtcaatgctttacaggctgaactgactgagaaagagtctagtttaattgacctcaaagaacatgcatcttcattagcctctgcggggctgaaaagggattccaaattaaaatctctagaaatagccattgaacaaaagaaagaggaatgtagcaaattggaagcacagttaaaaaaggcacataatattgaagatgactccaggatgaaccctgagtttgcagaccaaataaaacagctcgataaagaggcgtcttactaccgcgacgagtgtggcaaggcccaagcggaagtggaccggttgctggagatcctcaaggaggtggagaatgagaagaatgacaaggacaagaagatcgcagaactggagagcttgactctcaggcatatgaaagatcagaataagaaggtggccaacctcaagcacaatcaacagttggaaaagaagaaaaatgctcagttactagaagaagtgcgcaggcgagaagacagcatggctgacaactcacagcatttgcagatagaggaactgatgaatgcactggagaagaccagacaggaactggatgccaccaaagcacgcctcgcctccacacaacagtccctggccgaaaaagaagcgcacttggccaacctccggattgagaggaggaaacagctggaggagatcctggagatgaaacaggaagcactacttgcagccatcagtgaaaaagatgcaaacattgccttgctggaattgtctgcctccaaaaagaaaaagacgcaggaagaagtcatggccctcaagcgggaaaaagaccgactagtacatcaattaaagcagcagacccagaacagaatgaagttgatggcagacaactatgatgatgaccatcaccattaccaccaccaccaccatcaccaccaccatcgatctcctgggaggtcgcaacattccaatcacaggccctctccggaccaggatgacgaggagggcatatgggcatag

SEQ ID NO: 5132 - DNA, 495 bp, Homo sapiens
  SIMILAR (2)..(97): 361254mologous to Zea mays pyruvate,orthophosphate dikinase precursor (PPDK1) (EC 2.7.9.1),accession number X14927,Smith- Waterman Score=56.
atgtcttacaaagaacaccagtgcaacaagagaaaagcaagtcacggaattgcaccgaagaagcaaacttcagccggagccagccaagacgaaggctctccagactgtcatcgaatgaaaggacataaccttgtgctaagtcaaggagcatctgtatattgtggcctgttgggccctgagactgcacttggtatttctccccaccaaggctgggatttccccagccttaatgaaagtctcatatcctgggaaacccctcactctcaagcaactgggacggttggtcatcctacaggagcaatgacatccacgtgggcagcacctggagatatggttatgcacagtcccttgggaaatataactgaattcaaagcactaactcaagcagactgcttttcctcaccctctgatatcatcaccactagcaccagtgagtgtagtacggccaatgaaaacagcagagaggggaagaagccagcccagttgagattctaa

SEQ ID NO: 5133 - DNA, 654 bp, Homo sapiens
  SIMILAR (86)..(397): 371254mologous to Xenopus laevis dsRNA adenosine deaminase,accession number U88065,Smith-Waterman Score=175.
atgccccgctacgtcccccttctgctgctcctgcttctcctgaggtgttcagaacggggtggaggagttaattttggtgagaaggatgcaaaagtccccgggacctggagagatggagtcagggtccctggagaaggagcctcttgggactcagacagggccagtcccgagcgaaggtacggaatagacccagggaccaccaaggactccatcactgcagacccaaggaccacagaggactccgtcactgcagacccagggaccaccaaacactccatcactgtagacccagggaccactgaggactctgtcactgcagacccagggaccaccaaacactccatcactgcagacccagggaccaccgaggactccgtcactgcagacccagggaccacagaagatgaaaccactaaacatgtcacagcagtgaaacccaccaggctcctgacacccatgggaattatcctcatatccctggctgcaaccacagtcactgttgtgctctttgttggattgggcttcattgtgaggacatataagcctgtgcatggctatgagaacacagtggagagccatgtaaatagcttttgccttcaaggtgcctggcagaagcgaatgaatattgctgtcatgtacatgcaaacgttgtga

SEQ ID NO: 5134 - DNA, 384 bp, Homo sapiens
  SIMILAR (21)..(383): 241254mologous to Homo sapiens mitosin,accession number U30872,Smith-Waterman Score=104.
tccgagctttgttttagacctgtttacacataaaagagaagctggatgataatcaacttaatttgatccagaaagtgtgtgagctcatcggtgaagtgagaacagaagggattgacaatatgaaggacctaaagaaaaaatggtgctctgccagccccgatgaaggaatgaaagaaaacccagccaaagaatctattcaaagtaaaaaagagtatttgcgcatcaagctgatggcagagcgagaagtgggtttatttcgtcagcaggtcctggctctcaggcaggccctggccagggcacaggctgacagcgcgaggatgtggaagcagcaggacagccaggctcaactgctgaaggagttagaacatagagtgacccaggaag

SEQ ID NO: 5135 - DNA, 822 bp, Homo sapiens
  SIMILAR (7)..(789): 231254mologous to Homo sapiens Colon cancer associated antigen precursor sequence,accession number Y07096,Smith-Waterman Score=134.
atggaaatcaccactctgagagcccaactcacagacttggaagaagtgaatctgaatctcaagaagcagattagaaaagaagtccaagaagaatatgaagcattagtccgagctttgtttgagacctgtttacacataaaagagaagctggatgataatcagcttaatttgatccagaaagtgtgtgagctcatcggtgaagtgagaacagaagggattgacaatatgaaggacctaaagaaaaaatggtgctctgccagccccgatgaaggaatgaaagaaaacccagccaaagaacagctgtgggccttggagcaggacaactgcagcctggccaacctggtgtgcaaagtgaggagcctgggccgctggaggctggctgtgcagcaggcgtgcttccaggcccagctgagcaggacagagaaggaatctattcaaagtaaaaaagagtatttgcgcatcaagctgatggcagagcgagaagtgggtttatttcgtcagcaggtcctggctctcaggcaggccctggccagggcacaggctgacagcgcgaggatgtggaagcagcaggacagccaggctcaactgctgaaggagttagaacatagagtgacccaggaagctctcacccagcagcagctgcattttatgaaaacatccaggatggagaagctcttggaagatgtggggcaaaaagaacagcaactgcagctccttagcaaagaggctgagagggcttctaagctgggccaactgcagcagaaaaaaatgaagagggacctccaccagtgttctcattgttcaattcccatctatgagtga

SEQ ID NO: 5136 - DNA, 436 bp, Homo sapiens
  SIMILAR (354)..(238): 1001254mologous to Homo sapiens Human secreted protein encoded by gene 49 clone HTPCS60,accession number Y02698,Smith- Waterman Score=183.
ctacccattgcagacaagggctctgattggaaaccctctgactcctccgtgcttcttggcctttgacaagtttatcacagatgggagaaggacattctgtttcttcagtgttatgggctgactcacttccctcttctctgcaataagcacaaaggccaaagtcagtccactctgttcagccagggcctgcagcccctcgcctgccgccagagcagctctcggttctcccggatttacctgttgaggcgctggcgtcgctcccacgccggtcccggtggccgcgcccgcccctgccacagccccggctaccgcggtggccgcagccgctaccacaaccgtcgtcagtgcggccatgtttacccgccgagctactcgggccgcggcggccaccggtgcctggggattcgtggcaggcgcaccctggcctctgcagaca

SEQ ID NO: 5137 - DNA, 1341 bp, Homo sapiens
  SIMILAR (77)..(1216): 261254mologous to Homo sapiens mucin,accession number M74027,Smith-Waterman Score=206.
atgggtggctctgccctagatgaggcgatgtgtggctgctcccctggcccacagatggtagcagaagctggggttgccaggctgcaccccgacggtgtgttcgttcctttctcctcagccacctccccgtgcaagatcctcaagtgcaactctgagttctggagcgccacgtcgggcagccacgccccagcctcagacgacacccccgagttctgtgcagccttgcgcagctacgccctgtgcacgcggcggacggcccgcacctgccggggtgacctggcctaccactcggccgtccatggcatagaggacctcatgagccagcacaactgctccaaggatggccccacctcgcagccacgcctgcgcacgctcccaccggccggagacagccaggagcgctcggacagccccgagatctgccattacgagaagagctttcacaagcactcggccacccccaactacacgcactgtggcctcttcggggacccacacctcaggactttcaccgaccgcttccagacttgcaaggtgcagggcgcctggccgctcatcgacaataattacctgaacgtgcaggtcaccaacacgcctgtgctgcccggctcagcggccactgccaccagcaagctcaccatcatcttcaagaacttccaggagtgtgtggaccagaaggtgtaccaggctgagatggacgagctcccggccgccttcgtggatggctctaagaacggtggggacaagcacggggccaacagcctgaagatcactgagaaggtgtcaggccagcacgtggagatccaggccaagtacatcggcaccaccatcgtggtgcgccaggtgggccgctacctgacctttgccgtccgcatgccagaggaagtggtcaatgctgtggaggactgggacagccagggtctctacctctgcctgcggggctgccccctcaaccagcagatcgacttccaggccttccacaccaatgctgagggcaccggtgcccgcaggctggcagccgccagccctgcacccacagcccccgagaccttcccatacgagacagccgtggccaagtgcaaggagaagctgccggtggaggacctgtactaccaggcctgcgtcttcgacctcctcaccacgggcgacgtgaacttcacactggccgcctactacgcgttggaggatgtcaagatgctccactccaacaaagacaaactgcacctgtatgagaggactcgggacctgccaggcagggcggctgcggggctgcccctggccccccggcccctcctgggcgccctggtcccgctcctggccctgctccctgtgttctgctag

SEQ ID NO: 5138 - DNA, 603 bp, Homo sapiens
  SIMILAR (239)..(334): 931254mologous to Homo sapiens semaphorin F homolog,accession number U52840,Smith-Waterman Score=164.
ttagagcaacttaactttaaaaaagacaatgtgtgcataaaaatgagctagtggaccggcatcaattgtggtattacggcaacagtttattaaatttttcctagatgaaatctgttctttagaggaaagggtttggtgtcgtaagttatgtctcttgtatatcctatggaaagaaccgcgcgccgtacaggccaaatcccggtgctcggacatacgaagggaactgtacagacctgtttccttggcagggctttctggggatttcctgcgtgctgggagatactctgcccacacggtcaacggggcttggtcagcctggacgtcgtggtcacagtgggcttgatgatcaagaggactgttattggctttgcacaacatgttgaagatcatcattgccttttgttctttgcaggtggctactcgcatccagtcaactttcatatcatcttggcatctgagtccttctcttctaggatcaagatccttttctctgtatatgtccttcggttctgttctgtgcccactgtttattagccacgatacatcttcatacagtacaaagtctttccagtctttttcttgcttaggggtttggtaacccat

SEQ ID NO: 5139 - DNA, 690 bp, Homo sapiens
  SIMILAR (248)..(688): 981254mologous to Homo sapiens PDZ domain-containing protein AIPC,accession number AF338650,Smith-Waterman Score=768.
gtaccggccggaatcccggtcgacgatttcgtagcagccttcgggaagtcctgcaggagccgcgttccatgagggcatttggcagccgccccaggcccccgggccgcctgcaggtgattaggctaatgagctgccccgggggcgcggagaccggcctggcgagcggattacccggcgcccagctgctgccggcggagactcccaggagctccggagaggaacccttcgaaggtgacttcagaactggagttacctggctgagcagtgctggaatggcggctttatctacctgatcatgctgcgtcgctttaagcacaaagcccactccacttataatggcaacagtagcaacagctctgaaccaggagaaacacctaccttgtagctgggtgaccgaactgcgaaaaaggggaaacgaaccagaaagtttggggtcatctccaggcctcctgccaacaaggcccctgaagaatccaagggcagcgctggctgtgaggtgtccagtgaccccagcactgagctggagaacggccctgaccctgaacttggaaacggccatgtctttcagctagaaaatggcccagattctctcaaggaggtggctggaccccatctagagaggtcagaagtggacagagggacagagcatagaattccaaagacagatgctcctctgaccacaagcaatgg

SEQ ID NO: 5140 - DNA, 480 bp, Homo sapiens
  SIMILAR (11)..(424): 331254mologous to oat blue dwarf virus replicase-associated polyprotein,accession number U87832,Smith-Waterman Score=147.
atggccattctgggctatggttcagcgaccctcatctgccatcctctgcgggccggcaactcttcctccaaactgccggggcgcatgctgtgcgcgctgccgggccactggcgccctgtccgcttacccagctatccatcggccagccacccggccacccgcacctcccgctccagggcctctgacatcccctccacccctctccgtgcagaattcgaaccccgatcctctcccttccgctcgccccagcccgggtcccgcagccccgcggcacgcccggcactcaccctcagagctcccggcactcaccctcagcgctcgcggctcctccgcgctctgcacgaaactgaaagtagaagccgccgcctagagctgctccgccagtgcatggaactggcggctgctgccgagaaatcacgtggattcgaggtgccagcccgagccagatggggctcgggcgcgggatgggcgggggcctaa

SEQ ID NO: 5141 - DNA, 153 bp, Homo sapiens
  SIMILAR (5)..(40): 501254mologous to Homo sapiens dJ406A7.2.1 (Microtuble Associated Protein E-MAP-115),accession number AL023284,Smith- Waterman Score=29.
agcctggtcctgtgaaggcccagcgtatggaagcaatagctcgccgcctgcagctcagcccatgggagagcagcgttgttaacagactcctgacgcccacacattcgttcctggccagaagtaaaagcacagctgccttgtctggagaagcag

SEQ ID NO: 5142 - DNA, 239 bp, Homo sapiens
  SIMILAR (3)..(239): 1001254mologous to Homo sapiens E-MAP-115-95,accession number AJ242501,Smith-Waterman Score=403.
ctcgccgcctgcagctcagcccatgggagagcagcgttgttaacagactcctgacgcccacacattcgttcctggccagaagtaaaagcacagctgccttgtctggagaagcagcatcttgcagccccatcatcatgccctacaaagctgcacactctagaaattcgatggatcgaccaaaactctttgtaacaccacctgagggctcttctcgcaggaggatcattcatggcacagcg

SEQ ID NO: 5143 - DNA, 394 bp, Homo sapiens
  SIMILAR (1)..(387): 931254mologous to Homo sapiens microtubule associated protein,accession number X73882,Smith-Waterman Score=603.
aagccaaaacagaagcataaccgttggtcgtggggaggctctctccatgggagccctagcatccacagtgcagatccagacaggcggtcagtttccaccatgaatctttcgaaatatgttgatcccgtcattagcaagcggctctcctcttcatctgcaactttactaaattctccagatagagctcgccgcctgcagctcagcccatgggagagcagcgttgttaacagactcctgacgcccacacattcgttcctggccagaagtaaaagcacagctgccttgtctggagaagcagttatccccatttgtcctcgttcagcatcttgcagccccatcatcatgccctacaaagctgcacactctagaaattcgatggatcgaccaatgtatt

SEQ ID NO: 5144 - DNA, 435 bp, Homo sapiens
  SIMILAR (13)..(435): 1001254mologous to Homo sapiens microtubule associated protein,accession number X73882,Smith-Waterman Score=716.
cggtcgattcggacacccagaccgacatcctccttgccacccggctcagtcaaagctgctcctgctcaggtccggcccccatcccccggcaacatccgccctgtcaagagggaagtcaaagtggagcctgagaagaaagatcctgagaaggaacctcagaaagttgccaatgagccctcactaaagggcagagcacctttagtgaaggtagaagaagccacagttgaagagcggacacctgctgaaccagaagttggccctgctgctccagccatggccccagctccagcctcggccccagctccagcctcggccccagctccagccccggtccccaccccagccatggtctcagccccgtcatccactgtgaatgccagtgcttctgttaagacttctgcaggcaccaccgacccagaggaggccacaaggctt

SEQ ID NO: 5145 - DNA, 2115 bp, Homo sapiens
  SIMILAR (1067)..(2050): 491254mologous to Homo sapiens microtubule associated protein,accession number X73882,Smith-Waterman Score=579.
taggtgcctgccccattgataagagtttctagtttagatttagagccatccctttctttcgtcagtgtcgtctgtccctgcagacatcatcagcaccttcaccagtttttcattgtctcttgtatcacagaaggagcagcttcagctttcagctcttctcaggtactccctggcacaacagcttcctgattctggctttgaagtgggcatggagttggccaggaagtgttcttccacccttttgctccactactttattgcctatccagagaaggtgctagagaaggactcttctatttttagtgttgccatctggctgaaggaaggtttttgttttacttatttacttattttttagataaaagcctttttggttgaatttaaagtgtgttaaattttaaccattttttactacataaaaggctatttcatgtggttcaacctctagttctgtgttctaggtcactcccccaaagctgtgtccatacttaaatgtttctgaagaaattttaagaaactaaatgtgtcttttctcttttgtctcatttctgtagcacccgacagctacaaagtgcaagataagtgtgttttttctttttctttttttttttaatccactcttcatctcatgttttttttaatctcgctttcagaccctccgaactattcaagtttgcaacctgcctatatttgatttccctctttttttttttttttaaccctccccaaagctgcaagagaaatagtgtggttagaaagagaagagcgagccaggcagcactacgagaagcacctggaagagcggaagaagaggttggaggagcactgccttaaattgaagaagcttcaaacaaccagctggaatctaatcctcagctcttctattccatctaaggaacgccacgaagctgttgtacggcgcacaatggaaaggagccagaagtgtgtgaatctgataaccttttttttttaaatttgctttgaaaaatcattgttttacattctgtctccaggtggttttgttgaatcaccatcagtgaactaggaaattgcaatcctacatgttggctgtcaattagcattatctccatttgttttagatccagacaggcggtcagtttccaccatgaatctttcgaaaggtggaataactgctccctctggacaggggtcctgttgctacgatgtattatgccctcttgactctgaaaagaatgcttctaacatcttgcttatgtggtgacgtttagctcgccgcctgcagctcagcccatgggagagcagcgttgttaacgctcctctggcactcttgtgtgtaaaaccaatcacctgcaccctagttatccccatttgtcctcgttcagcatcttgcagccccatcatcatgccctacaaagctgcacactctagaaattcgatctgttgagtattgtgagtgtgtttgcctcgcttgtggaaaaatctaactattgagtttctctgaacttagagctataaaaaagaaagagagagagaaaatgtactcttcctcacgtgttctaggttctggcaagcctgttctcatgtgtccccttttgtctgccttgtttgtttgtggcccaggcttccgtccaagtctcttcctcatttgcctggcacacccagaccgacatcctccttgccacccggctcagtcaaagctgctcctgctcaggtccggcccccatcccccggcaacatccgccctgtcaagagggaagtcaaagtggagcctgagaagaaagatcctgagaaggaacctcagaaagttgccaatgagccctcactaaagggcagaaagaccaaagcccatatcctccttggactcctcagactctcttttctttgcttctatttcttctcctcagctggaacagcattggtggagggggcaggaccttctgctggtgcaggtccacgagctcctccattgcagatgaggctccccatgtcaacattggccaaggcttttgcaaacaagccagtccaaaaaggttcaacatttacaccagctgctttaatgagggcattgatcttatcctccttgacggtcacctcaccctcatgcagaatgagggccgagccttatgcagaatg

SEQ ID NO: 5146 - DNA, 1350 bp, Homo sapiens
  SIMILAR (661)..(386): 361254mologous to Gallus gallus type XII collagen,accession number M17375,Smith-Waterman Score=103.
atgtcgacaccatatagtgcgtgtacacatgtcctcttacatctttcaacgcttactaatataagtgctcagagtaaacatgaaagaagacgaacaaatcattacgagaaaacagcagatttacctgcaatgattacggacgcgctgagacgcaggcctttcctggcgcgaagcgactcgccccggagctcccctgcaccgtcctgggtgtcaggacgcgtcaacccagatgacccgacccggagatcctggatcctctgccctcttccccctaccaagtccttaaccggagagggaggagctaccaatgtcctccagacgttctccaaagcccgagctgccgggagaagcttgctcaaggcggccgcccacgaggccccgtccccgcactgcaacgagaggtccgcctctgaacggccggctgcccagggcacggctccccgtcagcgcaggggcgggcgccctgggaggggggcgctgccgccgccgtgtagcccctcgacgggtaacgccgcgcctcgcgactcggccgtccggtgtggccccccgggggtccgggtaagcggcgacgaccaaattgagtttggcgtttggggtcactcccctcgcgctaacgccttggagtcggaccccctttcggaaaagggaagagaggccccccttttgatatccccgccccgctacgccagaggcttcccccgcccacgtggaaaatttccgttcaaaccagacacgctatacgtctgcggaataatccgggcagcagctagagcgaccgagcattgcagaaatcagcgcacaagcgactgtcgagccacggtcaactatatagagctgtccgagacggctagagcactggcaacagtattatacttcgcagttccccagatgggaggattcttctggaatgaaggttcttatgaggtacttcaacagagaagggagaactatagtgctcgggtaccctttgcgttcagctggatagcacgtcccgtctatacatccccggcggtacggttgtggttccacaaatcctcgagaccgctgtgtttcctacaggcccaattgaaatacccgacgggcatggaaaggcaggttcgggtactaaatgtgaaacgtccattttgtggcacaagtgagttactcagtgagtgccctcaacccaatgaaacccaggtctttcctggcgtacagtcatcggatctctatttttctgggcttagtttgtgttttgttgcacatgccaatgggaatccacagcagcagcattttagaagctggaaagccgatgcagtagtgggtactgactcagtaaacctgagaatgccaaatcctaaactgacgctatga

SEQ ID NO: 5147 - DNA, 312 bp, Homo sapiens
  SIMILAR (169)..(300): 401254mologous to Xenopus laevis integumentary mucin B.1,accession number Y08296,Smith-Waterman Score=98.
atgttttcgtttctcttggaaatcgaagccataaaactggctgagcagaagcacagggaggagcggaggcggagggccacggtggtggtgggggacctgcaccctctcagggatgccctgcccgagctgctggggctcgaggctggcagccggcgccaagcccgcagaagcccatcacccagtgacacaaccccgccacccagtgacgcaacccccagtgacacaaccctgccacccggtgacgcaacccccagtgacacaacccccagtgacgcaaccccgccacccaatgaagataccaccacccggtga

SEQ ID NO: 5148 - DNA, 549 bp, Homo sapiens
  SIMILAR (15)..(494): 321254mologous to Volvox carteri extensin,accession number X65165,Smith-Waterman Score=133.
tcacgtgcatgtgacccaggcacaaagagcctgaaagccaagctcctgggagacgggcgccacaggcagcagcttatcagcaggctgcatcccctgcgaggtgacagggagggtcatgcagccgctgccctcctggttgagccgtcgaggcagctcccgccccatgaggacaagctctgggatgtgtgtcccagggccctgcatgagtgggtcccacacgctcaccacacccgacagcaggcctgagccgtcctcacgggccaccctctgtgcggagcaccggctggagccccagctctcggcctctgcaggctcaggaagcaccgtggcccgtggctcccactcatatccctccacctctggacccgggtcagccccacagctgcgggcttggcgccggctgccagcctcgagccccagcagctcgggcagggcatccctgagagggtgcaggtcccccaccaccaccgtggccctccgcctccgctcctccctgtgcttctgctcagccagttttatggcttcgatttccaagagaaacgaaaacat

SEQ ID NO: 5149 - DNA, 2448 bp, Homo sapiens
  SIMILAR (1)..(2445): 1001254mologous to Homo sapiens NY-REN-45 antigen,accession number AF155110,Smith-Waterman Score=4250.
atggcgggagggcactgcggcagcttccccgcggcggcggccggcagcggcgagatcgtccaactgaacgtaggggggaccagatttagtacctcaagacaaactcttatgtggattccagattcttttttttccagtttgctgagtgggagaatttcaacacttcgagatgaaactggtgctatatttattgatagagatccagcagcatttgcacccattttaaattttcttcggacaaaagaactagacttaaggggagtgagtattaatgttctcaggcatgaagcagaattttacgggatcactccattagtaagaaggcttctcttatgtgaagaattggagcgttcctcttgtggcagtgtcctttttcatggttacttgcccccaccaggtattcctagtcgtaaaataaacaacacagtcagatctgctgattctaggaatggtctaaattctacagaaggtgaagcccggggaaatggtacacagcctgttctctctggaacgggagaagaaactgttaggctaggatttcctgtggatccacgaaaggtgctaatagtagctggccatcacaactggattgtagctgcatatgcccattttgctgtgtggtacagaatcaaagaatcttcaggatggcagcaagtgtttacgagcccatatttggattggactatcgaacgagtagctttaaatgcaaaggtggttggagggccacatggagacaaagacaaaatggttgctgttgcctcagagagtagcatcatcttgtggagtgttcaggatgggggaagtggaagtgaaattggagtgttcagcctgggtgttcctgtagatgctctcttctttattggtaaccagttggtggccacgagtcatacagggaaagtgggagtgtggaatgctgtcactcagcactggcaggttcaagatgttgttcctataactagttatgacactgctggatcattccttctgcttggatgtaacaatggatcaatatattacatagatatgcagaagttccccttgcgaatgaaagataatgatcttcttgtaactgaactgtatcatgatccttcaaatgatgctattactgctctgagtgtttacctcacacccaaaacaagtgtcagtggtaactggatcgagatcgcctatggtacgagctctggagcagtacgagtgattgtacaacacccagagacagttgggtcaggtcctcagctttttcagactttcacagttcaccgaagtcccgtaacaaaaatcatgctatcagagaagcatcttgtatcagtctgtgcagataataatcatgtccggacgtggacagtaacacgattcagaggaatgatctctactcagccaggttctactcctttagcgtcattcaagatactatccctggaggagacagaaagtcatggtagctattcctctggaaatgacataggaccttttggagagcgagacgatcaacaggtgtttatccagaaagttgttcccatcaccaacaaactatttgtaagactctcatcgactggaaaaagaatatgtgagatccaggctgttgactgtactacaatatcctcatttacagtgagggaatgtgagggatccagtaggatgggctcaagaccaaggcgctacttgttcacaggccatacaaatggcagtattcaaatgtgggatctgaccactgctatggatatggttaacaaaagtgaagataaggatgtaggtggtccaaccgaagaagagctactcaaattactcgatcaatgtgatttgagcacatctcgctgtgctactcctaacatcagtccagcaacttccgtagttcagcatagccacttacgagaatcaaattctagccttcagcttcagcaccatgataccacccatgaagcagctacttacggttccatgaggccttacagagaaagtcctttattagcaagggcaagaaggactgagagctttcacagttatagggacttccagactattaatttgaacagaaatgtagaaagagctgtccctgaaaatggtaacttgggtccaatacaagctgaagtgaaaggggcaacaggggaatgtaatatatctgagagaaagtctcctggagtagaaataaaaagtttgagagaattggatagtggattggaagtgcataaaatagctgaaggtttttcagaatccaagaaaaggtcatcagaagatgaaaatgaaaataaaatagagtttaggaagaaaggaggatttgaagggggaggattccttggaagaaagaaagttccctatctggcatcatcaccaagtacttccgatggaggaactgactcacctggtactgcgtccccatctcctacaaagactactccatctcctcggcataaaaaaagtgattcttcaggtcaggagtacagcttgtga

SEQ ID NO: 5150 - DNA, 711 bp, Homo sapiens
  SIMILAR (25)..(276): 981254mologous to Homo sapiens Human cancer associated antigen precursor from clone NY-REN-45,accession number Y92338,Smith-Waterman Score=418.
ttctccgaagggcggaatcgctttctgaacgtagggccgaccagatttagtacctcaagacaaactcttatgtggattccagattcttttttttccagtttgctgagtgggagaatttcaacacttcgagatgaaactggcgctatatttattgatagagatccagcagcatttgcacccattttaaattttcttcggacaaaagaactagacttaaggggagtgagtattaatgttctcaggcatgaagcagaattttacgggatcactccattagagaaaataaaaatggagtactgtttttctgtttgcatgtactcttgacaagtttgctttgaaatgtttttagtaagaaggcttctcttatgtgaagaattggagcgttcctcttgtggcagcgtcctttttcatggttacttgcccccaccaggtattcctagtcgtaaaataaacaacacagtcagatctgctgattctaggaatggtctaaattctacagaaggtgaagcccggggaaatggtacacagcctgttctctctggaacgggagaagaaactgttaggctagcaaatactattgatagcaagtatgtagccaatgatgattggcttatttttcagtatgtggatgaagaggacctgatgaacgccatcaaggatttcagctcagtgactaaggaacgcaccacattcacagacacccacctgtaa

SEQ ID NO: 5151 - DNA, 405 bp, Homo sapiens
  SIMILAR (31)..(306): 301254mologous to Mus musculus Pro-Pol-dUTPase polyprotein,accession number Y12713,Smith-Waterman Score=114.
caacagaaagaaatcccttagatgtgttgatatgggggtactgcaacagtgcagagatgggctgagtctagacatgttccttttccaccctctcaagaacaaaacgccaataagatctgttctgtctgccaggaagagaaagatagtgccgacagctatggggagattccctggtggcaaggccctgaacgctgctggccagtgagactgatgctggcaaccctaggggactacaaatgggtcctgacaggtataggcactgactcttaactgggttttactatcccaacagaccatgcaaatgctttcagtgctaaagaaataccacaatagacccatttaaaaatttccaccttcctggagtgagccgtttgactctccccttccccattcttttgttaatta

SEQ ID NO: 5152 - DNA, 905 bp, Homo sapiens
  SIMILAR (483)..(905): 771254mologous to Plasmid F Protein D,accession number M12987,Smith-Waterman Score=512.
atgatcagcgaagttatagtgattcaaatgctgtttctgcatgcattttccaaggtatttagcgctttaattaaaaacaacaaaaaacccctgcaagatgcacaaataaaatgtaaggccatctctggtttgtcaggagggatgaggcgatctgaatgcaacagggagagggaccaggtgacacgcacgcagtgccgggacattagtcaaaaagcgaggacctggggactgagggatggctaccagcaagaatggtgcaatggcgtgacagctcggccctggttgccaaggagatgcgagtaccggaaatgcggaattcggggagagcgcgcatgcctggtccggtggagggagggtgccgggcgtcacaggtcctgacagggaagaagttggcaggtcctggcaggggacgagctgcggcggtggcacctccgggtgtggaaggctccagtgagatggagtcgcgagtcgcggacgctgggaccggcgagaccgcgcgagcagcgggcgggagtccggcagttggctgcaccactcgggggcccgtagtctcggcgcccctgggagccgcccggtggaagctcctgcggcaggtatttattcgcgataagctcatggagcggcgtaaccgtcgcacaggaaggacagagaaagcgcggatctgggaagtgacggacagaacggtcaggacctggattggggaggcggttgccgccgctgctgctgacggtgtgacgttctctgttccggtcacaccacatacgttccgccattcctatgcgatgcacatgctgtatgccggtataccgctgaaagttctgcaaagcctgatgggacataagtccatcagttcaacggaagtctacacgaaagtttttgcgctggatgtggctgcccggcaccgg

SEQ ID NO: 5153 - DNA, 888 bp, Homo sapiens
  SIMILAR (78)..(446): 311254mologous to Macaca mulatta fibrinogen A-alpha- chain,accession number D43758,Smith-Waterman Score=115.
atgagggacagcgttccagtagccctgccacagctctctcatcctctggtccgccctcactcaagatggctaccagcaaaaatggtgcaatggcgtgacagctcggccctggttgccaaggagatgcgagtaccggaaatgcggaattcggggagagcgcgcatgcctggtccggtggagggagggtgccgggcgtcacaggtcctgacagggaagaagttggcaggtcctggcaggggacgagctgcggcggtggcacctccgggtgtggaaggctccagtgagatggagtcgcgagtcgcggacgctgggaccggcgagaccgcgcgagcagcgggcgggagtccggcagttggctgcaccactcgggggcccgtagtctcggcgcccctgggagccgcccggtggaagctcctgcggcaggttctgaagcaaaaacacctggatgattgcctgcgacatgtatctgtaagaagatttgaatcatttaatctgttttcagtaacagaaggcaaagaaagggaaactgaagaggaggttggtgcatgggtccaatatacaagcatcttctgtcctgaatacagtatctccttaagatcctataggtggcagcagttcctacagtttcagagcataacaatggctcgatttgtgggtctaagaataaagctgtcacgaactcatggaatctttatactgcataatagtggatccttgaatgttgaagatgtccttaccagctttgacaatacaggaaatgtttatgaacacttccaaagaatgtccagtactgcttcctcaaatcctttgattgggcacttcctgcaaaacttcaacaagtcagagagcacagagagttggaaaacaataggcaaagcacatttttaa

SEQ ID NO: 5154 - DNA, 1055 bp, Homo sapiens
  SIMILAR (1053)..(172): 901254mologous to Homo sapiens putative p150,accession number U93572,Smith-Waterman Score=1345.
cttgggcagtatggccgttttcacgatattgattcttcctatccatgagcatggaatgttcttccatttgtttgtgtcctcttttatttcgttgagcagtggtttgtagttctccttgaagaggtccttcacatcccttgtaagttgaattcctaggtattttattctcaacagggacaatttgacttcctcttttcctaattgaataccctttatttctttctcttgcctgactgccctggccagaacttccaacactatgttgaataagagtggtgagagagggcatccctgtcttgtgccagttttcaaagggaatgcttccagtttttgcccattcagtatgatattggctgtaggtttgtcataaataggtcttattattttgagatacgttccatcaatacctaatttattgagaggttttagcatgaagggctgttgaattttgtcgaaggcctcttctgcatctattgagataatcatgtggtttttgtctttggttctgttaatatgatgatttatgtttatcgattcgcatatgttgaaccagcctggcatcccagggatgaagccaacttgtttgtggtggataagctttttgatgtactgttggatttgctttgccagtattttattgaggattttcgcattgatgttcatcagggatattggtctaaaattctcgttttttgttgtgtctctgccaggctttggtatcaggatgatgctggcctcataaaatgagttagggaggattccctcttcttctattgactggaatagtttcagaaggaatggtaccagcttctctttgtatctctggtagaattcagctgtgaattcacctggtcctggactttttttttgggttggtaggctattgattactgcctcaatttcagagcctgttattggtctattcagcaattcaaattcttcccagtttagtcttgggagggtatatgtgtccaggaatttatccatttcttctagattttctagtttatttgcatagaggtgtttatagtattctctgatggtagtttgtattt

SEQ ID NO: 5155 - DNA, 930 bp, Homo sapiens
  SIMILAR (395)..(225): 961254mologous to Homo sapiens putative p150,accession number U93564,Smith-Waterman Score=296.
tcaaagatcagatagttgtagatatgcggcattatttctgttccattgatctatatctctgttttggtaccagtaccatgctgttttggttactgtagccttgtagtatagtttgaagtcaggtagtgtgatgcctccagctttgttcttttggcttaggattgacttggcaatgcgggctcttttttggttccatatgaactttaaagtagttttttccaattcttgggcagtatggccattttcacgatattgattcttcctacccatgagcatggaatgttcttccatttgtttgtgtcctcttttatttccttgagcagtggtttgtagttctccttgaagaggtccttcacatcccttgtaagttggattcctaggtattttattctctgaagcaattgtgaatgggagtttacccatgatttggctctctgtttgtctgttgttggtgtataagaatgcttgtgatttttgtacattgattttgtatcctgagactttgctgaagttgcttatcagcttaaggagattttgggctgagacgatggggttttctagataaacaatcatgtcatctgcaaacagggacaatttgacttcctcttttcctaattgaataccctttatttccttctcctgcctgattgccctggccagaacttccaacactatgttgaataggagcggtgagagagggcatccctgtcttgtgccagttttcaaagggaatgcttccagtttttgcccattcagtatgatattggctgtgggtttgtcatagatagctcttattattttgaaatacgtcccatcaatacctaatttattgagagtttttagcatgaagggttgttgaattttgtcaaaggctttttctgcatctattgagataatcatgtggtttttgtctttggctctgtttatatg

SEQ ID NO: 5156 - DNA, 819 bp, Homo sapiens
  SIMILAR (244)..(705): 941254mologous to Homo sapiens putative p150,accession number U93564,Smith-Waterman Score=733.
atgaacattgatgcagaaatcctcgataaaatactggcaaaccgaatccagcaggacatcaaaaagcttatccaccatgatcaagtgggcttcatccctgggatgcaaggctggttcaatatatgcaaatcaataaacgtaatccagcatataaacagaaccaacgacgaaaaccacatgactatctcaatagatgcagaaaaggcctttgacaaaattcaacaacgcttcatgctaaaaactctcaataaattagtgttggaagttctggccagggcaatcaggcaggagaaggaaataaagggtattcaattaggcaaagaggaagtcaaattgtccctgtttgcggatgacatgattgtatatctagaaaaccccatcgtctcagcccaaaatctccttaagctgataagcaacttcagcaaagtctcaggatacaaaatcagtgtgcaaaaatcacaagcattcttatacaccaacaacagacaaacagagagccaaatcatgagtaaactcccattcacaattgcttcaaagcaaataaaatacctaggaatccaacttacaagggatgtgaaggacctcttcaaggagaactacaaaccactgctcaatgaaataaaagaggatacaaacaaatggaagaacattccatgctcatgggtaggaagaatcaatatcatgaaaatggccatactgcccaagcagtttagggcctccttctccgttaatatgtccgatggccttcatgatgagaatgcactgtctgtaattagctgtgcagctgatgacgtgcctccagtagccaccagcatgtga

SEQ ID NO: 5157 - DNA, 1140 bp, Homo sapiens
  SIMILAR (845)..(901): 731254mologous to Homo sapiens putative p150,accession number U93565,Smith-Waterman Score=77.
atgattatctcaatagatgcagaaaaggcctttgacaaaattcaacagcccttcatgccaaaaactctcaataaattaggtattgatgggatgtatctcaaaataataagagctatctatgacaaacccacagccaatatcatactgaatggacaaaaactggaagcattccctttgaaaactggcacaagacagggatgccctctctcaccactcctattcaacataatgttggaagttctggccagggcaatcaggcaggagaaggaaataaagggcattcaattaggaaaagaggaagtcaaattgtccatgtttgcagatgacatgattgtatatttagaaaaccccatcgtctcagcccaaaatctccttaagctgataagcaacttcagcaaagtctcaggatacaaaaacagtgtgcaaaaatcacaagcattcttatacaccaataacagacaaacagagagccaaatcatgagtgaactcccatccacaattgcttcaaagagaataaaatatccaggaatccaacttacaagggatatgaaggacctcttcaaggagaactacaaaccactgctcaatgaaataaaagaggatacaaacaaagggaagaacattccatgctcatgggtaggaagaatcaatatcgtgaaaatggccatactgcccaaggttcatgggtacatgagctggtttgttacacaggtaaattacatgtcactggggtttggtgtacagattgtttcaccactcagaaccaacaacaaaaaccacatgattatgtcaatagatgcagaaaaggcctttgacaaaattcaacagcccttcatgctaaaacctctcaaaccagaaaataaaatacctaggaatccaacttacaagggatgtgaaggacccttcaaggagaactacgaaccactgctcaatgacataaaagaggatacaaacaaatggaagaacattccatgctcatgggtaggaagaatcaatatcatgaaaatggccatactgcccaagctgcatagcacggccgtctatgtggatgcatcacggcttattcgaccaccctcctatacatgtgcattcgggttattgccgatagtttgcacgtacagccaacgctgtgaaaaataa

SEQ ID NO: 5158 - DNA, 1035 bp, Homo sapiens
  SIMILAR (791)..(567): 721254mologous to Homo sapiens putative p150,accession number U93563,Smith-Waterman Score=272.
tcaggacccactgagtgtgggtaccccaaaaggctgtcccattgcccttttgcccttgccagcagagggcagctgccccacgcaatggggccaggggccgattgagctcccaagcaatgggtagcctgctcgatgttgacccacttctttgcattttctaacttctttagatgaatgtttaattaatttttcaagactatatgtttcatgcgtgtccgtgtgaagagaccaccaaacaggctttgtgtgagcaacatggctgtttatttcacctgggtgcaggcgggcctccactgtgagagttacccagagcatctgtgatggtcctgtaggcttccgaggcgattgggtggtgtcagactttagccgcttgaaggtgaggttaattaagttctgttgtggggtttgagggccagattctaatttttgaagttttttcctaatgtcaggagtggattgggtggtaaaatgcatattaagaataaggcggccttctggcccctctgtgtctagggtggtaaagcgtctaagggttgctgctaagcgggccatgacctgggctgggttttcgtcttcaccttgggtagtttctttaagcttgtcataattaacagccttgtaagctgcttttttaagcccttgggcagtatggtcattttcacgatattgattcttcctacccatgagcatggaatgttcttccatttgtttgtatcctcttttatttccttgagcagtggtttgtagttctccttgaagaggtccttcacatcccttgtaagttggattcctctggtagaattcggctgtgaatccatctggtcgtggactctttttggttggtaagctattgattattgccacaatttcagctcctgttattggtctattcagagattcaacttcttcctggtttagtttcatttcattcatttcatcttccattgctgataccctttcttccagttgatcgcatcggctcctgaggcttctgcattcttcacgtagttctcgagccttggttttcagctccat

SEQ ID NO: 5159 - DNA, 1200 bp, Homo sapiens
  SIMILAR (1)..(786): 761254mologous to Homo sapiens putative p150,accession number U93563,Smith-Waterman Score=982.
atggataaattcctcaacacatacactctcccaagactaaaccaggaagaagttgaatctctgaatagaccaattacaggatctgaaattgtggcaataatcaatagcttaccaactaaaaagagtccaggaccagatggattcacagctgaattctaccagaggtacaaggaggaactggtaccattccttctgaaactattccaatcaatagaaaaagaaggaatcctccctaactcattttatgaggccagcatcatcctgataccaaagccgggcagagacacaaccaaaaaagagaattttagaccaatatccttgatgaacattgatgcaaaaatcctcaataaaatactggccaaccgaatccagcagcacatcaaaaagcttatccaccacgatcaagtgggcttcatccctgggatgcaaggctggttcaacatacgcaaatcaataaatgtaatccagcatataaacagaaccaaagacaaaaaccacatgattatctcaatagatgcagaaaaggcctttgacaaaattcaacaactcttcgtgctaaaaactctcaataaattagcccaaaatctccttaagctgataagcaacttcagcaaagtctcaggatacaaaatcaatgtacaaaaatcacaagcattcttatacaccaataacagacaaacagagagccaaatcatgagtgaattcccattcacaattgcttcaaagagaataaaatacttaggaatccagcttacaagggacgtgaaggacctcttcaaggagaactacaaaccactgctcaatgaaataaaagaggatacaaacaaatggaagaacattccatgctcatgggtaggaagaatcaatatcgtgaaaatggccatactgcccaagccttttgctgaaggagctaagcctggagtccgtggggtcacggtcagtgtcatttctctttctcatactgcctcctccggccttgctggctgctgtccctggcctgctgctgtcctggggaagcaggggaaggaagtgcttgggacgagagaatgtaaacatcgacagaaacagcagccctatgaccacataagtactttcccatcagatggagacctttcagcagtggggtactccaatgttggtatcatctgggatcatgcacaagaagtcagcatgaagcaggtggtaaccaccttcaactag

SEQ ID NO: 5160 - DNA, 1023 bp, Homo sapiens
  SIMILAR (533)..(453): 1001254mologous to Homo sapiens putative p150,accession number U93570,Smith-Waterman Score=151.
tcatgtgtcttttggctgcataaatatcttcttttgagaagtgtcgttcatatcctttgcccactttttgatggggttgtttgattttttcttgtaaatttgtttgagttcattgtagattctggatattagccctttgtcagatgagtagattgcaaaaattttctcccattctgtaggttgcctgttcactctgatggtagtttctttggctgtgcagaagctctttagtttaattatatcccatttgtcaattttggcttttgttgccattgcttttggtgttttagacgtgaagtccttgtccatgcctatgtcctgaatggtattgcctaggttttcttctagggtttttatggttttaggtctaacatttaagtctttaatccatcttgaattaatttttgtataaggtgtaaggaaggggtccagtttcagctttctacatatggcttgggcagtatggccattttcactatattgattcttcctacccatgagcatggaatgttcttccatttgtttgtatcctcttatttccttgagcagtggtttgtagttttccttgaagaggtccttcacatcccttgtaagttggattcccaggtattttattctctttgaagcaattgtgaatgggagttcactcatgatttggctctctgtttgtctgttattggtgtataagaatgcttgtgatttttgcacattgattttgtatcctgagactttgctgaagttgcttatcagcttaaggagatttggggctgagatgatggggtcttctagatacacaatcatgtcatctgcaaacagggacaatttgacttcctcttttcctacttgaataacctttatttccttctcttgcctgattgccctggccagaacttccaacactatgttgaataggagtagtgagagagggcatccctgtcttatgccagttttcaaagggaatgcttccagtttttgcccattcagtatgatattggctgtgggtttgtcataaatagctcccat

SEQ ID NO: 5161 - DNA, 1053 bp, Homo sapiens
  SIMILAR (466)..(768): 941254mologous to Homo sapiens putative p150,accession number U93563,Smith-Waterman Score=490.
atgaaggtggaaataaagacattctttgaaaccaatgagaacaaagacacaacataccagaatctctgggacacattcaaagcagtgtgtagagggaaatttatagccctaaatgcccacaagagaaagcaggaaagatctaaaattgacaccctaacatcacaattaaaagaactagaaaagcaagagcaaacacattcaaaagctagcagaagacaaatacaaactaccatcggagaatactataaacacctctacacaaataaactagaaaatctagaagaaatggataaattcctggacacatacacccttccaagactaaaccaggaagaaggtgaatccctgaagagaccaatggcaggttctgaaattgaggcaataattaatagcctaccaaccaaaaacagtccaggaccagacagattcacagctgaattctaccagaggtacaaagaggagctgctgataagcaacttcagcaaagtctcaggatacaaaatcaatgggaaaaaatcacaagcattcctatacatcaataacagacaaacagagagccaaatcatgagtgaactcccattcacaattgcttcaaagagaataaaatacctaggaatccaacttacaagggatgtgaaggacctcttcaaggagaactacaaaccactgctcagcgaaataaaagaggacacaaacaaatggaagaacattccatgctcatggataggaagaaccaatattgtgaaaatggccatactgcccaaggtttgggtgaatcttctacggcaaagagatcggcaaattatcaaaccagacaatgtcaagataggtgacccatcttcaggctctgctgaaggctacctgtctattggcacaggcggtgttatcacaatccaactggatctcaacgcaactgcctttgaaatctcttccaaagaagataccggaacttgccctttaggaatcccttacacagcagtgtctacagctttaaaaaggcaactctgcacaagcctggaggagcaggcttctggcttggctacagagatgtga

SEQ ID NO: 5162 - DNA, 873 bp, Homo sapiens
  SIMILAR (413)..(237): 931254mologous to Homo sapiens putative p150,accession number U93572,Smith-Waterman Score=289.
ctaccattctgtaggtttcctgttcactctgatggtagtttcttttgctgtgcagaagctctttagtttaattagatcccatttgtcaattttggcttttgttgccattgcttttggtgttttagacatgaagtccttgcccatgcctatgtcctgaatggtaatgtctaggttttcttctagggtttttatggttttaggtctaacatttaagtctttaatccatcttgaattaatctttgtataagcttgggcagtatggccattttcacgatattgattcttcctctccatgagcatggaatgttcttccatttgtttgtgtcctcttttatttcgtgaagcagtggtttgtagttctccttgaagaggtccttcacatcccttgtaagttggattcctaggtattttattgtttattgatttgtgtatgttgaaccagccttgcattccagggatgaagcccacttgatcatggtggataagctttttgatgtgctgctggattcggtttgccagtattttactgaggatttttgcatcaatgttcatcagggctattggtctaaagttcttcttttttgttgtgtctctgccaggctttggtatcaggatgatgctggcctcataaaatgagttagagaggattccttctttttctattgattggaatagtttcagaaggaatggtaccagctcctccttgtacctctggtagaattcggctgtgaatccatctggtcctggactttttttggttggtaagctattaattattgcctcaatttcagagcctgttattggtctattcagggattcaacttcttcctggtttagtcttgggagggtgtatgtgtccaggaatttatccat

SEQ ID NO: 5163 - DNA, 1260 bp, Homo sapiens
  SIMILAR (954)..(484): 891254mologous to Homo sapiens putative p150,accession number U93563,Smith-Waterman Score=712.
ttatgccctgattttttccctctcctcctcctcctcctcctcttcctcctcctcctcctcctcttcctcctcctcctcctccttcctctttgctgggtcctttacttcatcatggcaagcagcccaggtcttggggagtagggagcttttgcctctctttgagcttctggacttagatttctgacagctgcctttcccctgctgttctcgtgatagtgaataagtctcacgagatctgatgcgtttatcgggggtttccgcttttgcttcgtctctcattttctcttgctgccgcgatgtacgaagttccttttgcctgccgcgatgattttgaggcctccccagccatgtgaaactgtaagtccaattaaacccgtttttcttcccagtctcgggtatgtctttatcagcagcatgaaaacggactaatacagtaagttggtaccagtagagtggggtgttcctgaaaagatacctgaaaatgtggaagcgactttggaacttgggtagtatggccattttcacgatattgattcttcctatccatgggcatggaatgttcttccatttgtttgtgtcctcttttatttcgttgagcagtggtttgtagttctccttgaagaggtccttcacatctcttgtaagttggattcctaggtattttattctctttgaagcaattgtgaatgggaagtcatgcatgatttggctctctgtttgtctgttgttggtgtataagaatgcttgtgatttttgcacattgattttgtatcctgagactttgctgaagttgcttatcagcttaaggagattttgggctgagacgatggggttttctaaatatacagtcacgtcatctgcaaacagggacaatttgacttcctcttttcttaattgaataccctttatttctttctcctgcctgattaccctggctagaacttctaacagtagttctcgtgccatgtttttcagctctgtcaggtcatttaaggtcttctgtatgctgtttactccagttagccattcttctaatcttctttcaaggttttcagcttccttgcgatgggtttgaacatcctcctttagcttggagaagtttgttattactgatcttctgaagcatatttctgtcaacttgtgaaagtcattctccatccagctttgttccgttgctggcgaggagctgcaatcctttggaggataagaggggttctggtttttagaattttcagcttttctattgtggtttctccccat

SEQ ID NO: 5164 - DNA, 411 bp, Homo sapiens
  SIMILAR (272)..(183): 861254mologous to Homo sapiens Human secreted protein, SEQ ID NO: 7284,accession number G03203,Smith-Waterman Score=149.
tcaaacagttctggaggacagaagtccaagagcaaggtggattttttgaggatgatgagggaccatctgttccattcctatccctagtttctggtggttttctagcaatctttcgcattcctttgtttgtagatctccaccttcatcttctcctggtggtctccctatgtgcacgtgtgtgtccaaattcccttgggcagtatggccattttcacgatattgattcttcctatccatgagcatggaatgttctcccatttgtttgtatcctcttatttcattgagcagtggtttgtagttctccttgaagaggtccttcacatcccttgtaagttggattcctaggtattttattcttattgtctctatttcttcttgggtcattgctccgatttcaactttattcttcat

SEQ ID NO: 5165 - DNA, 824 bp, Homo sapiens
  SIMILAR (824)..(201): 981254mologous to Homo sapiens putative p150,accession number U93572,Smith-Waterman Score=1022.
ctgggatctttgaggctgctgaccttcggatgggatttttgtggggtcttttgttgttgatgttgtttctttctttttgtttgtttttctttgacacagtcaagcccctcttcaattgggctgctgcagtttgctgggggaccactgcagaccttatttgcctcagtccctcctttacctggaggtgtcaccagtgattgcttgggcagtatggccattttcacgatattgattcttcctacccatgagcgtggaatgttcttccatttgtttgtatcctcttttatttccttgagcagtggtttgtagttctccttgaagaggtccttcacatcccttgtaagttggattcctaggtattttattctctttgaagcaattgtgaatgggagttcactcatgatttggctctctgtttgtctgttgttgatgtataagaatgcttgtgatttttgcacattgattttgtatcctgagactttgctgaagttgcttatcagcttaaggagattttgggctgagacgatggggttttctagatatacaatcatgtcatctgcaaacaaggacaatttgacttcctcttttcctaattgaatgccctttatttccttctcctgcctgattgccctggccagaacttccaacactatgttgaataggagtggtgagagagggcatccctgtcttgtgccagttttcaaagggaatgcttccagtttttgtccattcagtatgatattggctgtgggtttgtcatagatagctcttattattttgagatatgtcccatcaatacctaaattattgagagtttttagcat

SEQ ID NO: 5166 - DNA, 987 bp, Homo sapiens
  SIMILAR (987)..(628): 891254mologous to Homo sapiens 08-APR-1996 ATM mutant G9170C coding sequence,accession number T68784_cd1,Smith-Waterman Score= 558.
tcattcagcagtggaagcagctagattagtttttctgagaaaaggcccatgatttcgcgcgcttggcttccatccatgccataaagactcttctgtagatgagctaattgcacaagcactagggtggccaagagcatgttggctggccctcagtgccaaagtcaccttatacatctggttgtttaatgtctcttctgtagtggatgctctcttgggcagtatggccattttcacgatattgattcttcctatccatgagcatggaatgttcttccatttgtttgtatcctcttttatttcgttgagcagtggtttgtagttctccttgaagaggtccttcacatcccttgtaagttggattcccaggtattttattctctttgaagcaattgtgaatgggagttcactcatgatttggctctctgtttgtctggtattggtgtataagaatgcttctgaattttggacattgattttggatcctgagactttgctgaagttgcttatcaactgggtatcagcagcggtgtctgcagaaccacggattttcatgaaccgcgaatgctgctgtctgatcgttcctctggaagttttgtcacaattattttctgtgtttttgtccttttcatctttgaaatgcctgtgaagtccacttgtccatgatgctttacaccaagctttccatcctgggaaaagtcggctgagatttttggggtctatggcctgctgtatgagcaaattcacttgtccaccaacactgagcacagtgccttcttccactcctttcagtttctcttgtagtctcattaagacacgttcagctactttgttgaaactctggtcaatatcactgagatttcgtttgcattcttggtcatctgcattcagagtagggtgaagctcagtttcatcttccggcctctgctgtaaatacaaagctttcaaaggattcatggtccagtcaaagagtggatcatatagaaggac

SEQ ID NO: 5167 - DNA, 669 bp, Homo sapiens
  SIMILAR (313)..(666): 781254mologous to Homo sapiens putative p150,accession number U93563,Smith-Waterman Score=473.
atggataaattcctcaacacatataccctcccaagactaaaccaggaagaatttgaatctctgaatagacaaataacaggctctgaaattgtggcaatgatcaatagcttatcaaccaaaaagagtccaggaccagatggattcacagccgaattctaccaaagacaaacagagagccaaatcatgagtgaactcccattcacaattgcttcaaagagaataaaatacctaggaatccaacttacaagggatatgaaggacctcttcaaggagaactacaaaccactgctcaatgaaataaaagaggatacaaacaaatggaagaacattccatgctcatgggtacgaagaatcaatatcgtgaaaatggccatactgcccaagacaaaatttaattcaagatggattaaagacttaaatgttagacctaaaaccataaaaaccctagaagaaaacctaggcaataccattcaggacataggcatgggcagggacttcatgtctaaaacaccaaaagcaatggcaacaaaagccaaaattgacaaatgggatctaattaaactaaagagcttctgcacagcaaaagaaactaccatcagagtgaacaggcaacctacaaaatgggagaaaattttcgcaacctactcatctgacaaagggctaatatga

SEQ ID NO: 5168 - DNA, 1992 bp, Homo sapiens
  SIMILAR (1690)..(1959): 951254mologous to Cloning vector pSacBII SacB,accession number U09128,Smith-Waterman Score=453.
atggcagattataaaaaccagatgagccagcagatagccgctgtatggggcacctttaagaacctgggaaaattcgactactggcatgcatgcacgttgactctagaggatcccctacttcagtgtattgcgaaatgcaaagcgtttgaaaaagtagtgatggatgatgagaacgacagcgagagtcgctgcgtgtactgctgcagccccattgcaagcccacgagagccaaatatgagtgaactcccattcacaattgcttcaaagagaataaaatacttaggaatccaacttacaaggaatgtgaaggacctcttcaaggagaactacaaaccactgctcagcaaaataaaagaggacacaaacaaatggaagaacattccatgctcatggataggaagaatcaatatcgtgaaaatggccacactgcccaaggtatttattcgcgataagctcatggagcggcgtaaccgtcgcacaggaaggacagagaaagcgcggatctgggaagtgacggacagaacggtcaggacctggattggggaggcggttgccgccgctgctgctgaccgtgtgacgttctctgttccggtcacaccacatacgttccgccattcctatgcgatgcacatgctgtatgccgatcccaaccttagctcagccccaaaagaagaccgcagacagtttggagcaccccaagttcagaggaacattgagacactggaaaccttccagaaaggagccacaaagctgagttgcaggctgcgagggctgagcagtggagagagggtcaacagcattaaaccactgaacaaaggccataaataccttgtattcgaagccaacacgggaacagaaaacggataccaaggcgaagaatctttatttaacaaagcgtactacggcggcggcacgaacttcttccgtaaagaaagccagaagcttcagcagagcgctaaaaaacgcgatgctgagttagcgaacggcgccctcggtatcatagagttaaataatgattacacattgaaaaaagtaatgaagccgctgatcacttcaaacacgctgctccaagtaacaatcctgttagtggaccagaaagctgctttctctcagaccattgatttcaaagctggaaaacagcagccccattgcaagcccacggtgcagacattcagcaggatccagacagcctctgctctagaaggctcagcagagaagtgtgacaatctaaaaacttgtcacacttcacatggatctgtcatggcggaaacagcggttatcaatcacaagaaacgtaaaaatagcccgcgaatcgtccagtcaaacgacctcactgaggcggcatatagtctctcccgggatcaaaaacgtatgctgtatctgttcgttgaccagatcagaaaatctgatggcaccctacaggaacatgacggtatctgcgagatccatgttgctaaatatgctgaaatattcggattgacctctgcggaagccacgaattttctggaagccctgccgaggctacccccaccccatgaacgcatccaatgcttttgggaacctgtgctaatctgtcgggtttctgcatatctctttgcccaaccaaagggaccccagaccctgccacctttgtccggaagagctggcctcggagggacagagactctgagcctgcgtcccaggaagaaagtcacaggaggagcgactcaagccttcgcgaaagaaaataaccaaaaagcatacaaagaaacgtacggcgtctctcatattacacgccatgatatgctgcagatccctaaacagcagcaaaacgaaaaataccaagtgcctcaattcgatcaatcaacgattaaaaatattgagtctgcaaaaggacttgatgtgtgggacagctggccgctgcaaaacgctgacggaacagtagctgaatacaacggctatcacccagtagtgctcgccgcagttgagcgacagggcgaagccctcgagtga

SEQ ID NO: 5169 - DNA, 1488 bp, Homo sapiens
  SIMILAR (595)..(996): 971254mologous to Tn10 delivery vector pHV1248 transposase,accession number AF307747,Smith-Waterman Score=683.
atgtccgcgccattgctggtgttacctgaaagtggcggcgcgtggctaaaaacctgttatgacgcgcaaaacgatgccatgctggatgacgattccacgttgcaaaaagcccgtacgaaattccttcaggcttacgaaggcaacatgatggtgcgtggcgaaggtgatgatatctgtcatggacctgcaggcacgaaagctttttaccgcgttgccagtacccacaatgacgaagtaagccagcagaatgtagaacagccccagctgcggcatcacatctttaaagaatgggaccaccagctgcgttgcgggcgtgtctttgccggcaaggtacagggcgaaggcgacacccagcgcaatgaccgacatccagaaatacttccaacgagcgatcaaccctttggtgtctttacgcaccactttgcgataatcatcaacaaagccaataacaccgtaacctaccagcaccaccaacacgcaccagacgtacggattggacgggctggtgtccccacaacgggacccatggaccacacagttcagggtttcagccgcacaaccggagtgggctacgtgttaataagggggcaggccaaaatcctattgtataaatctcgctctaaaggccgaaaaaatcagcgctcgacacggactcattgtcaccacccgtcacctaaaatctactcagcgtcggcaaaggagccatgggttctagcaactaacttacctgttgaaattcgaacacccaaacaacttgttaatatctattcgaagcgaatgcagattgaagaaaccttccgagacttgaaaagtcctgcctacggactaggcctacgccatagccgaacgagcagctcagagcgttttgatatcatgctgctaatcgccctgatgcttcaactaacatgttggcttgcgggcgttcatgctcagaaacaaggttgggacaagcacttccaggctaacacagtcagaaatcgaaacatggaaatgaccgatattctcagcggtgcaattgtcgcggcgattgccatcgcagcagggatggtcgccgtatggtgcttaccacgtatgcacgcgatgatgcatcaaatgggaaatccggtgctcgtgctgggtattggcggatttattctcggtattctgggggttattggtggaccagtttcgctgtttaaagggctggatgagatgcagcagatggtggcaaatcaggtttcagcaccagcgattactttttgctggcgtggttttcgcggtgggcgaatcttcctggcagtgtttgtcggcgtggcattagggttgatgctgcatgagcacgttcccgccgtaccagcggcaataaccgtttcttgcgctattctcggcatcgtgctggtggtaacacgcgatggctggttaagtctttttatggcggcagtcgttgtacccaataccacattgtaccgctgctctgtatcgtcatgcttccggcatggctgttattag

SEQ ID NO: 5170 - DNA, 1209 bp, Homo sapiens
  SIMILAR (1209)..(529): 921254mologous to Homo sapiens putative p150,accession number U93564,Smith-Waterman Score=1076.
tcattggccatgatggcgggtctctgtctctttctcgcttcccctcttttcctcttggttgtcccggatgagctccctctgggctaccagactgcctgagctaggtgctgcaaagtcccatggccagtgccagtgagaggtgaagctggctgggcttctgggatgggtggggtcttggagaacttttctgtctagccgcgccagcagcagtaacttgttcaggtcttcttccacgcagtggtagctttgttgttttgctcttcgcaataaatcttgctgctgctcactttttgggtctgcgctgcctttatgagctgtaacattcactgtgaaggtctgaagcttcactcctgaagccagcaacagcaggaacgcactgggagggacgaataactccggctgggaggaacgaacaactccagacgtgctgcgtttaagagctgtaacactcactgcgaaggtctgcagcttcactcccaaaccatagctcagtgaaggatgagggtcatatgatgaggaacacagccacatcttgggcagtatggccattttcatgatattgattcttcctatccatgagcatggaatgttcttccatttgtttgtgtcttcttttatttcgttgagcagtggcttgtagttctccttgaagaggtccttcacatcccttgtaagtcggattcctaggtattttactctctttgaagcaattgtgaatgggagttcactcatgatttggctctctgtttgtctgttattggtgtataagaatgcttgtgatttttgcacattgattttgtatcctgagactttgctgaagttgcttatcagcttaaggagatttggggctgagatgatggggttttctaaatatacaatcatgtcatctgcaaatagggacaatttgacttcctcttttcctaattgaataccctttatttctttttcctgcccgattgccctggccagaacttccaacactatgttgaataggatttgtgagagagggcatccctgtcttgtgccagttttcaaagggaatgcttccagtttttgcccattcagtatgatattggctgtgggtttgtcataaatagcacttattattttgagatatgtcccatcgatactgaatttatttagagtttttagcatgaagggctgttgaactttgtcaaaggccttttctgtatctattgagataatcat

SEQ ID NO: 5171 - DNA, 680 bp, Homo sapiens
  SIMILAR (432)..(124): 921254mologous to Homo sapiens putative p150,accession number U93563,Smith-Waterman Score=488.
cctgtggagtgtacttttcgttttcaatacatctctgcttttgtggcttcattgcttcattgctttgtttctgtgttttgtccaattctttgttcaaaacgccaggaacctggacaccctcgtccggtaacacttgggcagtatggccattttcacaatattggttcttcctatccatgagcatggaatgttcttccatttgtttgtgtcctcttttatttcgctgagcagtggtttgtagttctccttgaagaggtccttcacatcccttgtaagttggattcctaggtattttattctctttgaagcaattgtgaatgggagttcactcatgatttggctctctgtttgtctgttattgatgtataggaatgcttgtgattttttcccattgattttgtatcctgagactttgctgaagttgcttatcagcagctcctctttgtacctctggtagaattcagctgtgaatctgtctggtcctggactgtttttggttggtaggctattaattattgcctcaatttcagaacctgccattggtctcttcagggattcaccttcttcctggtttagtcttggaagggtgtatgtgtccaggaatttatccatttcttctagattttctagtttatttgtgtagaggtgtttatagtattctccgatggtagtttgtattt

SEQ ID NO: 5172 - DNA, 885 bp, Homo sapiens
  SIMILAR (885)..(445): 811254mologous to Homo sapiens p40,accession number U93564,Smith-Waterman Score=607.
ctaattatccattactgttcccagcgagtttatcttgatgctctcagtggattgcaaactcaggggatccaaagtgtgatgaggatatgcttcatcacagtaatgcaaagttgaaccttgggcagtatggccattttcatgatattgattcttcctatccacgagcatggaatgttcttccatttgtttgtgtcctcttttatttccttgagcagtggtttgtagttctccttgaagaggtccttcacatcccttgtaagttggattcctagctattttattctctttctctctggctgcccttaacattttttccttcatttcaactttggtgaatctgacaattatgtgtcttggagttgctcttctcgaggagtatctttgtggcgttctctgtatttcctgaatctgaatgttggcctgccttgctagattgggggagttctcctggataatatcctgcagagtgtttttcaacttggttccattctccccgtcattcatttcattcatctcatcttccatcgctgataccctttcttctaggtgatcgcatcggctcctgaggcttctgcatacttcacacagttctcgagccttggttttcagatccatcagctcctttaagcacttctctgtattggttattctaattatacattcttctaaatgtttttcaaagttttcaacttctttgcctttggtttgaatgtcctcccgtagctcggagtaatttgatcgtctgaagccttcttctctcagctcttcaaagtcattctccgtccagctttgttccgttgctggtgaggaactccgttcctttggaggaggagaggcgctctgcgtttcagagtttccagtttttctgctctgttttttccccat

SEQ ID NO: 5173 - DNA, 1583 bp, Homo sapiens
  SIMILAR (832)..(1323): 981254mologous to Escherichia coli K12 orf, hypothetical protein,accession number AE000327,Smith-Waterman Score=814.
tttggactggcaggactgctggttgcgaccttgctgtcggggatctttttgattctgatgggtctggcacgctttgtcgcctgattgagtatattccggtttccgtcaccttagtttcacctcgggtatcgggatcaccatcgggggatcctctagaatggggtgcgccacttaatattcgaatggggggaaaaatcccccgggttatacgaaatttgttcggcaacggctgccggaactctgggattaccccaggattcacccctctggatcatcggtgtattaacgctaacggccagggtcatgccggaccagaccccgcctgtgaaccgctgatcggcgcaccggttccgccctctgcgctacctggacttatcgtagcattaattctcggtcttgctggcggcgtcagcctggggccggaacatccgatcatgaccgtcaatatcgcccttgcggttgccattggcgctcgtctgttaccgcgcgtcaaccgaatggagtggactattttagcctctgccggaaccatcggcgcactgtttggcactcctgttgcggcggcgttgatattttcgcaaaccttaaatggcagtagtgaagttccgctatgggatcgtctctttgcgccgttaatggcggcagcagctggtgcacttactaccggattatttttccatcctcatttttcactgcccattgctcattacggacagatggaaatgaccgatattctcagcggtgcaattgtcgcggcgattgccatcgcagcagggattgttccgccgtatggtgcttcccacggttggcccgcgataatgcatcaaatgaaaaatcccggtgctcgtgctgggtatgggcggatttattctcggtattttgggggttattggtggaccagtttcgctgtttaaagggctggatgagatgcagcagatggtggcaaatcaggctttcagcaccagcgattactttttgctggcggtaattaaacttgccgccctggtcgttgctgccgccagtggctttcgcggtgggcgaatcttcccggcagtgtttgtcggcgtggcattagggttgatgctgcatgagcacgttcccgccgtaccagcggcaataaccgtttcttgcgctattctcggcatcgtgctggtggtaacacgcgatggctggttaagtctttttatggcggcagtcgttgtacccaataccacattgctaccgctgctctgtatcgtcatgcttccggcatggctgttattagcaggtaagccgatgatgatggtcaatcgtccgaagcaacagccaccccacgataacgtttagcaaaaaatgctctcctttatgatttaagagttatggcgatgatacggggctttacctccccgtaatattgcgttaacaggccgctgacggcttcgagcgtgaaggagaataacaatgttcaggtcactgtttctggcgtccgccctgatggcatttaccccgcttgcagcaaacgcaggtgaaatcgccctgctgccttcaatcaaattacaaattggcgatccccgggttccgagttgtaattggtttttacgaca

SEQ ID NO: 5174 - DNA, 1221 bp, Homo sapiens
  SIMILAR (268)..(732): 961254mologous to Homo sapiens putative p150,accession number U93563,Smith-Waterman Score=755.
atggacagtatgtctggagggggacagtataggaagattaatgggaatccaacatcagtgaagtgccctttgctgctgctgccagccattctgactccagagccggtgaataggtggagacaaagctgcaaagcatttgcacggcattctccgcttgctttcagagtgacaatttcaacaagcaccttttttgacggcttgctggtgacaggactatacacatctacaagtgttcaggcatcacagagcattggaggttccagtgctttcggatttgtgttggaagttctggccagggcaattaggcaggagaaggaaataaagggtattcaattaggaaaagaggaaatcaaattgtccctgtttgcaggcgacatgattgtatatctagaaaaccccattgtctcagcccaaaatctccttaagctgataagcaacttcagcaaagtctcaggatacaaaatcaatgtacaaaaatcacaagcattcttatacaccaacaacagacaaacagagagccaaatcatgagtgaactcccattcacaattgcttcaaagagaataaaatacctaggaatccaacttacaagggatgtgaaggacctcttcaaggagaactacaaaccactgctcaaggaaataaaagaggatacaaacaaatggaagaacattccatgctcatgggtaggaagaatcaatatcgtgaaaatggccatactgcccaaggtcttaaagatggtgtgtccggagtttgttctttctgatgttcggatgtgttcagagtttcttccttctggtgggttcgtggtcttgctggcttcaggagtgaaggtgcagaccttcgtggtgagtgttacagctcttaagctggcatgtttggagttgttcgttcttccagtccggagttgtccattcttcctgtccggagttgttcattcttcccggtgggctcctggtctcgctggcctcaggagtgaacctgcagacctttgcgggccggcggtgctggctggctgctccgagtgtggagcctgcagagactgtgcacacccagaacttgcactggcctgcgagcgcacagccctggttcccgcccgtgcctctccctccacacctccacgcaagcagagggagccggctccagccttggcaagcccagagaggggctcccacagtgcagtgtcaatttccccggagaagactcctcaacctcctttctga

SEQ ID NO: 5175 - DNA, 3321 bp, Homo sapiens
  SIMILAR (2102)..(2263): 831254mologous to Homo sapiens putative p150,accession number U93563,Smith-Waterman Score=242.
atgcttcaaagcaaccgaaccgccgccagccattcaccatccatccagccagccatccagccagccatccagccagccaaccaactatccatccacaatttgtggacacaattccggcattcaaccaaaattccagttgaatgggtgaatggtgaatggctgaatggacgaatgccaggggatcatcatgaatggcaatgcaactatcagccagccatccagccagccatccagccagccaaccaactatccatccacaatttgtggacacaattccggcattcaaccaaaattccagttgaatgggtgaatggtgaatggctgaatggacgaatgccaggggatcatcatgaatggcaatgcaactatcagactaatcatgttcacttatatgcatactcctctcctgatgaacgtacatgcatgcgccgccgtgtgtggggcgaagaaggaggtagttttataacatttcggcaaagcgacaaaaggtcttggcgccattcaccatccatccagccagccatccagccagccatccagccagccaaccaactatccatccacaatttgtggacacaattccggcattcaaccaaaattccagttgaatgggtgaatggtgaatggctgaatggacgaatgccaggggatcatcatgaatggcaatgcaactatcagccagccatccagccagccatccagccagccaaccaactatccatccacaatttgtggacacaattccggcattcaaccaaaattccagttgaatgggtgaatggtgaatggctgaatggacgaatgccaggggatcatcatgaatggcaatgcaactatcagccagccatccagccagccatccagccagccaaccaactatccatccacaatttgtggacacaattccggcattcaaccaaaattccagttgaatgggtgaatggtgaatggctgaatggacgaatgccaggggatcatcatgaatggcaatgcaactatcagagtaaaataattgtgtttagaaaccctctggggaccggcctagaagggttacgcaaggtggaacctcagaagatattggtgcgctctatgtgccaaatctccacaagccctctggtagatggcacacagctgataagcaacttcagcaaagtctcaggatacaaaatcaatgtgcaaaaatcacaagcattcttatacaccaataacagccaaccagagagccaaatcatgagtgaactcccattcacaattgcttcaaagagaataaaatacttaggaatccaaattacaagggacgtgaaggacctcttcaaggagaactacaaaccactgctcaatgaaataaaagaggatacaaacaaatggaagaacattccatgctcatgggtaggaagaatcaatatcgtgaaaatggccatactgcccaagaaacacaactcctcgccagcaaggaaacataactggacagagaatgagtttgacaaattgacagaagtaggctttagaaggtgggtaataacaaactccttcaagctaaaggagcatgttataacccaatggaaggaagctaagaacttggaaaaaaggttagaggaattgctgactagaataaccagtatagagaagaagataaatgacctgatggagctgaaaaccaaggctcgagaactacgtgaagaatgcagaagcctcaggagccgatgcaatcaactggaagaaagggtatcagtgatggaagatgaaatgaatgaaatgaagatcaacaaaattgatagaccgctagcaagactaataaagaaaaaaagagagaagaatcaaatagacgcaataaaaaatgataaaggggatatcaccaccaatcccacagaaatacaaactaccatcagagaatactacaaacacctctacgcaaataaactagaaaatctagaagaaatggatacattcctcgacacatacactctcccaagactaaacaaggaagaagttgaatctctgaatagaccaataacaggatctcaaattgtggcaataatcaatagcttaccaacgaaaaagagtccaggaccagatggattcacagccgaattctaccagaggtacaaggaggaactgggatgtgaaggacctcttcaaggagaactacaaaccactgctcaaggaaataaaagaggatacaaacaaatggaagaacattccatgctcatgggtaggaacaatcaatatcgtgaaaatggccatactgcccaagagtgtctgggggagaacactggaattcagcaaaaaagtgatgaagaccctttgaggcacagagactcaggatggcagcatagagaggaaagcaaagcaccagctcagattgactcagagccaagagagactcacactgtgagggaaaagcacgctttgaaaggattaaagcctgttatcactcgcctgttacagcatggcgttttaaagcctataaactccccttaccattcccccattttacctgtcctaaaaccagacaaggcttacaggttaattcaggatctgcgccttatcaaccaaattgttttgcctatccaccctgtagtgcccaacccgtacactcttttgtcctcaataccttcctccacaactaactgttccgttcttgatcttaaagatgcttttttcactattgccctgcacccctcgtcccaacctctctttgcttccacttggactaaccctgacacccatcagtcccagcagcttacctgggctgtgctgctgcaaggtttcagggacagccctcattacttcagccaagctctttctcatgatttagtttctttccacccctctgcttctcaccttattcaatatactgatgaccttcttctttgtagcccctcctttgaatcttctcaacaagacacacttctgctccttcagcatttactctccaaaggatttcagggtccaataggtcctgtatctccacatcctgggaccccaccaacatcccactacattcatccaaagggctaccgtgtcacaatcctagctcgatccagcagtgcagccatgactctggcacttcccacattgcatactacatacaatactacaggatggcttcactcaccagccatcgtggctgtccttaggcagctccagatatctcccccactggatgctgctactggcgaccgctacacagtattattgccacctcttctgatgagccctgaaaaagagaatctagagaggcttgggctcctgctgtcaagattcttaatccttctctcctggactaccttagatatggccgttggctttcctgtctga

SEQ ID NO: 5176 - DNA, 800 bp, Homo sapiens
  SIMILAR (1)..(63): 711254mologous to Homo sapiens Human secreted protein, SEQ ID NO: 7284,accession number G03203,Smith-Waterman Score=79.
atgaaggacctcttcaaggagaactacaaaccactgctcagcgaaaagaggacacaaacaaatggaagaacattccatgctcatggggataggaagaataaatatcgtgaaaatggccatactgcccaagcaaaagagacttcgcagcaattcaatcaagggttttgcgatggagagattatcctggattatctggtggcagtttctcatcaacattacaagaaacgacgttacttggacttactgtacgtcatttcgcttaaagttgcagtttctaagaacctaatgaggacattaattgagaatttactgcagttgcaactgaaaccctatggtccataaagctcaaaatatttactctctggacctttacagaaaaagtttgctgatgcctgtttccggttcattatccacggttgcacgcgatgatgcatcaaatgaaaaatccggtgctcgtgctgggtattggcggatttattctcggtattctgggggttattggtggaccagtttcgctgtttaaagggtcttgaaagctcttgggtctcatcgagactggaaagatctccctggaccaccctgttccaggcggtactcccacaaagatggcactttatgaacattttatgaacactaaggagtttggcatagagtagttgcccagtaaacacttgggcagtatggccattttcacgatatttattcttcctatccccatgagcatggaatgttcttccatttgtttgtgtcctcttttcgctgagcagtggtttgtagttctccttgaagaggtccttcat

SEQ ID NO: 5177 - DNA, 1689 bp, Homo sapiens
  SIMILAR (1152)..(190): 901254mologous to Homo sapiens putative p150,accession number U93572,Smith-Waterman Score=1460.
ttattttcttcttctttcttccttcttccttccttcttcttcctccttccttcctcctccttctcctccttctccttcttctccttctcctcctcctcctcccccctcctctctccctcctccctctcttttccctccttctcctcccttcttctccttctccttcttcttcttcttcttcttcttcttcttgggcagtatggccattttcacgatattgattcttcctacccatgagcatggaatgttcttccctttgtttgtatcctcttttatttcattgagcagtggtttgtagttctccttgaagaggtccttcatatcccttgtaagttggattcctggatattttattctctttgaagcaattgtggatgggagttcactcatgatttggctctctgtttgtctgttattggtgtataagaatgcttgtgatttttgcacactgtttttgtatcctgagactttgctgaagttgcttatcagcttaaggagattttgggctgagacgatggggttttctaaatatacaatcatgtcatctgcaaacatggacaatttgacttcctcttttcctaattgaatgccctttatttccttctcctgcctgattgccctggccagaacttccaacattatgttgaataggagtggtgagagagggcatccctgtcttgtgccagttttcaaagggaatgcttccagtttgtgcccattcagtatgatgctggctgtggggtggtcataaatatctcctattattctgagatacgttccattaatacctagtttattcagagtttttagcatgaaggggtgttgaattttgttgaaggccttttctgcatctattgagataatcatgtgatttttgtcattggttctgtttatgtggtggattacgtttattgatttgcatatgttgaaccagcgttgcatcccagggatgaagcagacttgatcgtggtggataagctttttgatatgcttctggattcggttttccagtattttattgaggattttcgcattgatgtccatcagggatattggcctgtaatttcctttttttgttgtgtctctgccaggttttggtatcaggatgatgccagcctcataaaatgagttagggaggattccctctttttctctgatagaatctggttgtgactttgtctggtcctggacttttttggttggtaagctattaattacttcctcaatttcactacttgttattggtctattcagagattcgacttcctcctggtttagacttaggagggtgtatgtttccaggaatttatcaatttcttctagattttctagtttatttgtgtagaagtgtttatagtattctcttatggtagtttttattttttgggcagtatggccattttcacgatattgattcttcctatccatgagcatggaatgtttttccatttgtttgtgtcctttcttatttccttgagcagtggtttgtagttctccttgaagaggtccttcacatcccttgtaagctgtattcttaggtattttattctctttgtagcaattgcaaatgggagttcgctcatgttttggctctctgtttgttattggtgtataggagtgcttgtgatttttgcacattgatttttcatcctgagaccttgctgaaggtctgctactccttctgtacat

SEQ ID NO: 5178 - DNA, 2184 bp, Homo sapiens
  SIMILAR (557)..(381): 891254mologous to Homo sapiens putative p150,accession number U93569,Smith-Waterman Score=274.
ctatgcttgtccaatctctggtacaggctggataagctctccctggtgttttagaggaagagctagtaaataaccagcatttggtggagtaaggggatcctgtgttttggagcaattgctgagctttttctcataacaggaaatcaggatggcagtgtgctgtgggttttctgacaacaagacttggtagtttagcagtctgttgtcagtgatccattgcggtctttttatatccaataaggggcctattagttggaatgtcaggagcctgaccgactgtcccattgtgattttgagggcctccttgggtaaaagggctgctgcagccactacctttaggcagtgtggccacccttgcactactgggtctaggttctttaaaaagtaaccttgggcagtatggccattttcacgatattgattcttcctatccatgagcatggaatgttcttctatttgtttgtgtcctcttttatttcgttgagcagtggtttgtagttctccttgaagaggtccttcacaacccttgtaagttggattcctaggtattttattctcagctcctctttgtacctctggtagaattcggctgtgaatctgtctggtcctggactgttttttggttggtaaactattgattattgccacaatttcagagcctgttattggtcgattcagagattcaacttcttcctggtttagtcttgggagagtgtatgtgtcgaggaatgtatccatttcttctagattttctagtttatttgcatagaggtgtttgtagtattctctgatggtagtttgtatttctgtgggatcggtggtgatatcccctttatcattttttattgtgtctatttgattcttctctctttttttctttattagtcttgctagcggtctatcaattttgttgatcctttcaaaaaaccagctcctggattcattgattttttgaagggttttttgtgtctctatttccttcagttctgctctgattttagttatttcttgccttctgctagcttttgaatgtgtttgctcttgcttttctagttcttttaattgtgatgttagggtgtcaattttggatctttcctgctttctcttgtaggcatttagtgctataaatttccctctacacactgctttagctgtgtcccagagattctggtacattgtgtgtttgttctcattggcttcaaagaacatctttatttctgccttcatttcattatttacccagtagccattcaggaccacgttgttcagtttccatgtagttgtgcgattctggatgagtttcttaatcctcagttctagtttgattgcacttctgaggcctacttctgtcaactcagcaaagtcattctccatccagctttgttctgttggctggcgaggagctgcgatcctgggattcgtgtgaaagtccacctgagggtctgccaaagggggggggaccccaaccaagggaaagtcaaagccaaagatgatgaaacctgaacaacgaaaatgccacacttgggcagtatggcgattttcacgatattgattcttcctacccatgagcatggaatgttcttccatttgtttgtatcctcttatttcattgagcagtgatttgtagttctccttgaagaggtccttcacatcccttgtaagttggattcctaggtatttaattctcttgaattccctgtctgaaatgccatgtatcactgtcactctgggattggtcacaggtgccttatttagttcatttggggagactgttttcctagatgttcttgatgtttgtggatgtttgttgttgtttccttcagtgctcatttctactggccttcctccctcctggaccatccgatagtccctgaaggggactgtttcaagcccaagatttgaggcctgttccatcaggaccaaaacctcatccattatgctatttacagggtttattaaccacatactcctatgtattcttcgatcaacactaatattcagactatgcggttgttccagcatgagccacttcttcctgcttacttccatgaacgggcaggtagcaaaagtatgaaagccagtaggctcattttggtagcaaaagcagcaggagccaatggcccaaccccaggaagtccatgaattattctctacgtttaactccataacagcatccaccgtcat

SEQ ID NO: 5179 - DNA, 2480 bp, Homo sapiens
  SIMILAR (1195)..(434): 881254mologous to Homo sapiens putative p150,accession number U93572,Smith-Waterman Score=1242.
tcagctattgatacttgtgtatgcttcacgaagttctcgtgctgtgtttttcagttccatcaggtcacttttctttttctctaaactagctattctagttggcagttcctgtaaccttttatcaaggttcttagcttccttgcacaagcctgagcatcccaggtcgacttcagacagctgtgctggcagcaagaatttcaagccagtgggtcttagcttgctgggctccatggaagtgggatccactgagcaagaccacttggctcctggcttcagctccctttccaggagagtgaatggttctgtctctctggagttccaggtgccactgttgtttcctgactttttaatgatcgccattctaactggtgtgagatggtatctcattgtggttttgatttgcatttctctgatggccagtgatgatgagcatttttttcatgtgtctgttggctgcataaatgtcttcttttgagaagtgtctgttcatatcctttgcccactttctgatggggttgtttgtttttttcttgtaagtttctttgagttctttgtagattctggatattagccatttgtcagatgagtagattgcaaaaatgttctcccattctttaggttgcctgttcactctgatggtagtttcttttgctgtgcagaagctctttagtttaattagatcccatttgtcaattttggcttttgttgccattgcttttggtgttttagacatgaagtccttgcccatgcctatgtcctgaatggtattgcctaggttttcttctagggtttttatggttttaggtcttacgtttaagtctttaatccatcttgaattaatttttgtataaggtgtaaggaagggatccagtttcagctttctacatatgtctagccagctttcccagcaccatttattaaatagggaatgctttccccatttcttgtttttgtcaggtttgtcaaagatcagatggttgtagatgtgtggtattatttctgagggctctgttctgttccattggtttatatctctgtgttgataccagtaccatgctgttttggttagtgtagccttgtagtatagtttgaagtcaggtagcgtgatgcctccagctttgttcttttggcttaggattgacttggtgatgcgggctcttttttggttccatatgaactttaaagtagcttttttccaattcttgggcagtatggccattttcacgatattgattcttcctacccatgagcatggaatgttcttccatttgtttgtatcctcttttatttcgttgagcagtggtttgtagttctccttgaagaggtccttcacatcccttgtaagttggattcctaggtattttattctctttgaagcaattgtgagtgggagtgcactcatgatttggctctctgtttgtctgttgatggtgtataagaatgcttgtagattcttgtacattgattttgtatcctgagactttgctgaagttgcttatcagctgaaggagattttgggctgagacaatggggttttctagatatacaatcatgtcatctgcaaacagggacaatttgacttcctcttttcctaattgaataccctttatttccttctcctgcctaattgccctggctagaacttccaacactatgttgaataggagtggtgagagagggcatccctgtcttgtgccagttttcaaagggaatgcttccagtttttgcccattcagtatgatattggctgtgggtttgtcatagatagctcttattattttgagatacgtcccatcaatacctaatttattgagagtttttagcatgaagggctgttgaattttgtcaaaggccttttctgcatctattgagataatcatgtggtttttgtctttggttctgtttatatgctggattacattgattgatttgcatatattgaaccagccttgcatcccagggatgaagcccactcgatcatggtggataagctttttgatgcgctgctggattcggtttgccagtattttattgaggatttttgcatcaatgttcatcaaggatattggtctaaaattctcttttttggttgtgtctctgtccagctttggtatcaggatgatgctggcctcataaaacgagttagggaggatttcctctttttctattgattggaatagtttcagaaggaatggtaccagttccgccttgtacctctggtagaattcggctgtgaatccatctggtcctggactctttttgcttggtaagctattgattattgccacaatttcagatcctgttattggtctattcagagattcaaattcttcctggtttagtctgttttggttactgcagcctatactacaaggaagatctgatggtttcataagaggctcttcccccttcgctctgctcttcccttctttaagctgccatgcgaagaaggtctttgctttcccttcatcttctgccat

SEQ ID NO: 5180 - DNA, 508 bp, Homo sapiens
  SIMILAR (436)..(299): 341254mologous to Homo sapiens Human secreted protein, SEQ ID NO: 5165,accession number G01084,Smith-Waterman Score=80.
atgcagagcgcaatggctctagacaaggggtgggcgctggggctggggaccatgaagtgttgcagttattaccagacaagtggaaacagaagattctgtgtccagtccagctcctgcgtggggcctggagcaactactactcccctgatgctaataggcagccttaagtgcaaggaaatgctcacttgtttgcagaatgttggccccatggagaagactcacaaccaactgtgcctacttctcagggaagaatgctggcggggccagcacggcatcttcctcatccccatgtccccagcccatccggttcactgcgaggctcagactcggaggacacgcattgagggactgtggcaggatctggctgtctccactgtcttgctccaggccacctccaccctggctggcccccctccagggtactgcctatcccagataggtcagtgcaccagggacccggccgcaaagcaccgccgacccctcccagagtgacgcccttgttcactga

SEQ ID NO: 5181 - DNA, 1052 bp, Homo sapiens
  SIMILAR (1037)..(219): 641254mologous to Homo sapiens Human signal peptide containing protein HSPP-92 SEQ ID NO:92,accession number Y87315,Smith-Waterman Score=785.
ctgggtttggggacctccaggggactgctacccatcctgaaaaagttatcagaatggtttgaggaagaggagctggaagacctggcttccgccagcccctgctgggaaggcaagcggtcctctgagggttgtggccggttccagaggacactctgtggagaggatgagtggctcttcctccaagctgcctgagttggcgctcctgctgggaccagctccacggcctcataggtgaagctcccagtggctcctggggaactctccatgaccagggagaagtcgctgccaaggctggtggtgctgccacggtcctttcgtctcagcatgcagatgtcttccagggtgaagcctccatcccgggctggcaaactcttcctcccgaagaggaaccagtcataggccacagtgaggtagaggatctcagtgggcttcagggacgtgtggatgagcccatcctggctctgttcttgggccttcttggttccataagccaatgcatttccacttgtttgagcaagtgcacctcctacagaagtcctgattgctaccagggatttagagtccgtctgcccatcactgttaactaaggaaagcagcagcttcaggtagttttgtgtttgttgcaccagatcccaacactgatactggctccagtcaatgttcagagagtgagtcaggaagtcggggatgctcaatggggcatcaacgtagtctccagcatcattatcatcatcatcatcatcaccatcatcaacatcatcaccaccatcatcatcatctggatacgggatggagaggagagtgaagtcggcatagcgctgggctttgtccaccttctcagaggaggttacattcatgccaaacttcaccttcttgttctccaccatcaggtcacagatgtatttgactgacaggtatcgaagcagcttgatgtcatagcctctgaccttatcaaaaagatgcgtgtcaccacttcgaagagcacagtcctcctccgtgacgtcctccacatctgcccaggcatcatctgcacccccaaccttcttccccat

SEQ ID NO: 5182 - DNA, 2559 bp, Homo sapiens
  SIMILAR (2559)..(1102): 881254mologous to Homo sapiens Human signal peptide containing protein HSPP-92 SEQ ID NO:92,accession number Y87315,Smith-Waterman Score=2174.
ctagcctagatccatcgcggccgccgccgctgccgcccttctgccgcagcccggcgctttgccccgggcccgccgtggcgccaccgagtcgaaggtgacgttgagcgcgccgcgcactctcgggcggcgaagggcaggcaggtcgggcgggcagtggagcacgccgccgcctccttgccaggcatctagccagctggcgcccgtcgggcacgtgaccttcattccaccgcccagcgccccagcgcccccgccccccggccccaacagaagccctgccaagagctgcatccaggcgcagatcttgtagaccgtagccgtgttgcagaagaagaaaagcgaaaagcaggtgatgcagccgaggatcagcaccatggagagcagcacgaagaaggcggccgccttgaaggcgctggacgggatggtgctgaagtcggtgaaggagccccggcaggtgagctcgcggcccgccagcccgctgcccacgcagtagtggaagaggccgaagtagccaggcttgggggtgctcacgctgtcgcccacccagtagggctggatgaagaccaccacgttgatgatggcgaagcagatggtgaagatggcccacagcacgccgatggcccgcgagttccgcatgtagtgctcgtggtagagcttggaggcctcctgcgagggcagcatggtgcccggaggcggggccggcggcggcggcggctggcgggggccgccggcccgggacggagcgccgggctgccgggcgggagctggggacgcacgcgagaagcggccctgagtcaaggaacccgcgagggcggggcctggggcagagctgggggcgtctgggagctgctccacagtagggcccccgatgtaggggactcccttcttccagcctgagctaaggggctgtgaggccccacaaagcctgggtttggggacctccaggggactgctacccatcctgaaaaagttatcagaatggtttgaggaagaggagctggaagacctggcttccgccagcccctgctgggaaggcaagcggtcctctgagggttgtggccggttccagaggacactctgtggagaggatgagtggctcttcctccaagctgcctgagttggcgctcctgctgggaccagctccacggcctcataggtgaagctcccagtggctcctggggaactctccatgaccagggagaagtcgctgccaaggctggtggtgctgccacggtcctttcgtctcagcatgcagatgtcttccagggtgaagcctccatcccgggctggcaaactcttcctcctctgggtcttcagagcagagaactcctcggaggtaatatgcttcaaaaaattgaagcagaagaagaaaatctcctcccctttgctgagccgatctaccaacatgtgcccgaagaggaaccagtcataggccacagtgaggtagaggatctcagtgggcttcagggacgtgtggatgagcccatcctggctctgttcttgggccttcttggttccataagccaatgcatttccacttgtttgagcaagtgcaactcctacagaagtcctgattgctaccagggatttagagtccgtctgcccatcactgttaactaaggaaagcagcagcttcaggtagttttgtgtttgttgcaccagatcccaacactgatactggctccagtcaatgttcagagagtgagtcaggaagtcggggatgctcaatggggcatcaacgtagtctccagcatcattatcatcatcatcatcatcaccatcatcaacatcatcaccaccatcatcatcatctggatacgggatggagaggagagtgaagtcggcatagcgctgggctttgtccaccttctcagaggaggttacattcatgccaaacttcaccttcttgttctccaccatcaggtcacagatgtatttgactgacaggtatcgaagcagcttgatgtcatagcctctgaccttatcaaaaagatgcgtgtcaccacttcgaagagcacagtcctcctccgtgacgtcctccacatctgcccaggcatcatctgcaccccctgagaaaaaatagttgtagcctgagcgtccatacagctctccccatccagccagtgtggccgacctgcaaatgtgcttgcccttgaacaggattactgggcagacaaaccgtcctctgcaccgggccatcttgctgcggtggatgaggtcttgcaacttgctcacctgtacggtactctcaaacgtgtctttctccttctcagaactctcatactccaggaacacgatgtgccggggatagtggccacagatatccccattcgtgtttggaatcacgctgaaacagtagtctcggccaaacagctccagacatctcttctcaatgcgctcaaccttagagccgccggtcccgctgccatccttggcccggtactgagtccgggagaactcctccagcagctccccaagccccagctcctgaggcggctggttgcctgaagaggccgaggaccccgccgaggcagcggcggcggcggcccgagcgccggccat

SEQ ID NO: 5183 - DNA, 681 bp, Homo sapiens
  SIMILAR (21)..(233): 421254mologous to Arabidopsis thaliana putative RING zinc finger protein,accession number AC011708,Smith-Waterman Score=177.
tcagtgtgggtctgatactgccaagctcactccagcatcattatcatcatcatcatcatcaccatcatcaacatcatcaccaccatcatcatcatctgcatcagcgcaaacttgctcctcccctttgctgagccgatctaccaacatgtgcaccacatcagggtatacgtccgtttggaggctttcctcaaacgtctggcagccctggactgcctgtgtatgctgaagaacagggcacagaaaggctgagtctgcagggcactggctgtggctgccaggctgggctcctttgttgggggcctccagttgccagcacatctgtgggattttccctagagtcttcagtctctccagagcaggtgcctctgagccctggcccagcaggtacagacgctgaagcccaatagccggtcttccgggaggtggtctttggaaggtccataaatttaagtttaaagttggaatttgggtgtgcccccttgctggatatcctggttgggtggtggtgcttgggaaatggccatcccatatcagctgcatatcctcatcgtggatctggtggatgttcacccatttgactgtgaatcctaaagattcatctgcagtcacgggtgttgctttcacacagggccagccaagaaattcaagtttgcaggtcaggaatgttcgagggagcagcat

SEQ ID NO: 5184 - DNA, 1290 bp, Homo sapiens
  SIMILAR (817)..(1287): 961254mologous to Escherichia coli No definition line found,accession number U00039,Smith-Waterman Score=805.
aaaaggaatctctttgcgttgtttgacatggcctaccaaggctttgccagtggtgatggtgataaggatgcctgggctgtgcgccacttcatcgaacagggcattaatgtttgtctctgccaatcatatgccaagaacatgggcttatatgagtgttttggcgtcgtggtacctgaaagcggtatttggagtcggtgtagccagccggcgatctatagcctgtcggagacagcatggaaacatggggaggacgggagggaaggcagcaaacggaccgcgccctatgaggctcgcacgggactgacgctcatcttaatgcagcgtctgcagggggtgctcattcgccactccgagcgcagcgccgataggaagcagcatgggttgttccatagtcgagtatccgccagcggtatcaagcggtatctgaagcatgagggtttcgcccggcaacagcaaattttaggcaaagtcttgagaaagaagaaattgggtccagaaagggaagtgaggagaatcagatcccagacctttggggagaaggagcaaccgcatctggcacagcccatcagggagaaagagcaggttggttttttaactcttggggtaaaaccattcctcccacgcgggccttccaaagaatatcgtctgatgctacgcgaagataatgcggatctgcgtttgactgaaatcggtcgtgaactgggcctggtggatgacgaacgttgggcgcgctttaacgagaaacttgagaatatcgagcgtgagcgtcagcgtctgaaatcgacgtgggatgctgattggtgcatttacaatccggaagtctatatgcaggaagaaacccttgtggatgtgaccagcagtatgagtatgggctggaattttcctttatataaacaggttacaaccggcccggtcgcggcattacattacgatggcacaaccacctcgatgtataacgagtttggagacagtactaccacgctgaccgatccgttatggcatgccagcgtgagtaccttaggctggcgtgttgactcccggcttggcgatctccgaccctgggcgcaaatcagctataaccagcaatttggcgagaatatctggaaggcgcaatcaggcctgagccggatgacggcgacaaaccagaacggcaactggctggatgtcaccgtaggcgctgatatgttgctcaatcaaaatattgccgcctatgccgcgctaactcaggcagaaaataccactaataatagcgactatctgtatacgatgggggttagcgccagattttaa

SEQ ID NO: 5185 - DNA, 1316 bp, Homo sapiens
  SIMILAR (9)..(1313): 931254mologous to Homo sapiens aspartate aminotransferase precursor (2.6.1.1),accession number M22632,Smith-Waterman Score= 2085.
ggtccaccatggccctgctgcactccggccgcgtcctccccgggatcgccgccgccttccacccgggcctcgccgccgcggcctctgccagagccagctcctggtggacccatgtggaaatgggacctccagatcccattctgggagtcactgaagcctttaagagggacaccaatagcaaaaagatgaatctgggagttggtgcctaccgggatgataatggaaagccttacgttctgcctagcgtccgcaaggcagaggcccagattgccgcaaaaaatttggacaaggaatacctgcccattgggggactggctgaattttgcaaggcatctgcagaactagccctgggtgagaacagcgaagtcttgaagagtggccggtttgtcactgtgcagaccatttctggaactggagccttaaggatcggagccagttttctgcaaagattttttaagttcagccgagatgtctttctgcccaaaccaacctggggaaaccacacacccatcttcagggatgctggcatgcagctacaaggttatcggtattatgaccccaagacttgcggttttgacttcacaggcgctgtggaggatatttcaaaaataccagagcagagtgttcttcttctgcatgcctgcgcccacaatcccacgggagtggacccgcgtccggaacagtggaaggaaatagcaacagtggtgaagaaaaggaatctctttgcgttctttgacatggcctaccaaggctttgccagtggtgatggtgataaggatgcctgggctgtgcgccacttcatcgaacagggcattaatgtttgcctctgccaatcatatgccaagaacatgggcttatatggtgagcgtgtaggagccttcactatggtctgcaaagatgcggatgaagccaaaagggtagagtcacagttgaagatcttgatccgtcccatgtattccaaccctcccctcaatggggcccggattgctgctgccattctgaacaccccagatttgcgaaaacaatggctgcaagaagtgaaaggcatggctgaccgcattcattgggcatgcgggacttcaactggtctccaaccttcaaggaagggagggtttccacccaccaattgggcaacacattcaccgaccaaattgggcatgttctgttttcacaggggttaaaagctggaacaggtggagcggctgatcaaggagttctccatctacatgacaaaagatggccgcatctctgtggcaggggtcacctccagcaacgtgggctaccttgcccatgccattcaccaggtcaccaagtaa

SEQ ID NO: 5186 - DNA, 428 bp, Homo sapiens
  SIMILAR (18)..(338): 731254mologous to Homo sapiens Human signal peptide containing protein HSPP-92 SEQ ID NO:92,accession number Y87315,Smith-Waterman Score=408.
  misc_feature (1)...(428): n = a,t,c or g
cgcaatagtcgngacgagggcttggggagctgctggaggagttctcccggactcagtaccgggccaaggatggcttcgggaccggcggctctaaggttgagcgcattgagaagagatgtctggagctgtttggccgagactactgtttcagcgtgattccaaacacgaatggggatatctgtggccactatccccggcacatcgtgttcctggagtatgagagttctgagaaggagaaagacacaagtggtgacacgcatctttttgataaggtcagaggctatgacatcaagctgcttcgatacctgtcagtcaaatacatctgtgacctgatggtggagaacaagaaggtgaagtttggcatgaatgtaacctcctctgagaaggtggacaaagcccagcgctatgccgacttcactctcctctcn

SEQ ID NO: 5187 - DNA, 2250 bp, Homo sapiens
  SIMILAR (847)..(1107): 941254mologous to Homo sapiens Human signal peptide containing protein HSPP-92 SEQ ID NO:92,accession number Y87315,Smith-Waterman Score=441.
atgactgcccgttggcagatagaggatgacagcagaaacagggcgagaactaccacgcagaacaaaccagacaaaacaacgatagcagcagaacaacaaagggaaaaagaaacaaaaacaaccaacgacagaaaaagaacacaaaaacaaacaacaaacaaaaaaaaaaacgagaaaacaaacaacaaagaaagaaacacgttttgtgaagttcactctggagagaaaaagaggccaacgtgtgaagaaaaatcaagacaaggagagaggagggaagacagagaaagcaaatcctatgagtactacatctccagttccagtctccaagcccctaatctctgcgaagggcaagaactcaggcacctcgacactcaggtccagcgctgtgaggacatcctgcagcagctgcaggccgtggtaccccagatagacatggaaggggatcgcaacatctggatcgtgaagccaggagccaagtcccgcggacgaggcatcatgtgcatggaccacctggaggagatgctgaagctggtgaacggcaaccccgtggtgatgaaggacggcaagtgggtggtgcagaagtatattgagcggaccctcctcatctttggcaccaagtttgacctcagacagtggttcctggtaactgactggaacccacttaccgtgtggttctaccgcgacaagctatatccgcttttccaagcagccattctccaactgaagaacctggacaagagtagcaaagagctcctgttacaacctgtgaccatcagcaggaatgagaaggaaaaggttctgattgagggctccatcaactctgtccgggtcagcattgctgtgaaacaggttgagcgcattgagaagagatgtctggagctgtttggccgagactactgtttcagcgtgattccaaacacgaatggggatatctgtggccactatccccggcacatcgtgttcctggagtatgagagttctgagaaggagaaagacacgtttgagagtaccgtacaggtgagcaagttgcaagacctcatccaccgcagcaagatggcccggtgcagaggacggtttgtctgcccagtaatccctgttcaagggcaaggtttcccggtcctctggcgaggatcctccaaggcgtctcacatgaaccggctcagaaacgccaaaatctacgtggagagagctgtcaagcagaagaagatctttacaatccaaggctgctacccggtgatccggtgtctcttgcgccggaggggctgggtggagaagaagatggtccatcgctcaggccccaccctgctgccaccccagaaggatctggatagctcagcgatgggtgacagtgacaccactgaggatgaggatgaagatgaggacgaggagttccagccatcacagctgttcgacttcgatgatttactgaaatttgatgacctagatggaacacatgctctgatgtcccgcatggtccagaatgagatcccctacttcatctggaccactcggcgggatgtgctcgactgtcgcttcctctccaaggatcagatgataaaccactacgcccgggctggctcctttaccacaaagactacaagaaatcaggctggctgtggtgtcagcgcgactgtagtacacgctactccgccggcccacgacagacacacggagagaaaccgagcggccacaccaacacagcgacgagcaggcgacccgggaggagagccgggacaaacgagcgacaaaagaaacaagaaagaagaaagagaagagaagacaaagacaaagacaacagaagaaacagggacagagaggagagagaaaaaccagagagagaacagggagaagaaagtagaaaagaaaaagagaaaaggagatgagagagaggaggagaagagagtgtatgctatatatagaacaagaggacgaaaggaccgtggcagcaccaccagccttggcagcgacttctccctggtcatggagagttccccaggagccactgggagcttcacctatgaggccgtggagctggtcccagcaggagcgccaactcaggcagcttggaggaagagccactcatcctctccacagagtgtcctctggaaccggccacaaccctcagaggaccgcttgccttcccagcaggggctggcggaagccaggtcttccagctcctcttcctcaaaccattctgataactttttcaggatgggtagcagtcccctggaggtccccaaacccaggtga

SEQ ID NO: 5188 - DNA, 675 bp, Homo sapiens
  SIMILAR (60)..(674): 611254mologous to Homo sapiens Human signal peptide containing protein HSPP-92 SEQ ID NO:92,accession number Y87315,Smith-Waterman Score=609.
ggtgcaggcaggtgcgatgggccagcttgaggcacactgaggggacgcggggctgggcagtggcgtgcgctcgggccgccgccgccgctgcctcggcgggtcctcggcctcttcaggcaaccagccgcctcaggagctggggcttggggagctgctggaggagttctcccggactcagtaccgggccaaggatggcagcgggaccggcggctctaaggttgagcgcattgagaagagatgtctggagctgtttggccgagactactgtttcagcgtgattccaaacacgaatggggatatctgtggccactatccccggcacatcgtgttcctggagtatgagagcctctgagaaggagaaagacacgtttgagagtaccgtacaggtgagcaagttgcaagacctcatccaccgcagcaagatggcccggtgcagaggacggtttgtctgcccagtaatcctgttcaagggcaagcacatttgcaggtcggccacactggctggatggggagagctgtatggacgctcaggctacaactattttttctcagggggtgcagatgatgcctgggcagatgtggaggacgtcacggaggaggactgtgctcttcgaagtggtgacacgcatctttttgataaggtcagaggctatgacatcaagctgcttcgatacc

SEQ ID NO: 5189 - DNA, 552 bp, Homo sapiens
  SIMILAR (1)..(324): 961254mologous to Homo sapiens Human signal peptide containing protein HSPP-92 SEQ ID NO:92,accession number Y87315,Smith-Waterman Score=539.
atggccggcgctcgggccgccgccgccgctgcctcggcggggtcctcggcctcttcaggcaaccagccgcctcaggagctggggcttggggagctgctggaggagttctcccggactcagtaccgggccaaggatggcagcgggaccggcggctctaaggttgagcgcattgagaagagatgtctggagctgtttggccgagactactgtttcagcgtgattccaaacacgaatggggatatctgtggccactatccccggcacatcgtgttcctggagtatgagagttctgagaaggagaaagacaccccacagtcagctttggctttcgctacaccagtaattgtcaaacttgaatgtgcaggaatcacctgccctgcagatggaagttcagctatagggaagaaacaggcctcagtgggggcagaagattctgctgctgcaggggccctggaggacggctgtctcttctccctccatacgttctccttgggcaatttcatctatgctcagattcatacaatgatgcctcaaatcgccatccacagctga

SEQ ID NO: 5190 - DNA, 580 bp, Homo sapiens
  SIMILAR (10)..(117): 1001254mologous to Homo sapiens Human PRO1415 (UNQ731) amino acid sequence SEQ ID NO:50,accession number Y99353,Smith-Waterman Score=191.
ggcacgagtgagggccaaggggagctggaagggtctctcttgttagcccaggaagcccagggaccagtgggtccccccgaaagcccctgtgcttgcagcagtgtccaccccagtgtctaacagtcctcccgggctgccagccctgactgtcgggcccccaagtggtcacctccccgtgtatgaaaaggccttcagccctgactgcttcctgacactccctccttggcctccctgtggtgccaatcccagcatgtgctgattctacagcaggcagaaatgctggtccccggtgccccggaggaatcttaccaagtgccatcatccttcacctcagcagccccaaagggctacatcctacagcacagctcccctgacaaagtgagggagggcacgtgtccctgtgacagccaggataaaacatccctcaaggctgggtgtggaggctcacacctgtaatctcagcattttgggaggccaagtgcggacatcacttgagaccaggagttccaaaccagccctggcaacattgtgagacccatctctataaaaacaaaaaacagtccaaaaaaaaaaaaaaaaa

SEQ ID NO: 5191 - DNA, 1117 bp, Homo sapiens
  SIMILAR (999)..(202): 991254mologous to Homo sapiens Human PRO1415 (UNQ731) amino acid sequence SEQ ID NO:50,accession number Y99353,Smith-Waterman Score=1338.
ctactcccgatcccggccaagggtgcagtgaggggggcattgtccatgagacccgtcccagtcctcaaccactttgtcaggggagctgtgctgtaggatgtagccctttggggctgctgaggtgaaggatgatggcacttggtaagattcctccggggcaccggggaccagcatttctgcctgctgtagaatcagcacatgtggtccctgggcttcctgggctaacaagagagacccttccagctccccttggccctcaccggccaccacagccccctcaaggacccctgagcacggctcctcctgcgcctctggtgtctccactgggaccccatgtccctggacttcctggtccccctcctggctgcccttctcctcttcctctgcgcccctgccctccaccatcctggctccgtccccaccgcccagtgcagccctggtgggggacttgaggttctgggtggcggccaagatgtcggcctggagctgccgggaggaatccagggcttcctcgggcctgctgtcgggggctctgtcggggacctcactgaaggcccgggggcccccggcccggtcactctggtccacgtacttcttcttggggaaggacgatgggtaataggccgaggccttctgcttctgccgggtgatgaccgcggcacagacgatgaacatcagcagaaaggccagggagcccaccacagcaatcagcatcacgtactggcggaagaagtccactatcccatccaggaagttggtggggggtgatgggccccccagggttatgggctggggccccatcgatgtggggctgagggccggggtccagggtggcgggaggctcggggaggaggccgacgagccctcggcctccccactacccgccacatcctccaggaacgtggccttcaggggcacagagcgggcgtcggtagcaggcacagaccccaggagcagcaacagaaggatgaggaggctgggggctgccgccgaaaccatggtgcccccaggaccagttccttggcgtacaggactgggtgctcccgccgaatggagcgagagtggggggcacctgggcatggaagagagagtccgtgctggtgcccggggcacgaaa

SEQ ID NO: 5192 - DNA, 692 bp, Homo sapiens
  SIMILAR (229)..(657): 441254mologous to Homo sapiens DC32,accession number AF260336,Smith-Waterman Score=176.
  misc_feature (1)...(692): n = a,t,c or g
ctgagagatcctctaccgcagtcgtttgaggaggcggaactgaagttttttcttaattatcatgtgacgggttctggatttaacggggggaaaagggcggaaaaggacaaggatccaaactggcgaatttgctgatcttcgcgtccctctccgctttccggccggcagcgctgccaggggtatatttccttttttccgatcctgcaacagcctctttaaactgtttaaatgaggaatgtccttgggcttcagagagttactactcacctgggctttttcacactactctttcttgatccatgttgggtgttggaaactgggatggaggaaaggcaccttgggaactggttcctcatattcattccagtctgggatatttggatactatccttcttgtcctgctggattgtgaaaatgggctggggcngtgtaagttctgggctttggacccttcgacatgggatcacacaatatttaaaaaaaaagcctgggtacctcattggcaatgttactttaaattaggccttctgcctcggaattctgtgcttaaactgggaacagtttagcaccatggaatctatcctatgtcttcaattcctttatggggccttgctgggctgggggttttaacagaactcgggatataatgtcctttttggtgagagactgacttctaagtacatcatctccct

SEQ ID NO: 5193 - DNA, 975 bp, Homo sapiens
  SIMILAR (1)..(534): 671254mologous to Mus musculus Pro-Pol-dUTPase polyprotein,accession number Y12713,Smith-Waterman Score=597.
atgacagcggagtattacaagcttaaacaagtggtgactccaattgcagcagctgtaccagatgtggtttcgttgcttgagcaaattaacatatctctgtgtacctggtatgcagtcattgacttgggaaatgcctgtttctacattcctgtccataaggcccaccagaagcaatttgccatcagccggcatggtcagcaatatacctttactgtcctacttcagggagagaccttgatctcttttcgcttccacaagatatcacactgggtccattacgttgatggcattatgctgattggatccagtgagcaagaagtagcaagcacactggacttattggtgagacatttgcatgccagaggatgggaaataaatctgactaaaattcagggacttgctacctcagtaaaatttctaggagtccagtggtatggggcctgtagagatattccttctaaggtgaaggataagttgctgcatttggcccctcctacaaccaagaaagaggcacaacatctagctgccagttttgagtggggtccagaacagaagggtctgcaacaggtccaggttgctgtgcaagctgctctgccacttgggctgtatgacccagcagatccaatggtgcttgaggtgtcagtggcagatagggatgctgtttggagcctctggcaggcccccataggcgaatcacagtggaggcctctaggatttcagaacaaggccctgccatctgcagataactactctccttttgagagacagctcttggcctgttactgggctttggtggaaactgaagccacccctgtcatcacccaacgggcccatgagcaaagtggccatggtggcagggatggaggttatgcatgggctcagcaacatggacttccactcaacaaggctgacctggctgtggccactgctaagtgtccaatttcccagcagcagagaccaatactgagctcttga

SEQ ID NO: 5194 - DNA, 246 bp, Homo sapiens
  SIMILAR (3)..(242): 621254mologous to Mus musculus Pro-Pol-dUTPase polyprotein,accession number Y12713,Smith-Waterman Score=221.
gtgtgttactctggcccatttatccagtgacccaaagaactgccagttttgagtggggtccagaacaggagaaggctctgcaacaggtccaggcagctgtgcaagctgctctgccacttgggccatatgacccaacagatccaatggtgcttgaagtccgtaaagtgggtcgtgcacagcagcattccatcatcaagtggaagtggtacatacacgatcgggctcaagcaggtcctgaaggcacaa

SEQ ID NO: 5195 - DNA, 841 bp, Homo sapiens
  SIMILAR (6)..(716): 761254mologous to Mus musculus Pro-Pol-dUTPase polyprotein,accession number Y12713,Smith-Waterman Score=951.
tgcgtccagtgggtccccggactcatcctgtggtcatttccccagtgccagaatgcataattagcatagacatacttcgaagctggcagaacccccacattggcaccctgactggtagggtgagggctgttatggtgagaaaggccaaatggaagccattagagctgtctctacctagaaaaatagtaaaccaaaaacaatattgtgtccctggagggattgtggagattagtgccaccaccaaggacttgaaagatgcaaaggtggtgattcccaccatatccctgttcaactatcctatttggcttgtgcagaagaatgatggatcttggagaatggcagtggattatcataagcttacccaaggggtgactccaattgcagctgctgtaccaaatgtgatttcattgcttgagcaaattaacacatcttctggtacctggtatgcagccatttacttggtaaatgtctttttctccattcctgtccataaggccctcaagaaacaatttgccttcagctggcaaggtcaaccatatacctttaccattctaccttgggggcatatcaactctccgactttgtgttataatctcatttggagagaacttgatcacttttcgcttccacaagatatcacactggttcattacattgatgacattatgctaattggatccagtgagcaagaagtagcaaacacactggacttattggagaaggctctgcaacaggtccaggctgctgtgcaagctgctctaccacttgggccatatgacccagcagatccagtggtgcttgaggtgtcagtggcagatagggatactgtttggagcctatg

SEQ ID NO: 5196 - DNA, 748 bp, Homo sapiens
  SIMILAR (296)..(577): 871254mologous to Mus musculus Pro-Pol-dUTPase polyprotein,accession number Y12713,Smith-Waterman Score=420.
agagaccttgatctcttttcgcttccacaagatatcacactgggtccattacgttgatggcattatgctgattggatccagtgagcaagaagtagcaagcacactggacttattggtgagacatttgcatgccagaggatgggaaataaatctgactaaaattcagggacttgctacctcagtaaaatttctaggagtccagtggtatggggcctgtagagatattccttctaaggtgaaggataagttgctgcatttggcccctcctacaaccaagaaagaggcacaacatctagctgccagttttgagtggggtccagaacagaagggtctgcaacaggtccaggttgctgtgcaagctgctctgccacttgggctgtatgacccagcagatccaatggtgcttgaggtgtcagtggcagatagggatgctgtttggagcctctggcaggcccccataggcgaatcacagtggaggcctctaggatttcagaacaaggccctgccatctgcagataactactctccttttgagagacagctcttggcctgttactgggctttggtggaaactgaagccacccctgtcatcacccaacgggcccatgagcaaagtggccatggtggcagggatggaggttatgcatgggctcagcaacatggacttccactcaacaaggctgacctggctgtggccactgctaagtgtccaatttcccagcagcagagaccaatactgagctcttga

SEQ ID NO: 5197 - DNA, 486 bp, Homo sapiens
  SIMILAR (220)..(483): 821254mologous to Mus musculus Pro-Pol-dUTPase polyprotein,accession number Y12713,Smith-Waterman Score=382.
atggaagcttctgcttttgtggaagcctcaggaaacttacaatcatggcagaagtggggtccagaacaggaaaaggctctgcaactagtccaggctgctgtgcaagctgctctgccacttgggtcatatgacccagcagatccaatggtgcttgaggtgtcagtggcagatagggatgctgtttgcagcctttggcaggctcccataggtgaatcacaccataaagtgggtcgtgcacagcagcattccatcatcaaatggaagtggtatatatgtgatcgggctcgagcaagtcctgaaggcacaagtaagttacatgaggaagtggcccaaatgcccatggtctccactcctgccaccctgccttctctccccaagcctgcactgatggccttatggagagttccctatgatcagttgacagaggaagagaagactagggactggttcacagatggttctgcaggatatgcaggcaccacctga

SEQ ID NO: 5198 - DNA, 1911 bp, Homo sapiens
  SIMILAR (982)..(1761): 751254mologous to Mus musculus Pro-Pol-dUTPase polyprotein,accession number Y12713,Smith-Waterman Score=1036.
atgctcctgtcataccctatcagtcaagaagttttagaagttttagatctgtgccaggaacccaggcccctgcaggcacttaagtttgtgagtccgctgcagaatgatggagtcaagagaggagctgaaaacacagacctctggctgatatctgaacaatcagactttaagattcaaaaagtatcgaccatgagaagtgaaagcatagcatctgcatcaaaagccttgatttgtcatggcacctacacactgaggatggggtgtatgtgtatgtatctgtctgtctcccccagttccctggaaaatcctaaaggcaattccaaggtggtggtggacagcggggacaacagtcacatatactctgagggaaaggaaccttcctctctgatcagaggagctctgatctcaagatgtaggagcaaacatctgctgcttttttcctctgtctttctgcctcttggcccgaaatgcaagcagtcacaggaagtacgtcctattctaatgtctcatctctgtggctggaaaagtaaaaaggggaaccccagggaaggaggaagtcatggagaaatcgacttacacaaatataaccaattgattcttggtaaagacctctggccttttaccagggtaactgtgcactggggaaagggaaatgatcagacatttcagggactacaggatactggctctgagctgatgctgattccaggggacccaaaacgtcactgtagtcctccagttaaagtagggtcttatggaggtcaggtaattaatggagttttagctcaggtgcgacttacagtggctgctgtatcagatgtggtttcactgcttgagcaaattaacatatctcctggtacctggtatgcagccatagacgtggcaaatgcctttttctccattcctgtccatatggcccatctgaagcaatttgccttcagctggcaaggccagcaatatacatttactgtcctgcctcagagaggatgggaaataaatccaactaaaattcagggaccttccacttcagtaaaatttctagggatccagtggtatggggcctgtcaagatattccttctaaggtgaaggaaaagttgctgcatttggctcctcctacaaccaagaaagaggcacaacgcctagtggacctatttggatttcggaggcaacacattcctcatgtgggtgtgttactctggcccatttatcaagtgacccgaaaggctgccagttttgagtggggtccagaacaggagaaggctctgcaacaggtccaggctgctgtgcaagctgctctgccacttgggccatatgacccagcagatccactagtgcttgaagtggatgctgtttggagccctcagcaggcccccataggtgaatcacagaggaggcctctaggattttggagcaaggctctgccgccttctgcaggtaactactctccttttgagagacagctctttgtctgttactgggctttgctggaaactgaacatttgactatgggtcatcaagtcaccatgcaacctgaactgcctatcatgaattgggtgccttctaaccaatctagctataaagtgggtcatgcacagcagcattctatcatcaaatggaagtggtatatacgtgattgcgctcgagcacatcctgaaggcacaatcaggattcacaggtccaggaatcaaggggtggaagtggaagtggtaccactcaccatcacccctagtgatccactagcaaaagctttgcttcctgttcccgcaacattatgttctgctggcacaggggtcttagtgccagagggaggaacgctgccaccaggagacacaacgatgattccattaaactggaagttgagattgccacctggacactttgggctcctcctacctttaagtcaagactaa

SEQ ID NO: 5199 - DNA, 2718 bp, Homo sapiens
  SIMILAR (1989)..(2093): 681254mologous to Mus musculus Pro-Pol-dUTPase polyprotein,accession number Y12713,Smith-Waterman Score=132.
atggacatagagacagaaacaatagacagtgggaactaccggaagtggcagggaggaagaggaacaagggctgaacaactaccagttgggtattattctcactacctaggtgctggcatcaatcataccccaaacctcagtgtcacacaatatacccatgacaaaaacctgcacacttttccaagtagaaaatcaaagaagacatcaaaatgtgacatcatcattaagcagaaacggcataaatctccaaaggagaaggctctgcaacaggtccaggctgctgtgcaagctgttctgccacttgggccatatgatccagcagatccaatggtgcttgaggtgccagtagcagatagggatgctgtttggagcctttgccaggcccccatagccacccctgtcattgcccaatgggcccatgaacaaagtggccatggtggcagggatggaggttacacatgggctcagcaacatggacttccatcctccaaggctaaactggctacggccactgctgagtgcccaatttgccagcagcagagagcaacactgagccctcgatgtggcaccattcctcggggtgatcagccagctacctggtggcagaaagggaagaggtttgtcctcactggaatagacacttactgtggatatgggtctgcctattctgcacgcaatgcttctgccaagactaccatccacggactcacggaatgccttttccactgtcttggtattccacacagcattgcctctgaccgaggcactcactttatggataaagaagctccaagtgcttcagttttgggactcgcactggctctccttgctcctcagcttgcagacagcctattgtgggaccttgtgatcatatctaacatgggaactgcagtcactgaacttcaaaatttaaatacaatgggaatgattggatcccaaagtggcagtggccaagttgcagcactcaactgtcaaaagcaaggtgggcgtagctaccataatagacagcagaggcaaagcagcaatcagaatagtctgactcaggagacctctggctttttacctgagcacatttgcattggaaagggaaatgatcagacatttcggggactactagacactggctctgagctgatgttgattccagtggatgcaaaatatcattgtggtcccccagttaaaatccaacttacaatgggtccagtgggtccccagtctcctcctgtggtcatttatccagtgccagaatgcataattggcatagacatacttagcagctggcagaacccaccccccgttggcttcctgactgggagagtgagggctattatgatgggaaaggccaaatggaggccattagaggtgtctctacctagaaagatagtaaatcaaaaacaatatcacatccatggagggaccgtggagattagtgtcaccttcaaggagttgaaagatgcaggagtagtgattcccaccatattcctgtttaactctcccatttggcctgtgcagaagacagatggaacttgtggatcttggagaatgacagtggattattgtaagcttaaccaagtggtgactccgacagtagctgccgtattagatgtggtttcattgcttgagcaaatttacacatctcctggtacctggtatgtagccaatgacttgacaaatgcctttttctccattactgttcataaggcccaccagaagcaatctgccttcagctggcaaggccagcaatatacctttaccgtcctacctcaggggatgagtttggtgcatttggcgcctcctacgaccaagaaagaggcacaatgcctagtgggcctgtttggattttggggcaacacatttctcatttggaagaaggctctgcaactggtccaggctgctatgcaagctgctctgccacttgggccatatgacccagcagatccaatggtgtttgaagtatcagtggcagattgggatgctgtttggagcctttggcagggtcccatagccacaaagtgggtcatgcacagcaccattccttcatcacatggaagtggtatacacgtgattggtctcgagcaggtcctgaaggcacaaggagttccctatgatcagttgacagaggaagagaagactagggcctggttcacagatggttctgcacgatatgcaggcaccatccgaaggtggacagctgcagcactacagcccctttctaggacatccctgaaggagagcggtgaagggaaatcttcccagtgggcagaagttcgagcagtgcaccttgttgtgcattttacatggaaggagaaatggccagatctgatggtttggctggatgatcaaggacttggaagaagcatgattggaaaattggtgacaaataaatttggggaagagatgtgtggatggacctctctgagtgagtggccaaaaactgtgaaaatattggtatcccgtgtgagtgctcaccaacgggtgacctcagcagaggagaattttaataatcaggtggatgagataagccattctgtggacaccactcagcctctttccccagccacccctgtcattgcccaatgggcccatgaacaaagtggccatggtggcagagatagaggttacgaatgggctcagcaacatgtacttccactcaccaaggctgacctggctacagccactgctgatgcccaatttgccagcagcagagaccaacaatga

SEQ ID NO: 5200 - DNA, 693 bp, Homo sapiens
  SIMILAR (591)..(659): 1001254mologous to Homo sapiens Human RNA-associated protein- 13 (RNAAP-13),accession number Y70232,Smith-Waterman Score=115.
tcagcaacggaaaacaggtttgctctcgggtcctgatgctgactgatgagcactggattcctggagcactggcttcagaatgatgttgaggccaagtcctagctcagcagaaaggacggctgtgattagcgatgtggccgattgggcctgtctgccatgtagcttgccttctatattcctgtccaatgatggttcttcggcgccaggtgattttccatcactctgtgccataggaggctgttccccgactggggcctttatgcatacggctgtgcagccccagtgggctctggatgccagctggccagggctggctgccagcacaagcactggggctccaggctccgcattcatgcctgtggtgaccacctcacagggcgatggccaccccagctgcttctccctggccctccgcaagcccttgcctcctgctgcaccctctccctccagcatcccctgggccttgctcttaacagcagcagaagcctgggtgtcctgggggttgggacagagagaaataacttgacttcttccttgtgtttcttcagcaatttctgccaagaccctcatcttcagaaatctagatgctgccaggcttcccagcagcggcttatggaccagtggcagcagcggcggtggcggcagcaagaggatcaggtaggaaggtgtatgggacaggcgactcccaggcat

SEQ ID NO: 5201 - DNA, 456 bp, Homo sapiens
  SIMILAR (1)..(144): 581254mologous to Homo sapiens PRO2221,accession number AF116695,Smith-Waterman Score=149.
atggggagaaaccagagcagaaaagctgaaaattctaaacacgaaagcacctattctcctccaaaggatcacagctcctcacaagcaatggaacaaagctggacagagaatggctttgagaagctaggcttcagaaggaaagaagccctgtattacttagatttgactgcttcatgccagtctcaggagcttttccagaaatgggtctcactatgttgcccagattagtcttgaacttctggcctcaaaggatcctcccctctcagcctcccaagtagctggggactacaggcttcagcaactgcaactgtcagttccgactttccctgcctcagccttgttccctcttacctcacaaaggaaaaggacgggttgccagcaactctataaaaaactcagcgtgatcaaaacttcactaaagccaggtgcattcaagaacacaggactccctatttc

SEQ ID NO: 5202 - DNA, 1515 bp, Homo sapiens
  SIMILAR (535)..(1074): 931254mologous to unidentified cloning vector 29kD protein essential for the replication of mini F plasmid,accession number AB015619,Smith-Waterman Score=861.
ccatggatatccgcgcctgttccggtggacgtggtggagggtgcaatggactctgtgacggttcttagctttggtggtttaatgctctatttttgtgctggttggcctcctgccaggaggtggtgctttccagaaagcatcagctgtggtagtatggagagggaccagtggtgggggctccaagtagcgaagcgagcaggactggccggcggccaaagcggtcggacagtgctccgagaacgggtgcgcatagaaattgcatcaacgcatatagcgctagcagcacgccatagtgactggcgatgctgtcggaatggacgatatcccgcaagaggcccggcagctttgcagaactttcagcggtataccggcatacagcatgtgcatcgcataggaatggcggaacgtatgtggtgtgaccggaacagagaacgtcacaccgtcagcagcagcggcggcaaccgcctccccaatccaggtcctgaccgttcttgtgacaatctaaaaacttgtcacacttcacatggatctgtcatggcggaaacagcggttatcaatcacaagaaacgtaaaaatagcccgcgaatcgtccagtcaaacgacctcactgaggcggcatatagtctctcccgggatcaaaaacgtatgctgtatctgttcgttgaccagatcagaaaatctgatggcaccctacaggaacatgacggtatctgcgagatccatgttgctaaatatgctgaaatattcggattgacctctgcggaagccagtaaggatatacggcaggcattgaagagtttcgcggggaaggaagtggttttttatcgccctgaagaggatgccggcgatgaaaaaggctatgaatcttttccttggtttatcaaacgtgcgcacagtccatccagagggctttacagtgtacatatcaacccatatctcattcccttctttatcgggttacagaaccggtttacgcagtttcggcttagtgaaacaaaagaaatcaccgatccgtatgccatgcgtttatacaaataccctgtgtcagtatcgggctttcgtaaatggggggggagaagaaaaggctcgcggaaagcccatactttgccggtatggggtcgggatgtgaagttaactctgaaagtgctccggggtgatagtgttgagaagacttttcgggtagggtcaggtaatgaacgtgcccagaagctgcttactgaggacgcactggatgatctcatcccttcttttctactgactggtcaacagacaccggcgttcggtcgaagagtatctggtgtcatagaaattgccgatgggagtcgccgtcgtaaagctgctgcacttaccgaaagtgattatcgtgttctggttggcgagctggatgatgagcagatggctgcattatccagattgggtaacgattatcgcccaacaagtgcttatgaacgtggtcagcgttatgcaagccgattgcagaatgaatttgctggaaatactctctgcgctggctga

SEQ ID NO: 5203 - DNA, 1785 bp, Homo sapiens
  SIMILAR (478)..(1038): 941254mologous to Cloning vector pZC320 SopA,accession number U26464,Smith-Waterman Score=925.
atggtggattcgttaattgcgcgcgtaggagtaatggctcgcggtaatgccattactttgcctgtatgtggtcgggatgtgaagtttactcttgaagtgctccggggtgatagtgttgagaagacctctcgggtatggtcaggtaatgaacgtgaccaggagctgcttactgaggacgcactggatgatctcatcccttcttttctactgactggtcaacagacaccggcgttcggtcgaagagtatctggtgtcatagaaattgccgatgggagtcgccgtcgtaaagctgctgcacttaccgaaagtgattatcgtgttctggttggcgagctgcatgatgagcagatggctgcattatacagattgggtaacgattatcgcccaacaagtgcttatgaacgtggtcagcgttatgcaagccgattgcagaatgaatttgctggaaatatttctgcgctggctgatgcggaaaatatttcacatcttcatattcatgcagaagacactttcttgcctttctatcttgggaaaaaggacgatgtcacttatgcaataaagcccacttgttggccggggcttgacattattccttcttgtctggctctgcacggtattgaaattgagttaatgggcaaatttgatgaaggtaaactgcccaccgatccacacctgatgctcggactggccattgaaactgttgctcatgactatgatgtcatagttattgacagcgcgcctaacctgggtatcggcacgattaatgtcgtatgtgctgctgatgtgctgattgttcccacgcctgctgagttgtttgactacacctccgcactgcagtttttcgatatgcttcgtgatctgctcaagaacgttgatattaaagggttcgagcctgatgtacgtattttgcttaccaaatacagcaatagtaatggctctcagtccccgtggatggaggagcaaattcgggatgcctggggaagcatggttctaaaaaatgtggtacgtgaaacggatgaagttggtaaagcggttatcaatcacaagaaaggtaaaaatagcccgcgaatggtccagtcaaacgacctcactaaggcggcatatagtctctcccgggatcaaaaacgtatgctgtatctgttcgttgaccagatcagaaaatctgatggcaccctacaggaacatgacggtatctgcgagatccatgttgctaaatatgctgaaatattcggattgacctctgcggaagccagtaaggatatacggcaggcattgaagagtctcgcggggaaggaagtggttttttatagacctgaagaggatgccggcgatgaaaaaggctatgaatcttttccttggtttatcaaacaatccgaagaactcagtcaggaaatttctacactgacacgctggggatggcagagtttcgacgaggtgggctccgggcaaccgcagggccaagactctctaggaccagggactgccaagggacagaaaaggtccatggaaaaactgtcttcgacaaaactgttccctggtgccaaaaaggctgaagtcgcccagctgcaagaacaggtggccctgaaagatgcagaaattgagcgtctgcacagccagctctcccggacaacagctctccacagtgagagtcacacagagagagatttgctttcctgtggtgaggagagaggtgcttctgctaattggaacccttactcagaccagaaaagggcagatctctgtgagggcctgaccaactgcagaaatgatatggatcttgcctga

SEQ ID NO: 5204 - DNA, 1980 bp, Homo sapiens
  SIMILAR (190)..(786): 951254mologous to Cloning vector pZC320 SopB,accession number U26464,Smith-Waterman Score=932.
  misc_feature (1)...(1980): n = a,t,c or g
atgaaggctatcagagatgccgagaaagcaggccgccccccgcacccggatatggaaattcgaggacgggttgagcaacgtgttggttatacaattgaacaaattaatcatatgcgtgatgtgtttggtacgcgattgcgacgtgctgaagacgtatttccaccggtgatcggggttgctgcccataaaggtaatgaacgtgaccaggagctgcttactgaggacgcactggatgatctcatcctttcttttctactgactggtcaacagacaccggcgttcggtcgaagagtatctggtgtcatagaaattgccgatgggagtcgccgtcgtanagctgctgcacttaccgaaagtgattatcgtgttctggttggcgagctggatgatgagcagatggctgcattatccagattgggtaacgattatcgcccaacaagtgcttatgaacgtggtcagcgttatgcaagccgattgcagaatgaatttgctggaaatatttctgcgctggctgatgcggaaaatatttcacgtaagattattacccgctgtatcaacaccgccaaattgcctaaatcagttgttgctcttttttctcaccccggtgaactatctgcccggtcaggtgatgcacttcaaaaagcctttacagataaagaggaattacttaagcagcaggcatctaaccttcatgagcagaaaaaagctggggtgatatttgaagctgaagaagttatcactcttttaacttctgtgcttaaaactgtgcaatctaaaaacttgtcacacttcacatggatctgtcatgcggaaacagcggttatcaatcacaagaaacgtaagaatagcccgcgaatcgtccagtcaaacgacctcactgaggcggcatatagtctctcccgggatcaaaaacgtatgctgtatctgttcgttgaccagatcagaaaatctgatggcaccctacaggaacatgacggtatctgcgagatccatgttgctaaatatgctgaaatattcggattgacctctgcggaagccagtaaggatatacggcaggcattgaagagtttcgcggggaaggaagtggttttttatcgccctgaagaggatgccggcgatgaaaaaggctatgaatcttttccttggtttatcaaacattgggtaacgatatcgccccaaacaagtgcttatgaacgtggtcagcgttatgcaagccgatgcaagaatgaatttgctggaaatatttctgcgctggctgatgcggaaaatatttcacgtaagattattacccgctgtatcaacaccgccaaattgcctaaatcagttgttgctcttttttctcaccccggtgaactatctgcccggtcaggtgatgcacttcaaaaagcctttacagataaagaggaattacttaagcagcaggcatctaaccttcatgagcagaaaaaagctggggtgatatttgaagctgaagaagttatcactcttttaacttctgtgcttaaaacgtcatctgcatcaagaactagtttaagctcacgacatcagtttgctcctggagcgacagtattgtataagggcgataaaatggtgcttaacctggacaggtctcgtgttccaactgagtgtaagagaaaattgaggccattcttaaggaacttgaaaagccaggggggtcctttagagtccacaggcatcccgaatttgctcctccatccacggggactgagagccattactattgctgtatttggtaagcaaaatacgtacatcaggctcgaaccctttaagatcaacgttcttgagcagatcacgaagcatatcgaaaaactgcagtgcggaggtgtagtcaaacaactcagcaggcgtgggaacaatcagcacatcagcagcacatacgacattaatcgtgccgatacccaggttaggcgcgctgtcaataactatgacatcatagtcatgagcaacggagtcttttag

SEQ ID NO: 5205 - DNA, 1932 bp, Homo sapiens
  SIMILAR (418)..(1038): 911254mologous to unidentified cloning vector 29kD protein essential for the replication of mini F plasmid,accession number AB015619,Smith-Waterman Score=970.
  misc_feature (1)...(1932): n = a,t,c or g
atggtggattcgttaattgcgcgcgtaggagtaatggctcgcggtaatgccattactttgcctgtatgtggtcgggatgtgaagtttactcttgaagtgctccggggtgatagtgttgagaagacctctcgggtatggtcagnagtatctggtgtcatagaaattgccgatgggagtcgccgtcgtaaagctgctgcacttaccgaaagtgattatcgtgttctggttggcgagctggatgatgagcagatggctgcattatccagattgggtaacgattatcgcccaacaagtgcttatgaacgtggtcagcgttatgcaagccgattgcagaatgaatttgctggaaatatttctgcgctggctgatgcggagtgtgacaatctaaaaacttgtcacacttcacatggatctgtcatggcggaaacagcggttatcaatcacaagaaacgtaaaaatagcccgcgaatcgtccagtcaaacgacctcactgaggcggcatatagtctctcccgggatcaaaaacgtatgctgtatctgttcgttgaccagatcagaaaatctgatggcaccctacaggaacatgacggtatctgcgagatccatgttgctaaatatgctgaaatattcggattgacctctgcggaagccagtaaggatatacggcaggcattgaagagtttcgcggggaaggaagtggttttttatcgccctgaagaggatgccggcgatgaaaaaggctatgaatcttttccttggtttatcaaactccatccagagggctttacagtgtacatatcaacccatatctcattcccttctttatcgggtttacagaaccggtttacgcagtttcggcttagtgaaacaaaagaaatcaccaatccgtatgccatgcgtttatacgaatccctgtgtcagtatcgtaagccggatggctcaggcatcgtctctctgaaaatcgactggatcatagagcgttaccagctgcctcaaagttaccagcgtatgcctgacttccgccgccgcttcctgcagggattttgccgatttcggaaccaccatcaaacaggattttcgcctgctggggcaaaccagcgtggaccgcttgctgcaactctctcagggccaggcggtgaagggcaatcagctgttgcccgtctcactggtgaaaagaaaaaccaccctggcgcccaatacgcaaaccgcctctccccgcgcgttggccgattcattaatgcagctggcacgacaggtttcccgacttggaaagcgggcagtgagcgcaacgcaattaatgacgatgtcacttatgcaataaagcccacttgctggccggggcttgacattattccttcctgtctggctctgcaccgtattgaaactgagttaatgggcaaatttgatgaaggtaaactgcccaccgatccacacctgatgctccgactggccattgaaactgttgctcatgactatgatgtcatagttattgacagcgcgcctaacctgggtatcggcacgattaatgtcgtatgtgctgctgatgtgctgattgttcccacgcctgctgagttgtttgactacacctccgcactgcagtttttcgatatgcttcgtgatctgctcaagaacgttgatcttaaaggcaatagtaatggctctcagtccccgtggatggaggagcaaattcgggatgcctggggaagcatggttctaaaaaatgttgtacgtgaaacggatgaagttggtaaaggtcagatccggatgagaactgtttttgaacaggccattgatcaacgctcttcaactggtgcctggagaaatgctctttctatttgggaacctgaatgcaatgaaatttcgatcggagtttctctagaccaagatggaggtagcaacagtgtgcttcgtaaacttgtagaacgggagtaa

SEQ ID NO: 5206 - DNA, 1386 bp, Homo sapiens
  SIMILAR (109)..(588): 961254mologous to unidentified cloning vector 29kD protein essential for the replication of mini F plasmid,accession number AB015619,Smith-Waterman Score=792.
  misc_feature (1)...(1386): n = a,t,c or g
atgtcgtacagcagcaagtctgctttgcacttgaaaatccttcaggcaggacaggaggttcttaagtgtgacaatctaaaaacttgtcacacttcacatggatctgtcatggcggaaacagcggttatcaatcacaagaaacgtaaaaatagcccgcgaatcgtccagtcaaacgacctcactgaggcggcatatagtctctcccgggatcaaaaacgtatgctgtatctgttcgttgaccagatcagaaaatctgatggcaccctacaggaacatgacggtatctgcgagatccatgttgctaaatatgctgaaatattcggattgacctctgcggaagccagtaaggatatacggcaggcattgaagagtttcgcggngaaggaaagtgttttttatcgccctgaagaggatgccggcgatgaaaaaagctatgaatcttttccttggtttatcaaacgtgcgcacagtccatccagagggctttacagtgtacatatcaacccatatctcattcccttctttatcgggttacaagacccggttacgcagtttcggcttagtgaaacaaaagaaatcaccaatcctgttggaagttctggccagggaaatcaggcaggagaagaaataaagggcattcaatttggaaaagaggaagtcaaattgtccctgtttgcagatgacatgattgtatatctagaaaaccccattgtctcagcccaaaatctccttaagctgataagcaacttcagcaaagtctcaggatacaaaatcaatgtgcaaaaatcacaagcattcttatacaccaataacagacaaacagagagccaaatcatgagtgaactcccattcacaattgcttcaaagagaataaaatacctaggaatccaacttacaagggatgtgaaggacctcttcaaggagaactacaaaccactgctcaatgagataaaagaggatacaaacaaatggaagaacattccatgctcatgggtaggaagaatcaatattgtgaaaatggccatactgcccaagctcagtcgcatgcatggaagaccacaccaaccacctaacgctgccagtaccctcccgttccccaaacgccgttcacactatggtcagaaatccgaacgtttatctcgaagcggtgacaatagaaaatctcatcccgagtgtcgtcattggcagagctgtgcaaaaaaatcacgatgcctcgccttcacacgaacagtccgacacacaccgcgaagtgcctatcttcttacacgaaccatcgagctcctagaaagcagcgcactttggcatgttcaaacacaacggatatacgcgcccttatacgaaacacttgacccaggcaaccgcactcactgcgaatgggacacctaa

SEQ ID NO: 5207 - DNA, 1734 bp, Homo sapiens
  SIMILAR (799)..(1317): 991254mologous to unidentified cloning vector 29kD protein essential for the replication of mini F plasmid,accession number AB015619,Smith-Waterman Score=897.
atggagtggggcaagttcaaaagactagtcttaccaagtcaaggcaagtcaaaaccagaacaaaggtgccaatacaggcacaccgtgggtgatcaggccacgcttccactcagatccagagtagagaaacgaaatggagaggcagagggaagaatctaccgaaaactatgggatgttgccctgctctgttgtgtccaggaggtcattaatggggaaaggaaacctctgagagcactgactgaagtgaaatcgggatttaggctcagggaggacagcgataagttcgacgccaacgatccgatcctgaaagatcagacgcaagaatggtccggttctgcaacctttacatctgacggaaaaatccgtttattctacactgactattccggtaaacattacggcaaacaaagcctgacaacagcgcagaacgttcagcagtttatcgatgaaggcaattatacatccggcgacaaccatacgctgagagaccctcactacgttgaagacaaaggccataaataccttgtattcgaagccaacacgggaacagaaaacggataccaaggcgaagaatctttatttaacaaagcgtactacggcggcggcacgaacttcttccgtaaagaaagccagaagcttcagcagagcgctaaaaaacgcgatgctgagttagcgaacggcgccctcggtatcatagagttaaataatgattacacattgaaaaaagtaatgaagccgctgatcacttcaaacacgtgtgacaatctaaaaacttgtcacacttcacatggatctgtcatggcggaaacagcggttatcaatcacaagaaacgtaaaaatagcccgcgaatcgtccagtcaaacgacctcactgaggcggcatatagtctctcccgggatcaaaaacgtatgctgtatctgttcgttgaccagatcagaaaatctgatggcaccctacaggaacatgacggtatctgcgagatccatgttgctaaatatgctgaaatattcggattgacctctgcggaagccagtaaggatatacggcaggcattgaagagtttcgcggggaaggaagtggttttttatcgccctgaagaggatgccggcgatgaaaaaggctatgaatcttttccttggtttatcaaacgtgcgcacagtccatccagagggctttacagtgtacatatcaacccatatctcattcccttctttatcgggttacagaaccggtttacgcagtttcggcttagtgaaacaaaagaaatcaccaatccgtatgccatgcgtttatacgaatccctgtgtcagtatcaaggaggaggagaagaagaggaagaagaagaagaagaaggaggaggaggagaaagaggaggagaaggaggaggagaaaaaaatcaggcaccgtgtatgaaatctaacaatgcgctcatcgtcatcctcggcaccgtcaccctggatgctgtaggcataggcttggttatgccggtactgccgggcctcttgcgggatatcgtccattccgacagcatcgccagtcactatggcgtgctgctagcgctatatgcgttgatgcaatttctatgcgcacccgttctcggagcactgtcccaccgctttggccgccgcccagacctgctcgcttcgctacttggagccactatcgactactcgatcatggcgaccacacccgtcctgtggatctacccactaatcaattcaccatcttgttga

SEQ ID NO: 5208 - DNA, 1290 bp, Homo sapiens
  SIMILAR (1)..(354): 991254mologous to unidentified cloning vector 29kD protein essential for the replication of mini F plasmid,accession number AB015619,Smith-Waterman Score=603.
atggcggaatcagcggttatcaatcacaagaaacgtaaaaatagcccgcgaatcgtccagtcaaacgacctcactgaggcggcatatagtctctcccgggatcaaaaacgtatgctgtatctgttcgttgaccagatcagaaaatctgatggcaccctacaggaacatgacggtatctgcgagatccatgttgctaaatatgctgaaatattcggattgacctctgcggaagccagtaaggatatacggcaggcattgaagagtttcgcggggaaggaagtggttttttatcgccctgaagaggatgccggcgatgaaaaaggctatgaatcttttccttggtttatcaaacggccaggcggtgaagggcaatcagctgttgcccgtctcactggtgaaaagaaaaaccaccctggcgcccaatacgcaaaccgcctctccccgcgcgttggccgattcattaatgcagctggcacgacaggtttcccgactggaaagcgggcacaatcttgtgtgaacgcggggaaggccgaaaggatgcattttatggcccgcttcggtaaaggacgaaagtatgctatggcttacaagaggatgagaaattacatgtccattccaagtgtagttcacctgctgtccatggggacccagaactccgcggcgagaagtaggctggaccagagacccatccagaggccatatcgactatccaagcaggaggacacaattgagaggacacaccaggcggcacaaaacagtggcaactggccagatgcaataagtctccacttcaatgtggaatgtgatcatgtcctccttgctgaaggaaggtgtgatggtgccggattcacaaaggcgcaagtgttcaccaacaaggtctcatacccatgggggaagcccccttcctggttgaaaatgtcgcgtgccgttcgcccaatcgactgggagagctggacacaggcgcgtcaggtggtgcgagttaagtgcaatccgtgtaacggaaaaggcgttatcagcaattcgtgtcgctgccatggcaaaggtaaggtgctggacaaggcagaaagcgatcgccagggcgttccagtaatgaaagcctgcgaccgctgcggtggtagaggttacgccaggcttaagttctcaacggtaattgagggcgttaatactgttgcggagataaagaaaacggcggcatatgagcaacttcagccgctatttgaggagttggtcgccgaatgccataaacaggagtctatggctgattccattctctcaaaagtaacgagatga

SEQ ID NO: 5209 - DNA, 3345 bp, Homo sapiens
  SIMILAR (2842)..(3342): 991254mologous to Cloning vector pZC320 SopB,accession number U26464,Smith-Waterman Score=816.
  misc_feature (1)...(3345): n = a,t,c or g
atggagcggcgtaaccgtcgcacaggaaggacagagaaagcgcggatctgggaagtgacggacagaacggtcaggacctggattggggaggcggttgccgccgctgctgctgacggtgtgacgttctctgttccggtcacaccacatacgttccgccattcctatgcgatgcacatgctgtatgccggtataccgctgaaagttctgcaaagcctgatgggacataagtccatcagttcaacggaagtctacacgaaagtttttgcgctggatgtggctgcccggcaccgggctatcagagatgccgagacagcagggcgactaccgcacccggatatggaaattcgaggacgggttgagcaacgtgttggttatacaattgaacaaattaatcatatgcgtgatgtgtttggtacgcgattgcgacgtgctgaagacgtatttccacctgtgatcggggttgctgcccataaaggtggcgtttacaaaacctcagtttctgttcatcttgctcaggatctggctctgaaggggctacgtgttttgctcgtggaaggtaacgacccccagggaacagcctcaatgtatcacggatgggtaccagatcttcatattcatgcagaagacactctcctgcctttctatcttggggaaaaggacgatgtcacttatgcaataaagcccacttgctggccggggcttgacattattccttcctgtctggctctgcaccgtattgaaactgagttaatgggcaaatttgatgaagggttcgagcctgatgtacgtattttgcttaccaaatacagcaatagtaatggctctcagtccccgtggatggaggagcaaattcgggatgcctggggaagcatggttctaaaaaatgttgtacgtgaaacggatgaagttggtaaagctgccccgatggtggattcgttaattgcgcgcgtaggagtaatggctcgcggtaatgccattactttgcctgtatgtggtcgggatgtgaagtttactcttgaagtgctccggggtgatagtgttgagaagacctctcgggtatggtcaggtaatgaacgtgaccaggagctgcttactgaggacgcactggatgatctcatcccttcttttctactgactggtcaacagacaccggcgttcggtcaaagagtatctggtgtcatagaaattgccgattgggaagtcgccgtcgttaagctgctgcactttaccgaagtgattatcgngacatttcgtagaactcccccttgtcacacttcacatggatctgtcatggcggaaacagcggttatcaatcacaagaaacgtaaaaatagcccgcgaatcgtccagtcaaacgacctcactgaggcggcatatagtctctcccgggatcaaaaacgtatgctgtatctgttcgttgaccagatcagaaaatctgatggcaccctacaggaacatgacggtatctgcgagatccatgttgctaaatatgctgaaatattcggattgacctctgcggaagccagtaaggatatacggcaggcattgaagagtttcgcggggaaggaagtggttttttatcgccctgaagaggatgccggcgatgaaaaaggctatgaatcttttccttggtttatcaaacgtgcgcacagtccatccagagggctttacagtgtacatatcaacccatatctcattcccttctttatcgggttacagaaccggtttacgcagtttcggcttagtgaaacaaaagaaatcaccaatccgtatgccatgcgtttatacgaatccctgtgtcagtatcctgccccgatggtggattcgttaattgcgcgcgtaggagtaatggctcgcggtaatgccattactttgcctgtatgtggtcgggatgtgaagtttactcttgaagtgctccggggtgatagtgttgagaagacctctcggacaccggcgttcggtcgaagagtatctggtgtcatagaaattgccgatgggagtcgccgtcgtaaagctgctgcacttaccgaaagtgattatcgtgttctggttggcgagctggatgatgagcagatggctgcattatccagattgggtaacgattatcgcccaacaagtgcttatgaacgtggtcagcgttatgcaagccgattgcagaatgaatttgctggaaatatttctgcgctggctgatgcggaaaatatttcacgtaagattattacccgctgtatcaacaccgccaaattgcctaaatcagttgttgctcttttttctcaccccggtgaactatctgccccggtcagggccataaaatggtccttgtcattgggtacttccgcggcccactcgaaaaactcctgcataaagcccacttgctggccgggtcttgacattattccttcctgtctggctctgcaccgtattgaaactgagttaatgggcaaatttgatgaaggtaaactgcccaccgatccacacctgatgctccgactggccattgaaactgttgctcatgactatgatgtcatagttattgacagctctcctaacctgggtatcggcacgattaatgtcgtatgtgctgctgatgtgctgattgttcccacgcctgctgagttgtttgactacacctccgcactgcagtttttcgatatgcttcgtgatctgctcaagaacgttgatcttaaagggttcgagcctgatgtacgtattttgcttaccaaatacagcaatagtaatggctctcagtccccgtggatggaggagcaaattcgggatgcctggggaagcatggttctaaaaaatgttgtacgtgaaacggatgaagttggtaaagaaactcccacaagtgcttatgaacgtggtcagcgttatgcaagccgattgcagaatgaatttgctggaaatatttctgcgctggctgatgcggaaaatatttcacgtaagattattacccgctgtatcaacaccgccaaattgcctaaatcagttgttgctcttttttctcaccccggtgaactatctgccctgtcaggtgatgcacttcaaaaagcctttacagataaagaggaattacttaagcagcaggcatctaaccttcatgagcagaaaaaagctggggtgatatttgaagctgaagaagttatcactcttttaacttctgtgcttaaaacgtcatctgcatcaagaactagtttaagctcacgacatcagtttgctcctggagcgacagtattgtataagggcgataaaatggtgcttaacctggacaggtctcgtgttccaactgagtgtatagagaaaattgaggccattcttaaggaacttgaaaagccagcaccctga

SEQ ID NO: 5210 - DNA, 1962 bp, Homo sapiens
  SIMILAR (559)..(1062): 981254mologous to Cloning vector pZC320 SopA,accession number U26464,Smith-Waterman Score=875.
atggcggaaacagcggttatcaatcacaagaaacgtaaaaatagcccgcgaatcgtccagtcaaacgacctcactgaggcggcatatagtctctcccgggatcaaaaacgtatgctgtatctgttcgttgaccagatcagaaaatctgatggcaccctacaggaacatgacggtatctgcgagatccatgttgctaaatatgctgaaatattcggattgacctctgcggaagccagtaaggatatacggcaggcattgaagagtttcgcggggaaggaagtggttttttatcgccctgaaaaagatgccggcgatgaaaaaggctatgaatcttttccttgggttatcaaacatcattctcgagagagctccccctcctggtcacgttcattacctgaccatacccgagaggtcttctcaacactatcaccccggagcacttcaagagtaaacttcacatcccgaccacatacaggcaaagtaatggcattaccgcgagccattactcctacgcgcgcaattaacgaatccaccatcggggcagctggtgtcgataacgaagatctggctctgaaggggctacgtgttttgctcgtggaaggtaacgacccccagggaacagcctcaatgtatcacggatgggtaccagatcttcatattcatgcagaatactctctcctgcctttctatcttggggaaaaggacgatgtcacttatgcaataaagcccacttgctggccggggcttgacattattccttcctgtctggctctgcaccgtattgaaactgagttaatgggcaaatttgatgaaggtaaactgcccaccgatccacacctgatgctccgactggccattgaaactgttgctcatgactatgatgtcatagttattgacagcgcgcctaacctgggtatcggcacgattaatgtcgtatgtgctgctgatgtgctgattgttcccacgcctgctgagttgtttgactacacctccgcactgcagtttttcgatatgcttcgtgatctgctcaagaacgttgatcttaaagggttcgagcctgatcgttatgtaagccgattgcagaatcaatttgctggaaatatttctgcgctggctgatgcggaaaatatttcacgtaagattattacccgctgtatcaacaccgccaaattgcctaaatcagttgttgctcttttttctcaccccggtgaactatctgcccggtcatgtgatgcacttcaaaaagcctttacagataaagaggaattacttaagcagcaggcatctaaccttcatgagcagaaaaaagctggggtgatatttgaagctgaagaagttatcactcttttaacttctgtgcttaaaacgtcatctgcatcaagaactagtttaagctcacgacatcagtttgctcctggagcgacagtattgtataagggcgataaaatggtgcttaacctggacagtgcttatgaacgtggtcagcgttatgcaagccgattgcagaatgaatttgctggaaatatttctgcgctggctgatgcggaaaatatttcacgtaagattattacccgctgtatcaacaccgccaaattgcctaaatcagttgttgctcttttttctcaccccggtgaactatctgcccggtcaggtgatgcacttcaaaaagcctttacagataaagaggaattacttaagcagcaggcatctaaccttcatgagcagaaaaaagctggggtgatatttgaagctgaagaagttatcactcttttaacttctgtgcttaaaacgtcatctgcatcaagaactagtttaagctcacgacatcagtttgctcctggagcgacagtattgtataagggcgataaaatggtgcttaacctggacaggtctcgtgttccaactgagtgtatagagaaaattgaggccattcttaaggaacttgaaaagccagcaccctga

SEQ ID NO: 5211 - DNA, 2357 bp, Homo sapiens
  SIMILAR (252)..(1034): 861254mologous to Cloning vector pSacBII SacB,accession number U09128,Smith-Waterman Score=1208.
ctttaaagcctgatgggctagaagccactatccagcgttcagctctaccttccacctccttgcctagctccaaagagtgtgtcccttcacgctttggtgctctccactccaccccattcaaactgttaccctgtcctaccaggtatccattgaccatctctccacaacctaagcaagaaaaggtggaaagagaatattttgggacctatttttggccaaacaaggctttgcagaactttcagcggtataccggcatacagcatgtgcatcgcatagcaatggcggaacgtatgtggtgtgaccggaacagagaacgtcacaccgtcagcagcagcggcggcaaccgcctccccaatccaggatctgatgtgtgggacagctggccgtgccaaaacgctgacggaacagtagctgaatacaccggctatcacgttgtgtttgctcttgcgggaagcccgaaagacgctgatgacacatcaatctacatgttttatcaaaaggtcggcgacaactcaatcgacagctggaaaaacgcgggccgtgtctttaaagacagcgataagttcgacgccaacgatccgatcctgaaagatcagacgcaagaatggtccggttctgcaacctttacatctgacggaaaaatccgtttattctacactgactattccggtaaacattacggcaaacaaagcctgacaacagcgcaggtaaatgtgtcaaaatctgatgacacactcaaaatcaacggagtggaagatcacaaaacgatttttgacggagacggaaaaacatatcagaacgttcagcagtttatcgatgaaggcaattatacatccggcgacaaccatacgctgagagaccctcactacgttgaagacaaaggccataaataccttgtattcgaagccaacacgggaacagaaaacggataccaaggcgaagaatctttatttaacaaagcgtactacggcggcggcacgaacttcttccgtaaagaaagccagaagcttcagcagagcgctaaaaaacgcgatggaaacagttatgaccatgattacgaattcgagctcggtaccccaaagcccttcatagtggaagtaactgcaagtcaagaaaacaagatagatctttgtgacaatctaaaaacttgtcacacttcacatggatctgtcatggcggaaacagcggttatcaatcacaagaaacgtaaaaatagcccgcgaatcgtccagtcaaacgacctcactgaggcggcatatagtctctcccgggatcaaaaacgtatgctgtatctgttcgttgaccagatcagaaaatctgatggcaccctacaggaacatgacggtatctgcgagatccatgttgctaaatatgctgaaatattcggattgacctctgcggaagccagtaaggatatacggcaggcattgaagagtttcgcggggaaggaagtggttttttatcgccctgaagaggatgccggcgatgaaaaaggctatgaatcttttccttggtttatcaaacgtgcgcacagtccatccagagggctttacagtgtacatatcaacccatatctcattcccttctttatcgggttacagaaccggtttacgcagtttcggcttagtgaaacaaaagaaatcaccaatccgtatgccatgcgtttatacgaatccctgtgtcagtatcgtaagccggatggctcaggcatcgtctctctgaaaatcgactggatcatagagcgttaccagctgcctcaaagttaccagcggccaggcggtgaagggcaatcagctgttgcccgtctcactggtgaaaagaaaaaccaccctggcgcccaatacgcaaaccgcctctccccgcgcgttggccgattcattaatgcagctggcacgacaggtttcccgactggaaagcgggcagtgagcgcaacgcaattaataagaagaaggagcaggagaggcagagggagagggagaggtagagggagaaagagaaggagaagaatagggaaagggagaggaagaggaacaagaagaagaagaaaaagaggaggaagaggaagaaggagaagagaagacagagaacaggaagaggaagaaggaaaagaggaggaagaagaaggaggaataggaagaaggagaaaagaagaagaggaggaagaggaagaaggagaagagaagaagaggaagaagaaggagaagaacaagaagaaggaagtacaagaagaagaagaagaaggaagaagaagaagaagaagaaggagaaggagaagagaagaaggggaggaggaggagaaaaacccatgtgagaagaaacaaagtgacttccattcctgcttaggtatctgtggctga

SEQ ID NO: 5212 - DNA, 1710 bp, Homo sapiens
  SIMILAR (259)..(756): 971254mologous to Cloning vector pZC320 SopA,accession number U26464,Smith-Waterman Score=854.
  misc_feature (1)...(1710): n = a,t,c or g
atggatgcaaaattaccctttggaacacccttgaaaaattccttaggaaaaagctacatttggaagcttacctactaccctcagtcggttactggtgctttattttattccatttgggggatctctagactcagcctggggtcagcacgtagttccgagaaaagcagggcggactacccgcacccggatatggaaattcgaggacgggttgagcaaacgtgtttggttatacaattgaccaaattaatcatatgcgtgatgtgtntggatctggctctgaaggggctacgtgttttgctcgtggaaggtaacgacccccagggaacagcctcaatgtatcacggatgggtaccagatcttcatattcatgcagaagacactctcctgcctttctatcttggggaaaaggacgatgtcacttatgcaataaagcccacttgctggccggggcttgacattattccttcctgtctggctctgcaccgtattgaaactgagttaatgggcaaatttgatgaaggtaaactgcccaccgatccacacctgatgctccgactggccattgaaactgttgctcatgactatgatgtcatagttattgacagcgcgcctaacctgggtatcggcacgattaatgtcgtatgtgctgctgatgtgctgattgttcccacgcctgctgagttgtttgactacacctccgcactgcagtttttcgatatgcttcgtgatctgctcaagaacgttatcttaaagggttcgagcctgatggattttgcgaatttcggaaccaccatcaaacaggattttcgcctgctggggcaaaccagcgtggaccgcttgctgcaactctctcagggccaggcggtgaagggcaatcagctgttgcccgtctcactggtgaaaagaaaaaccaccctggcgcccaatacgcaaaccgcctctccccgcgcgttggccgattcattaatgcagctggcacgacaggtttcccgactggaaagcgggcacatttatagcttcctggagtctgctttgagcaactgctttcccttgccttaccttccaatattcaagctcttcagcaaactcactgaggctgcctgcctgcagtgtgacaatctaaaaacttgtcacacttcacatggatctgtcatggcggaaacagcggttatcaatcacaagaaacgtaaaaatagcccgcgaatcgtccagtcaaacgacctcactgaggcggcatatagtctctcccgggatcaaaaacgtatgctgtatctgttcgttgaccagatcagaaaatctgatggcaccctacaggaacatgacggtatctgcgagatccatgttgctaaatatgctgaaatattcggattgacctctgcggaagccagtaaggatatacggcaggcattgaagagtttcgcggggaaggaagtggttttttatcgccctgaagaggatgccggcgatgaaaaaggctatgatcttttcggtggatcctctagagtcaagctgggatgtctgcacagcagagtggcctgttttgacagggcgctgattggtgcgtttacaatccctgagctagatacaaaggttctccacgtccccaccagattagttagatacagagtatccacacaaaggttctccaaggccccaccagagcagctagatacagagtgtcgattggtgcattcacaaaccctgagctag

SEQ ID NO: 5213 - DNA, 1302 bp, Homo sapiens
  SIMILAR (322)..(741): 1001254mologous to Cloning vector pSacBII SacB,accession number U09128,Smith-Waterman Score=740.
atgaaactcatggaaacacttaaccagtgcataaacgctggtcatgaaatgacgaaggctatcgccattgcacagtttaatgatgacagcccggaagcgaggaaaataacccggcgctggagaataggtgaagcagcggatttagttggggtttcttctcaggctatcagagatgccgagaaagcagggcgactaccgcacccggatatggaaattcgaggacgggttgagcaacgtgttggttatacaattgaacaaattaatcatatgcgtgatgtgtttggtacgcgattgcgacgtgctgaagacgtatttccaccggtaaatgtgtcaaaatctgatgacacactcaaaatcaacggagtggaagatcacaaaacgatttttgacggagacggaaaaacatatcagaacgttcagcagtttatcgatgaaggcaattatacatccggcgacaaccatacgctgagagaccctcactacgttgaagacaaaggccataaataccttgtattcgaagccaacacgggaacagaaaacggataccaaggcgaagaatctttatttaacaaagcgtactacggcggcggcacgaacttcttccgtaaagaaagccagaagcttcagcagagcgctaaaaaacgcgatgctgagttagcgaacggcgccctcggtatcatagagttaaataatgattacacattgaaaaaagtaatgaagccgctgatcacttcaaacacgtgtgacaatctaaaaacttgtcacacttcacatggatctgtcatggcggaaacagcggttatcaatcacaagaaacgtaaaaatagcccgcgaatcgtccagtcaaacgacctcactgaggcggcatatagtctctcccgggatcaaaaacgtatgctgtatctgttcgttgaccagatcagaaaatctgatggcaccctacaggaacatgacggtatctgcgagatccatgttgctaaatatgctgaaatattcggattgacctctgcggaagccagtaaggatatacggcaggcattgaagagtttcgcggggaaggaagtggttttttatcgccctgaagagatgccggcgatgaaaaaggctatgaatcttttccttggtttatcaaacgtgcgcacagtccatccagaaggctttacagtgtacatatcaacccatatctcattccccttctttatcgggtaccaaaccgggttacgcagtttcggcttagtgaaacaaaagaatcacccatccgtatgccatgcctttatacgaatccctgtgtcagtattctaa

SEQ ID NO: 5214 - DNA, 1452 bp, Homo sapiens
  SIMILAR (133)..(714): 901254mologous to unidentified cloning vector 29kD protein essential for the replication of mini F plasmid,accession number AB015619,Smith-Waterman Score=913.
atgagcagatggctgcattatccagattgggtaacgattatcgcccaacaagtgcttatgaacgtggtcagcgttatgcaagccgattgcagaatgaatttgcttgaaatatttctgcgctggctgatgcggaaaatatttcactcaaacgacctcactgaggcggcatatagtctctcccgggatcaaaaacgtatgctgtatctggggggggaccagatcagaaaatctgatggcaccctacaggaacatgacggtatctgcgagatccatgttgctaaatatgctgaaatattcggattgacctctgcggaagccagtaaggatatacggcaggcattgaagagtttcgcggggaaggaagtggttttttatcgccctgaagaggatgccggcgatgaaaaaggctatgaatcttttccttggtttatcaaacgtgcgcacagtccatccagagggctttacagtgtacatatcaacccatatctcattcccttcatgtatcggttacagaaccggtttacgcagtttcggcttagtgaaacaaaagaaatcaccaatccgtatgccatgcgtttatacgaatccctgtgtcagtatcgtaagccggatggctcaggcatcgtctctctggaaatcgactggatcataagaccgttaccagctgcctcaaagtaccagcgtatgcctgacttccgccgccgctttctggaaggcttagagcttaaatgcctgtttgtcgactctagaggatccccgttaatgggcaaatttgatgaaggtaaactgcccaccgatccacacctgatgctccgactgaacattgaaactgttgctcatgactatgatgtcatagttattgacagcgcgcctaacctgggtatcggcacgattaatgtcgtatgtgctgctgatgtgctgattgttcccacgcctgctgagttgtttgactacacctggcgactgcagtttttcgatatgcttcgtgatctgctcaagaacgttgatcttaaagggttcgagcctgatgtacgtattttgcttaccaaatacagcaatagtaatggctctcagtccccgtggatggaggagcaaattcgggatgcctggggaagcatggttctaaaaaatgttgtacgtgaaacggatgaagttggtaaagaacggagtaacctcggtgtgcggttgtatgcctgctgtggattgctgctgtgtcctgcttatccacaacattttgcgcacggttatgtggacaaaatacctggttacccaggccgtgccggcacgttaaccgggctgcatccgatgcaacattctgccgacatggaagccatcacaaacggcatgatgaacctgaatcgccagcggcatcagcaccttgtcgccttgcgtataatatttgcccatggtgaaaacgggggcgaagaagttgtccatattggccacgtttaa

SEQ ID NO: 5215 - DNA, 1326 bp, Homo sapiens
  SIMILAR (571)..(1323): 991254mologous to unidentified cloning vector 29kD protein essential for the replication of mini F plasmid,accession number AB015619,Smith-Waterman Score=1293.
atgggaaagggcttcatgactaaaacaccaaaagcaatggcaacaaaagccaaaattgacaaatgggatctaattaaactaaagaacttctgcacagcaaaagaaactaccatcagagtgaacaggaaacctacagaatgggagagaatttttgcaatctactcatctgacaaagggctaatatccagaatctacaaagaactcaaacaaattgacaagaaaaaaacaaacaaccccatcaaaaagggggtatttattcgcgataagctcatggagcggcgtaaccgtcgcacaggaaggacagagaaagcgcggatctgggaagtgacggacagaacggtcaggacctggattggggaggcggttgccgccgctgctgctgacggtgtgacgttctctgttccggtcacaccacatacgttccggcattcctatgcgatgcacatgctgtatgccggtataccgctgaaagttctgcaaagcctgatgggacataagtccatcagttcaacggaagtctacacgaagtgtgacaatctaaaaacttgtcacacttcacatggatctgtcatggcggaaacagcggttatcaatcacaagaaacgtaaaaatagcccgcgaatcgtccagtcaaacgacctcactgaggcggcatatagtctctcccgggatcaaaaacgtatgctgtatctgttcgttgaccagatcagaaaatctgatggcaccctacaggaacatgacggtatctgcgagatccatgttgctaaatatgctgaaatattcggattgacctctgcggaagccagtaaggatatacggcaggcattgaagagtttcgcggggaaggaagtggttttttatcgccctgaagaggatgccggcgatgaaaaaggctatgaatcttttccttggtttatcaaacgtgcgcacagtccatccagagggctttacagtgtacatatcaacccatatctcattcccttctttatcgggttacagattctttttacgcagtttcggcttagtgaaacaaaagaaatcaccaatccgtatgccatgcgtttatacgaatccctgtgtcagtatcgtaagccggatggctcaggcatcgtctctctgaaaatcgactggatcatagagcgttaccagctgcctcaaagttaccagcgtatgcctgacttccgccgccgcttcctgcaggtctgtgttaatgagatcaacagcagaactccaatgcgcctctcatacattgagaaaaagaaaggccgccagacgactcatatcgtattttccttccgcgatatcacttccatgacgacaggatag

SEQ ID NO: 5216 - DNA, 1560 bp, Homo sapiens
  SIMILAR (745)..(1329): 1001254mologous to unidentified cloning vector 29kD protein essential for the replication of mini F plasmid,accession number AB015619,Smith-Waterman Score=1020.
atgattgtttatctagaaaaccccatcgtctcagcccaaaatctccttaagctgataagcaacttcagcaaagtctcaggatacaaaatcaatgtacaaaaatcacaagcattcttatacaccaacaacagacaaacagagagccaaatcatgggtgaactcccattcacaattgcttcaaagagaataaaatacctaggaatccaacttacaagggatgtgaaggacctcttcaaggagaactacaaaccactgctcaaggaaataaaagaggacacaaacaaatggaagaacattccatgctcatgggtaggaagaatcaatatcgtgaaaatggccatactgcccaaggtacccagggagcagcctcagcggcacccgcagaggagtctgagcaagggcaccaagatctggccaagagataacgacgtccagggaccaggtgcccttcggctcccgccgacctgttgctcgaaacttgccctgagctctcgctgccgggctctgggctcccaagcctctcccccgccgccgcagcagcctcttttaggggcccggaagaaatgggagccggggctgtcaggcaccgagtatgaaatctacaatgcgctcattgtcatcctaggcaccgacaccctggatgctgtaggcataggcttggttatgccgatacttgcgggcctcttgcggaaaattgcccattccgacaggattcccaggaacttgggcgtggtaaatcccccagcggttatcaatcacaagaaacgtaaaaatagcccgcgaatcgtccagtcaaacgacctcactgaggcggcatatagtctctcccgggatcaaaaacgtatgctgtatctgttcgttgaccagatcagaaaatctgatggcaccctacaggaacatgacggtatctgcgagatccatgttgctaaatatgctgaaatattcggattgacctctgcggaagccagtaaggatatacggcaggcattgaagagtttcgcggggaaggaagtggttttttatcgccctgaagaggatgccggcgatgaaaaaggctatgaatcttttccttggtttatcaaacgtgcgcacagtccatccagagggctttacagtgtacatatcaacccatatctcattcccttctttatcgggttacagaaccggtttacgcagtttcggcttagtgaaacaaaagaaatcaccaatccgtatgccatgcgtttatacgaatccctgtgtcagtatcgtaagccggatggctcaggcatcgtctctctgaaaatcgactggatcatagagcgttaccagctgcctcaaagttaccagcttcgatatcaaccttttggagtagacactattattccgaattcacaaaagaaggtaaaagctttgaagagattacctgatttgacaaatatcacagaactgggaaatcatggatctgggataacacctggcctgtgtgatctagagccaaagcctggaactctggtttgcaccatacgggaggtttatgccaaaattgccagttttacactccaactgatatttaattag

SEQ ID NO: 5217 - DNA, 2262 bp, Homo sapiens; identical to SEQ ID NO: 4935
  SIMILAR (1)..(405): 1001254mologous to Cloning vector pZC320 SopA,accession number U26464,Smith-Waterman Score=691.

SEQ ID NO: 5218 - DNA, 2421 bp, Homo sapiens
  SIMILAR (1597)..(2319): 981254mologous to Cloning vector pBACe3.6 levansucrase,accession number U80929,Smith-Waterman Score=1250.
atggcggaaacagcggttatcaatcacaagaaacgtaaaaatagcccgcgaatcgtccagtcaaacgacctcactgaggcggcatatagtctctcccgggatcaaaaacgtatgctgtatctgttcgttgaccagatcagaaaatctgatggcaccctacaggaacatgacggtatctgcgagatccatgttgctaaatatgctgaaatattcggattgacctctgcggaagccagtaaggatatacggcaggcattgaagagtttcgcggggaaggaagtggttttttatcgccctgaagaggatgccggcgatgaaaaaggctatgaatcttttccttggtttatcaaacgtgcgcacagtccatccagagggctttacagtgtacatatcaacccatatctcattcccttctttatcgggttacagaaccggtttacgcagtttcggctgaacttcgtgcagaaatctcgcctagtggatctggctctgaaggggctacgtgttttgctcgtggaaggtaacgacccccagggaacagcctcaatgtatcacggatgggtaccagatcttcatattcatgcagaagacactctcctgcctttctatcttggggaaaaggacgatgtcacttatgcaataaagcccacttgctggccggggcttgacattattccttcctgtctggctctgcaccgtattgaaactgagttaatgggcaaatttgatgaagcggttatcaatcacaagaaacgtaaaaatagcccgcgaatcgtccagtcaaacgacctcactgaggcggcatatagtctctcccgggatcaaaaacgtatgctgtatctgttcgttgaccagatcagaaaatctgatggcaccctacaggaacatgacggtatctgcgagatccatgttgctaaatatgctgaaatattcggattgacctctgcggaagccatagctgaatacaacggctatcacgttgtgtttgctcttgcgggaagcccgaaagacgctgatgacacatcaatctacatgttttatcaaaaggtcggcgacaactcaatcgacagctggaaaaacgcgggccgtgtctttaaagacagcgataagttcgacgccaacgatccgatcctgaaagatcagacgcaagaatggtccggttctgcaacctttacatctgacggaaaaatccgtttattctacactgactattccggtaaacattacggcaaacaaagcctgacaacagcgcaggtaaatgtgtcaaaatctgatgacacactcaaaatcaacggagtggaagatcacaaaacgatttttgacggagacggaaaaacatatcagaacgttcagcagtttatcgatgaaggcaattatacatccggcgacaaccatacgctgagagaccctcactacgttgaagacaaaggccataaataccttgtattcgaagccaacacgggaacagaaaacggataccaaggcgaagaatctttatttaacaaagcgtactacggcggcggcacgaacttcttccgtaaagaaagccagaagcttcagcagagcgctaaaaaacgcgatgctgagttagcgaacggcgccctcgacctgacaacagcgcaggtaaatgtgtcaaaatctgatgacacactcaaaatcaacggagtggaagatcacaaaacgatttttgacggagacggaaaaacatatcagaacgttcagcagtttatcgatgaaggcaattatacatccggcgacaaccatacgctgagagaccctcactacgttgaagacaaaggccataaataccttgtattcgaagccaacacgggaacagaaaacggataccaaggcgaagaatctttatttaacaaagcgtactacggcggcggcacgaacttcttccgtaaagaaagccagaagcttcagcagagcgctaaaaaacgcgatgctgagttagcgaacggcgccctcggtatcatagagttaaataatgattacacattgaaaaaagtaatgaagccgctgatcacttcaaacacggtaactgatgaaatcgagcgcgcgaatgttttcaaaatgaacggcaaatggtacttgttcactgattcacgcggttcaaaaatgacgatcgatggtattaactcaaacgatatttacatgcttggttatgtatcaaactctttaaccggcccttacaagccgctgaacaaaacagggcttgtgctgcaaatgggtcttgatccaaacgatgtgacattcacttactctcacttcgcagtgccgcaagccaaaggcaacaatgtggttatcacaagcgcatgcggtgctgaatcgacgttttatgtagaggatccccccggctggtctcagactcctggactcaagagatcctcctgccttggcctcccaaaatgctga

SEQ ID NO: 5219 - DNA, 1218 bp, Homo sapiens; identical to SEQ ID NO: 4938
  SIMILAR (1157)..(1216): 601254mologous to unidentified cloning vector 29kD protein essential for the replication of mini F plasmid,accession number AB015619,Smith-Waterman Score=52.

SEQ ID NO: 5220 - DNA, 2031 bp, Homo sapiens
  SIMILAR (709)..(1071): 951254mologous to unidentified cloning vector 29kD protein essential for the replication of mini F plasmid,accession number AB015619,Smith-Waterman Score=591.
atggactacagatccaagttcctggagttgcaaccaattagtgctggtgcaagagatacacgtttaactttgaagagctttaaagtctttcccatctcactaaatggcaatcccattcactcaatagctcaggcaaaaaccttagaagccactcttgattcctttgttgctacactctctgacatccagttcatcagcaaatccagtgggccaaccagcaagaaaagagggactgcagtcctacaaccacaaggaaccaaatactgtcaacaatctgaaggagcaagagaacggatttccttgctccagcaagaaatgcagccttgcagatgccttcattttagccacactgaagacttgtaccagacttctgaactacagaactgtcagatcccccctatttctgggtttgaatcactggatggttgggaaagaagagtggcagaagataatcaagttagcgtctttaccaatggtgaagccataggggaggtcacggtttacccggccaaatggctcagggaaatggttctcaaaagtgaaaaccaagggggcccacgaaatggccacatgaatggagacgagtgttcgaaggtcgtggggccgctggaagatggatctcaggctaggatgaggaaacctgacctacaacaactcgatagccattgtgacaatctaaaaacttgtcacacttcacatggatctgtcatggcggaaacagcggttatcaatcacaagaaacgtaaaaatagcccgcgaatcgtccagtcaaacgacctcactgaggcggcatatagtctctcccgggatcaaaaacgtatgctgtatctgttcgttgaccagatcagaaaatctgatggcaccctacaggaacatgacggtatctgcgagatccatgttgctaaatatgctgaaatattcggattgacctctgcggaagccagtatggatatacggcaggcattgaagagtttcgcggggaaggaagtggttttttatcgccctgaagaagatgccggcgatgaaaaaagctatgaatcttttccttggtttatcaaaccttgtttttcttttaacagtcaggcccctcttctgcagggttgctgcggtttgctggggatccactccagagcctattcacctgggtcccttccacccctggaggtgttaccagtgtatgctgcagaacagcaaagatcggttgcctgctcgttcctctgggatgtctatctcatgaggagcactgacctgatgacagctggaatgctcctgtataaggtgtctggtgacccctggtcgactctagaggatccccttctagacaccaggaatggccctccactgacagccagcaagaaaagagggactgcagtcctacaaccacaaggaaccaaatactgtcaacaatctgaaggagcaagagaacggatttccttgctccagcaagaaatgcagccttgcagatgccttcattttagccacactgaagacttgtaccagacttctgaactacagaactgtcagatccctaaacagcagcaaaacgaaaaataccaagtgcctcaattcgatcaatcagcgaatcaaaatattgagtctgcaaaaggacttgatgtgcgggacagctgggcgctgcaaaacgctgacggaacagtcggcgacaactcaatcgaccgctggctcaacgcgggccgtgtctttaaagacagcgataagttcggcgccaacgatccgatcctgaaagatcaaacgcaagaatggtccggttctgcgaacctttatcatctgacggaaaaatccgtttattctacactgactattccggtaaatcagtacggtctgatgtcactctccaaatcaacggagtgtgaagatcacggtacgatttttgatcggcacggagaaacatatccgaacgttcaggagtttatcgatgaaggctatcatacctccggcgactaccgtacgctgagcagcttgcatgcctgcaggtcgactctagaggatcccaacattcatttgagcctttga

SEQ ID NO: 5221 - DNA, 1653 bp, Homo sapiens
  SIMILAR (487)..(1101): 1001254mologous to unidentified cloning vector 29kD protein essential for the replication of mini F plasmid,accession number AB015619,Smith-Waterman Score=1075.
atggtggattcgttaattgcgcgcgtaggagtaatggctcgcggtaatgccattactttgcctgtatgtggtcgggatgtgaagtttactcttgaagtgctccggggtgatagtgttgagaagacctctcgggtatggtcaggtaatgaacgtgaccaggagctgcttactgaggacgcactggatgatctcatcccttcttttctactgactggtcaacagacaccggcgttcggtcgaagagtatctggtgtcatagaaattgccgatgggagtcgccgtcgtaaagctgctgcacttaccgaaagtgattatcgtgttctggttggcgagctggatgatgagcagatggctgcattatccagattgggtaacgattatcgcccaacaagtgcttatgaacgtggtcagcgttatgcaaaccgcttgcagaatgaatttgctggaaatatttttgcgctggctggggcgcaaaatatttcaccggttatcaatcacaagaaacgtaaaaatagcccgcgaatcgtccagtcaaacgacctcactgaggcggcatatagtctctcccgggatcaaaaacgtatgctgtatctgttcgttgaccagatcagaaaatctgatggcaccctacaggaacatgacggtatctgcgagatccatgttgctaaatatgctgaaatattcggattgacctctgcggaagccagtaaggatatacggcaggcattgaagagtttcgcggggaaggaagtggttttttatcgccctgaagaggatgccggcgatgaaaaaggctatgaatcttttccttggtttatcaaacgtgcgcacagtccatccagagggctttacagtgtacatatcaacccatatctcattcccttctttatcgggttacagaaccggtttacgcagtttcggcttagtgaaacaaaagaaatcaccaatccgtatgccatgcgtttatacgaatccctgtgtcagtatcgtaagccggatggctcaggcatcgtctctctgaaaatcgactggatcatagagcgttaccagctgcctcaaagttaccagcgtatgcctgacttccgccgccgcttcctgcaggatctggctctgaaggggctacgtgttttgctcgtggaaggtaacgacccccagggaacagcctcaatgtatcacggatgggtaccagatcttcatattcatgcagaagacactctcctgcctttctatcttggggaaaaggacgatgtcacttatgcaataaagcccacttgctggccggggcttgacattattccttcctgtctggctctgcaccgtattgaaactgagttaatgggcaaatttgatgaaggtaaactgcccaccgatccacacctgatgctccgactggccattgaaactgttgctcatgactatgatgtcatagttattgacagcgcgcctaacctgggtatcggcacgattaatgtcgtatgtgctgctgatgtgctgattgttcccacgcctgctgagttgtttgactacacctccgcactgcagtttttcgatatgcttcgtgatctgctcaagaacgttgatcttaaagggttcgagcctgatatttgccagtgggaggaggagctgaaggagcctgcagaagccgacctttga

SEQ ID NO: 5222 - DNA, 1449 bp, Homo sapiens
  SIMILAR (826)..(1446): 1001254mologous to unidentified cloning vector 29kD protein essential for the replication of mini F plasmid,accession number AB015619,Smith-Waterman Score=1090.
atgatgtggtctgtccttttacagccagtagtgctcgccgcagttgagcgacagggcgaagccctcgaaatgggcagtgcagcttaccaaggacgatgtccccaggacaaagagagctacaacatgctctctgtagagtctgagaaccacctaccagggaaagttaccacagacagcaacctcaacccccagccccagcagggggaaacagcggttatcaatcacaagaaacgtaaaaatagcccgcgaatcgtccagtcaaacgacctcactgaggcggcatatagtctctcccgggatcaaaaacgtatgctgtatctgttcgttgaccagatcagaaaatctgatggcaccccacaggaacagacggtattctgcgagatccatgttgctaaatatgctgaaatattcggattgacctctgcggaagccagtaaggatatacggcaggcattgaagagtttcgcggggaaggaagtggttttttatcgccctgaagaggatgccggcgatgaaaaaggctatgaatcttttccttggtttatcaaacgtgcgcacagtccatccagagggctttacagtgtacatatcaacccatatctcattcccttctttatcgggttacagaaccggtttacgcagtttcggcttagtgaaacccaagaaatcaccaatccgtatgccatgcgtttatacgaatccctgtgtcagtatcgtaagccggatggctcaggcatcgtctctctgaaaatcgactggatcatagagcgttaccagctgcctcacagttaccagcgtatgcctgacttccgccgccgcttcctgcagatcagaaaatctgatggcaccttacaggaacatgacggtatctgcgagatccatgttgctaaatatgctgaaatattcggattgacttctgcggaagccagtaaggatatacggcaggcattgaagagtttcgcggggaaggaagtggttttttatcgccctgaagaggatgccggcgatgaaaaaggctatgaatcttttccttggtttatcaaacgtgcgcacagtccatccagagggctttacagtgtacatatcaacccatatctcattcccttctttatcgggttacagaaccggtttacgcagtttcggcttagtgaaacaaaagaaatcaccaatccgtatgccatgcgtttatacgaatccctgtgtcagtatcgtaagccggatggctcaggcatcgtctctctgaaaatcgactggatcatagagcgttaccagctgcctcaaagttaccagcgtatgcctgacttccgccgccgcttcctgcaggtctgtgttaatgagatcaacagcagaactccaatgcgcctctcatacattgagaaaaagaaaggccgccagacgactcatatcgtattttccttccgcgatatcacttccatgacgacaggatag

SEQ ID NO: 5223 - DNA, 1791 bp, Homo sapiens
  SIMILAR (751)..(1266): 951254mologous to unidentified cloning vector 29kD protein essential for the replication of mini F plasmid,accession number AB015619,Smith-Waterman Score=852.
atggagcccagtgatgaggctgctgatatagttcacacagaaggagagagtttgatctgggacagaagcgctaggtatggagaggaggaaggaaatatttctgctaacagtactcggcgtgctcgctggtataccaaacttgtattctttcgtgaccatagaccttttcctgtgcccttatcatcgcttttcagtgatggagaaaatgttggttgtgttgatgtaattattcaaagagcataccctatacagctgctgaatatgtacagggaactgagtgacataaagacacacatgaagaaagccagtgcagtcattgcagctgaccctctctattcagacggcgcgtggtcagagcccactttcacgtccagtgaagcagccatacagtccatgctggagtgcatgaagaacaacgaactcggcaaagctttgcggcagatcagagagtgcagaacaccagaagaattgcataacttttcattaaattctgaatcacattctgacataagaaagaacaaaatgcacattctaagttatgaggacacacacatagttacacacaaaatactgaaagagagtgtcccagttggtactggaaatcaaatagtgaccttacaggcacaacccgaacgtgatgaaaagatcaaagaacctactctattgggttttcatacagctagcgggaaaaaagttaaaatctcaaagtgtgacaatctaaaaacttgtcacacttcacatgtatctgtcatggcggaaacagcggttatctatcacaagaaatgtaaaaatagcccgcgtatcgtacagtcaaacgacctcactgaggcggcatatagtctctcccgggatcaaaaacgtatgctgtatctgttcgttgaccagatcagaaaatctgatggcaccctacaggaacatgacggtatctgcgagatccatgttgctaaatatgctgaaatattcggattgacctctgcgaaagccagtaaggatatacggcaggcattgaagagtttcgcggggaagaaagtggttttttatcgccctgaagaggatgccggcgatgaaaaaggctatgaatcttttccttggtttatcaaacgtgcgcacagtccatccagagggctttacagtgtacatatcaacccatatctcattcccttctttatcgggttacagaaccggtttacgcagtttcggcttagtgaaacaaaagaaatcaccaatccgtatgccatgcgtttatacgaatgcctagcgtactacggcggcggcacgaatttcttctgtaaagaaagccagaagcttcagcagagcgctaaaaaacgcgatgctgagttagcgaacggcgccctcggtatcatagagttaaataatgattacacattgaaaaaagtaatgaagccgctgatcacttcaaacacggtaactgatgaaatcgagcgcgcgaatgttttcaaaatgaacggcaaatggtacttgttcactgattcacgcgcttcaaaaatgacgatcgatggtattaactcaaacgatatttacatgcttggttatgtatcaaactctttaaccggcccttacaagccgatgaacaaaacagggcttgtgctgcaaatgggtcttgatccaaacgatgtgacattcacttactctcacttcgcagtgccgcaagccaaaggcaacaatgtggttatcacaagctacatgacaaacagaggcttcttcgaggataaaaaggcaacatttgcgccaagggggatctatagagtccacaaaaggctgcaagcctaa

SEQ ID NO: 5224 - DNA, 1896 bp, Homo sapiens
  SIMILAR (34)..(783): 941254mologous to Cloning vector pSacBII SacB,accession number U09128,Smith-Waterman Score=1243.
  misc_feature (1)...(1896): n = a,t,c or g
atgtcatgccacntagtcnggctgaatacaccgggctatcacgttgtgtttgctcttggggaaagcccgaaagacgctgatgacacatcaatctacatgttttatcaaaaggtcggcgacaactcaatcgacagctggaaaaacgcgggccgtgtctttaaagacagcgataagttcgacgccaacgatccgatcctgaaagatcagacgcaagaatggtccggttctgcaacctttacatctgacggaaaaatccgtttattctacactgactattccggtaaacattacggcaaacaaagcctgacaacagcgcaggtaaatgtgtcaaaatctgatgacacactcaaaatcaacggagtggaagatcacaaaacgatttttgacggagacggaaaaacatatcagaacgttcagcagtttatcgatgaaggcaattatacatccggcgacaaccatacgctgagagaccctcactacgttgaagacaaaggccataaataccttgtattcgaagccaacacgggaacagaaaacggataccaaggcgaagaatctttatttaacaaagcgtactacggcggcggcacgaacttcttccgtaaagaaagccagaagcttcagcagagcgctaaaaaacgcgatgctgagttagcgaacggcgccctcggtatcatagagttaaataatgattacacattgaaaaaagtaatgaagccgctgatcacttcaaacacggtctgtgttaatgagatcaacagcagaactccaatgcgcctctcatacattgagaaaaagaaaggccgccagacgactcatatcacaccggcgttcggtcgaagagtatctggtgtcatagaaattgccgatgggagtcgccgtcgtaaagctgctgcacttaccgaaagtgattatcgtgttctggttggcgagctggatgatgagcgagggtgtgacaatctaaaaacttgtcacacttcacatggatctgtcatggcggaaacagcggttatcaatcacaagaaacgtaaaaatagcccgcgaatcgtccagtcaaacgacctcactgaggcggcatatagtctctcccgggatcaaaaacgtatgctgtatctgttcgttgaccagatcagaaaatctgatggcaccctacaggaacatgacggtatctgcgagatccatgttgctaaatatgctgaaatattcggattgacctctgcggaagccagtaaggatatacggcaggcattgaagagtttcgcggggaaggaagtggttttttatcgccctgaagaggatgccggcgatgaaaaaggctatgaatcttttccttggtttatcaaacgtgcgcacagtccatccagagggctttacagtgtacatatcaacccatatctcattcccttctttatcgggttacagaaccggtttacgcagtttcggcttagtgaaacaaaagaaatcaccaatccgtatgccatgcgtttatacgaatccctgtgtcagtatcaatgtgactccaggcagaaagccagggaaaatgtggggatctctacagaaactgagcgggcagccacagtttttaaaaattattcatctggatcttcgatagagaagatgtactatattcagtgggtactcattggtccaaagggccatgttttccaaccaataacaatagtgggaaaagctgaccacgtacagacaggagcaaactgtgacaaactgcagggcacaaaatccaaacaggccagttacgaccattggctgacagttgatggtgataatgtcccgtgtcggcggcacgataacacacgcggagagcctccaacaccgcggaacacaccgccccggcgaaaacacagactctggggagaagacgctccccgttactaa

SEQ ID NO: 5225 - DNA, 2154 bp, Homo sapiens
  SIMILAR (742)..(1167): 991254mologous to synthetic construct chloramphenicol acetyltransferase,accession number A02739,Smith-Waterman Score=778.
atggagaaaaaaatcactggatataccaccgttgatatatcccaatggcatcgtaaagaacattttgaggcatttcagtcagttgctcaatgtacctataaccagaccgttcagctggatattacggcctttttaaagaccgtaaagaaaaataagcacaagttttatccggcctttattcacattcttgcccgcctgatgaatgctcatccggagttccgtatggcaatgaaagacgggtttattgagaatatgtttttcgtctcagccaatccctgggtgagtttcaccagttttgatttaaacgtggccaatatggacaacttcttcgcccccgttttcaccatgggcaaatattatacgcaaggcgacaaggtgctgatgccgctggcgattcagtttttcgatatgcttcgtgatctgctcaagaacgttgatcttaaagggttcgagcctgatgtacgtattttgcttaccaaatacagcaatagtaatggctctcagtccccgtggatggaggagcaaattcgggatgcctggggaagcatggttctaaaaaatgttgtacgtgaaacggatgaagttggtaaagacaccggggttcggtcgaagatatctggtgtcataaaaatgccgatgggagtcgccgtcgtaaactgctgcacttacggaagtgattatcgggtctggttggcgagctggatgatgagccaatggctgcattatccagaatggtaccgtaaagaaaataagcacaagttttatccggcctttattcacattcttgcccgcctgatgaatgctcatccggagttccgtatggcaatgaaagacggtgagctggtgatatgggatagtgttcacccttgttacaccgttttccatgagcaaactgaaacgttttcatcgctctggagtgaataccacgacgatttccggcagtttctacacatatattcgcaagatgtggcgtgttacggtgaaaacctggcctatttccctaaagggtttattgagaatatgtttttcgtctcagccaatccctgggtgagtttcaccagttttgatttaaacgtggccaatatggacaacttcttcgcccccgttttcaccatgggcaaatattatacgcaaggcgacaaggtgctgatgccgctggcgattcagtttttcgatatgcttcgtgatctgctcaagaacgttgatcttaaagggttcgagcctgatgtacgtattttgcttaccaaatacagcaatagtaatggctctcagtccccgtggatggaggagcaaattcgggatgcctggggaagcatggttctaaaaaatgttgtacgtgaaacggatgaagttggtaaaggtcagatccggatgggtaccgagctcgaattctttcggcttagtgaaacaaaagaaatcaccaatccgtatgccatgcgtttatacgaatccctgtgtcagtatcgtaagccggatggctcaggcatcgtctctctgaaaatcgactggatcatagagcgttaccagctgcctcaaagttaccagcgtatgcctgacttccgccgccgcttcctgcagtgtgacaatctaaaaacttgtcacacttcacatggatctgtcatggcggaaacagcggttatcaatcacatgaaacgtaaaaatagcccgcgaatcgtccagtcaaacgacctcactgaggcggcatatagtctctcccgggatcaaaaacgtatgctgtatctgttcgttgaccagatcagaaaatctgatggcaccctacaggaacatgacggtatctgcgagatccatgttgctaaatatgctgaaatattcggattgacctctgcggaagccagtatggatatacagcatgcattgaagagtttctcggggaaggaagtggttttttatcgccctgaagaggatgccggcgatgaaaaagctatgaatcttttccttggtttatcaaacgtgcgcacagtccatccagagggctttacagtgtacatatcaacccatatctcattcccttctttatcgggttacagaaccggtttacgcagtttctgcttagtgaaacaaaagaaatcaccaatccgtatgccatgcgtttatacgaatgcctgtgtcagtatcccgtgtaaccgagcatag

SEQ ID NO: 5226 - DNA, 1170 bp, Homo sapiens
  SIMILAR (430)..(1053): 901254mologous to unidentified cloning vector 29kD protein essential for the replication of mini F plasmid,accession number AB015619,Smith-Waterman Score=946.
  misc_feature (1)...(1170): n = a,t,c or g
atgaacatgaacatcaaaaaaattgtaaaacaagccacagttctgacttttacgactgcacttctggcaggaggagcgactcaagccttcgcgaaagaaaataaccaaaaagcatacaaagaaacgtacggcgtctctcatattacacgccatgatatgctgcagatccctaaacagcagcaaaacgaaaaataccaagtgcctcaattcgatcaatcaacgattaaaaatattgagtctgcaaaaggacttgatgtgtgggacagctggccgctgcaaaacgctgacggaacagtagctgaatacaacggctataacgttgtgtttgctcttgcgggaagccccgaagacgctgatgacacatcaatctacatgttttatcaaaagtgtgacaatctaaaaacttgtcacacttcacatggatctgtcatggcggaaacagcggttatcaatcacaagaaacgtaaaaatagcccgcgaatcgtccagtcaaacgacctcactgaggcggcatatagtctctcccgggatcaaaaacgtatgctgtatctgttcgttgaccagatcagaaaatctgatggcaccctacaggaacatgacggtatctgcgagatccatgttgctaaatatgctgaaatattcggattgacctctgcggaagccagtaaggatatacggcaggcattgaagagtttcgcggggaaggaagtggttttttatcgccctgaagaggatgccggcgatgaaaaaggctatgaatcttttccttggtttatcaaacgtgcgcacagtccatccagagggctntacagtgtacatatcaacccatatctcattcccttctttatcgggttacagaaccggtttacgcagtttcggcttagtgaaacaaaagaaatcaccaatccgtatgccatgcgtttatacgaatccctgtgtcagtatcggaaagccggatggctcaggcatcgtctctctgaaaatgactggatcataaagcgttcccagctgcctcaaagtgccttctaccaaccctttatggggctgcggagggagagtttttatttccgctgggaaagacggaccttgggtcccctaaaaagttttagtgttaaaaggggaacggaagccggaaaattcagacttgcagcccttttggtgcgactctaa

SEQ ID NO: 5227 - DNA, 1398 bp, Homo sapiens
  SIMILAR (691)..(1170): 1001254mologous to unidentified cloning vector 29kD protein essential for the replication of mini F plasmid,accession number AB015619,Smith-Waterman Score=830.
atgcctgcaagcggtaacgaaaacgatttgaatatgccttcaggaacaatagaaatcttcgtgcggtgttacgttgaagtggagcggattatggattttgccgatttcggaaccaccatcaaacaggattttcgcctgctggggcaaaccagcgtggaccgcttgctgcaactctctcagggccaggcggtgaagggcaatcagctgttgcccgtctcactggtgaaaagaaaaaccaccctggcgcccaatacgcaaaccgcctctccccgcgcgttggccgattcattaatgcagctggcacgacaggtttcccgactggaaagcgggcatcaggcaccgtgtatgaaatctaacaatgcgctcatcgtcatcctcggcaccgtcaccctggatgctgtaggcataggcttggttatgccggtactgccgggcctcttgcgggatatcgtccattccgacagcatcgccagtcactatggcgtgctgctagcgctatatgcgttgatgcaatttctatgcgcacccgttctcggagcactgtccgaccgctttggccgccgcccagtcctgctcgcttcgctacttggagccactatcgactacgcgatcatggcgaccacacccgtcctgtggatctacccactatgtgacaatctaaaaacttgtcacacttcacatggatctgtcatggcggaaacagcggttatcaatcacaagaaacgtaaaaatagcccgcgaatcgtccagtcaaacgacctcactgaggcggcatatagtctctcccgggatcaaaaacgtatgctgtatctgttcgttgaccagatcagaaaatctgatggcaccctacaggaacatgacggtatctgcgagatccatgttgctaaatatgctgaaatattcggattgacctctgcggaagccagtaaggatatacggcaggcattgaagagtttcgcggggaaggaagtggttttttatcgccctgaagaggatgccggcgatgaaaaaggctatgaatcttttccttggtttatcaaacgtgcgcacagtccatccagagggctttacagtgtacatatcaacccatatctcattcccttctttatcgggttacagaaccggtttacgcagtttcggcttagtgaaacaaaagaaatcaccaatccggattttgccgatttcggaaccaccatcaaacaggattttcgcctgctggggcaaaccagcgtggaccgcttgctgcaactctctcagggccaggcgaacccagatttcttcccccgtggaggacgcagccttaaaggtcccgctttgaaaccagaaagccagaccttcatccagttatcaaccctgctggcaactagacttgtacttcctaccgctgcaaaactgtga

SEQ ID NO: 5228 - DNA, 1827 bp, Homo sapiens
  SIMILAR (1138)..(1806): 961254mologous to Cloning vector pZC320 SopA,accession number U26464,Smith-Waterman Score=1137.
atgaacatgaacatcaaaaaaattgtaaaacaagccacagttctgacttttacgactgcacttctggcaggaggagcgactcaagccttcgcgaaagaaaataaccaaaaagcatacaaagaaacgtacggcgtctctcatattacacgccatgatatgctgcagatccctaaacagcagcaaaacgaaaaataccaagtgcctcaattcgatcaatcaacgattaaaaatattgagtctgcaaaaggacttgatgtgtgggacagctggccgctgcaaaacgctgacggaacagtagctgaatacaacggctatcacgttgtgtttgctcttgcgggaagcccgaaagacgctgatgacacatcaatctacatgttttatcaaaagatcagacgcaagaatggtccggtttctgcaacctttacatctgacggaaaaatccgtttattctacactgactattccggtaaacattacggcaaacaaagcctgacaacagcgcagtgtgacaatctaaaaacttgtcacacttcacatggatctgtcatggcggaaacagcggttatcaatcacaagaaacgtaaaaatagcccgcgaatcgtccagtcaaacgacctcactgaggcggcatatagtctctcccgggatcaaaaacgtatgctgtatctgttcgttgaccagatcagaaaatctgatggcaccctacaggaacatgacggtatctgcgagatccatgttgctaaatatgctgaaatattcggattgacctctgcggaagccagtaaggatatacggcaggcattgaagagtttcgcggggaaggaagtggttttttatcgccctgaagaggatgccggcgatgaaaaaggctatgaatcttttccttggtttatcaaacgtgcgcacagtccatccagagggctttacagtgtacatatcaacccatatctcattcccttctttatcgggttacagaaccggtttacgcagtttcggcttagtgaaacaaaagaaatcaccaatccgtatgccatgcgtttatacgaatccctgtgtcagtatcgtaagccggatggctcaggcatcgtctctctgaaatcgactggacatagagcgtaccagctgcctaaagttcccagcccggaagcgaggaaaataacccggcgctggagaataggtgaagcagcggatttagttggggtttcttctcaggctatcagagatgccgagaaagcagggcgactaccgcacccggatatggaaattcgaggacgggttgagcaacgtgttggttatacaattgaacaaattaatcatatgcgtgatgtgtttggtacgcgattgcgacgtgctgaagacgtatttccaccggtgatcggggttgctgcccataaaggtggcgtttacaaaacctcagtttctgttcatcttgctcaggatctggctctgaaggggctacgtgttttgctcgtggaaggtaacgacccccagggaacagcctcaatgtatcacggatgggtaccagatcttcatattcatgcagaagacactctcctgcctttctatcttggggaaaaggacgatgtcacttatgcaataaagcccacttgctggccggggcttgacattattccttcctgtctggctctgcaccgtattgaaactgagttaatgggcaaatttgatgaaagtaaactgcccaccgatccacacctgatgctccgactggccattgaaactgttgctcatgactatgatgtcatagttattgacagcgcgcctaacctggtgcttagtcttaatattgaggacagtcggaaaagttga

SEQ ID NO: 5229 - DNA, 1668 bp, Homo sapiens
  SIMILAR (1063)..(1656): 921254mologous to Cloning vector pZC320 SopB,accession number U26464,Smith-Waterman Score=901.
atggcggaaacagcggttatcaatcacaagaaacgtaaaaatagcccgcgaatcgtccagtcaaacgacctcactgaggcggcatatagtctctcccgggatcaaaaacgtatgctgtatctgttcgttgaccagatcagaaaatctgatggcaccctacaggaacatgacggtatctgcgagatccatgttgctaaatatgctgaaatattcggattgacctctgcggaagccagtaaggatatacggcaggcattgaagagtttcgcggggaaagaagtggttttttatcgccctgaagaggatgccggcgatgaaaaagctatgaatcttttcccttggttatcaaacattattacccgctgtatcaacaccgccaaattgcctaaatcagttgttgctcttttttctcaccccggtgaactatctgcccggtcaggtgatgcacttcaaaaagcctttacagataaagaggaattacttaagcagcaggcatctaaccttcatgagcagaaaaaagctgggatggcctccagctctaaaattttatcctattctgccagtgatacaactgccagagctctggggtcagtcctggagcagaagtgtttaaatgaaatatttccaccaagaatagttcttaaaatcaaaaaggctgccattttcatagctgcccaacagcctcagtttctggttacctcgcgtgcgcttcacttttggggggaagaagagaaggggagggaggcaccgaggggggcagccgagttgctatttgtggccaaagaatccgctttaaaagaagaggcagcaggaaggaggaaagaggagaggcggagggaggagaggagacgcggccccggaccccccagccgcgagcggcggagcatcgaggagcgggaggaggaggaagaggaggaggaggaggagggggaggagacaaacagcggcggcggcggcagcgagagaagcgggcgcagggcgagcaggaggagcgggaggaggagaaaccgccgcggaagccgcgggctcagaagggccaagaggacggcccgggaagaggaggaggaggcggaggaggaggaaaagggggatccaaatactgaacgtgaccaggagctgcttactgaggacgcactggatgatctcatcccttcttttctactgactggtcaacagacaccggcgttcggtcgaagagtatctggtgtcatagaaattgccgatgggagtcgccgtcgtaaagctgctgcacttaccgaaagtgattatcgtgttctggttggcgagctggatgatgagcagatggctgcattatccagattgggtaacgattatcgcccaacaagtgcttatgaacgtggtcagcgttatgcaagccgattgcagaatgaatttgctggaaatatttctgcgctggctgatgcggaaaatatttcacgtaagattattacccgctgtatcaacaccgccaaattgcctaaatcagttgttgctcttttttctcaccccggtgaactatctgcccggtcaggtgatgcacttcaaaaagcctttacagataaagaggaattacttaagcagcaggcatctaaccttcatgagcagaaaaaagctggggtgatatctgaagctgaagaagttatcactctttttaccttctgtgcttaa

SEQ ID NO: 5230 - DNA, 2823 bp, Homo sapiens
  SIMILAR (2823)..(2233): 1001254mologous to Cloning vector pZC320 SopA,accession number U26464,Smith-Waterman Score=1035.
  misc_feature (1)...(2823): n = a,t,c or g
ttaacacagacgtttgataaaccaaggaaaagattcatagcctttttcatcgccggcatcctcttcagggcgataaaaaaccacttccttccccgcgaaactcttcaatgcctgccgtatatccttactggcttccgcagaggtattnccgaatatttcagcatatttagcaacatggatctcgcagataccgtcatgttcctgtagggtgccatcagattttctgatctggtcaacgaacagatacagcatacgtttttgatcccgggagagactatatgccgcctcagtgaggtcgtttgactggacgattcgcgggctattttttcgtttcttgtgactgatacccgcatcgatcgtcatttttgaaccgcgtgaatcagtgaacaagtaccatttgccgttcattttgaaaacattcgcgcgctcgatttcatcagttaccgtgtttgaagtgatcagcggcttcattacttttttcaatgtgtaatcattatttaactctatgataccgagggcgccgttcgctaactcagcatcgcgttttttagcgctctgctgaagcttctggctttctttacggaagaagttcgtgccgccgccgtagtacgctttgttaaataaagattcttcgccttggtatccgttttctgttcccgtgttggcttcgaatacaaggtatttatggcctttgtcttcaacgtagtgagggtctctcagcgtatggttgtcgccggatgtataattgccttcatcgataaactgctgaacgttctgatatgtttttccgtctccgtcaaaaatcgttttgtgatcttccactccgttgattttgagtgtgtcatcagattttgacacatttacctgcgctgttgtcaggctttgtttgccgtaatgtttaccggaatagtcagtgtagggggattgcatggcatacggattggtgatttcttttgtttcactaagccgaaactgcgtaaaccggttctgtaacccgataaagaagggaatgagatatgggttgatatgtacactgtaaagccctctggatggactgtgcgcacgtttgataaaccaaggaaaagattcatagcctttttcatcgccggcatcctcttcagggcgataaaaaaccacttccttccccgcgaaactcttcaatgcctgccgtatatccttactggcttccgcagaggtcaatccgaatatttcagcatatttagcaacatggatctcgcagataccgtcatgttcctgtagggtgccatcagattttctgatctggtcaacgaacagatacagcatacgtttttgatcccgggagagactatatgccgcctcagtgaggtcgtttgactggacgattcgcgggctatttttacgtttcttgtgattgataaccgctgtttccgccatgacagatccatgtgaagtgtgacaagtttttagattgtcacattnccgatctgcctttttcatctgacaccttcccaaagccacagtttcctcattcttaacataggattcattagtcctacttctgtccaggttaagcaccattttatcgcccttatacaatactgtcgctccaggagcaaactgatgtcgtgagcttaaactagttcttgatgcagatgacgttttaagcacagaagttaaaagagtgataacttcttcagcttcaaatatcaccccagcttttttctgctcatgaaggttagatgcctgctgcttaagtaattcctctttatctgtaaaggctttttgaagtgcatcacctgaccgggcagatagttcaccggggtgagaaaaaagagcaacaactgatttaggcaatttggcggtgttgatacagcgggtaataatcttacgtgaaatattttccgcatcagccagcgcagaaatatttccagcaaattcattctgcaatcggcttgcataacgctgaccacgttcataagcacttgttgggcgataatcgttacccaatctggataatgcagccatctgctcatcatccagctcgccaaccagaacacgataatcactttcggtaagtgcagcagctttacgacggcgactcccatcggcaatttctatgacaccagatactcttcgaccgaacgccggtgtctgttcttcccttgctgtgtgatcatgaatcatacacaaatgagcctctctcagctgggtcctgagccacgatgtgagaagaacctcactctcaaattcttcatcaaatttgcccattaactcagtttcaatacggtgcagagccagacaggaaggaataatgtcaagccccggccagcaagtgggctttattgcataagtgacatcgtccttttccccaagatagaaaggcaggagagtgtcttctgcatgaatatgaagatctggtacccatccgtgatacattgaggctgttccctgggggtcgttaccttccacgagcaaaacacgtagccccttcagagccagatcctgagcaagatgaacagaaactgaggttttgtaaacgccacctttatgggcagcaaccccgatcaccggtggaaatacgtcttcagcacgtcgcaatcgcgtaccaaacacatcacgcatatgattaatttgttcaattgtataaccaacacgttgctcaacccgtcctcgaatttccatatccgggtgcggtagtcgccctgctttctcggcatctctgatagcctgagaagaaaccccaactaaatccgctgcttcacctattctccagcgccgggttattttcctcgcttccgggctgtcatcattaaactgtgcaatggcgatagccttcgtcat

SEQ ID NO: 5231 - DNA, 1332 bp, Homo sapiens
  SIMILAR (1281)..(1331): 1001254mologous to Cloning vector pZC320 SopA,accession number U26464,Smith-Waterman Score=85.
  misc_feature (1)...(1332): n = a,t,c or g
atggcggaaacagcggttatcaatcacaagaaacgtaaaaatagcccgcgaatcgtccagtcaaacgacctcactgaggcggcatatagtctctcccgggatcaaaaacgtatgctgtatctgttcgttgaccagatcagaaaatctgatggcaccctacaggaacatgacggtatctgcgagatccatgttgctaaatatgctgaaatattcggattgacctctgcggaagccagtaaggatatacggcaggcattgaagagtttcgcggggaaggaagtggttttttatcgccctgaagaggatgccggcgatgaaaaaggctatgaatcttttccttggtttatcaaacgtgcgcacagtccatccagagggctttacagtgtacatatcaacccatatctcattcccttctttatcgggttacacaaccggtttacgcagtttcggcttagtgaaacacaagagatcaccaatccgcatgccatgcgtttatacgaatccctgtgtcagtatcgtaagccggatggctcatgcattgtctctctgaaaatcgactggatcatagaagcgtaccagctgcctcaaattaccaacctatgcctgacttccgccccgtttcctgcagggctgggttatgagatcaacaacgaactccaagcgcctctatacattaagaaaanggatctggctctgaaggggctacgtgttttgctcgtggaaggtaacgacccccagggaacagcctcaatgtatcacggatgggtaccagatcttcatattcatgcagaagacactctcctgcctttctatcttggggaaaaggacgatgtcacttatgcaataaagcccacttgctggccggggcttgacattattccttcctgtctggctctgcaccgtattgaaactgagttaatgggcaaatttgatgaaggtaaactgcccaccgatccacacctgatgctccgactggccattgaaactgttgctcatgactatgatgtcatagttattgacagcgcgcctaacctgggtatcggcacgattaatgtcgtatgtgctgctgatgtgctgattgttcccacgcctgctgagttgtttgactacacctccgcactgcagtttttcgatatgcttcgtgatctgctcaagaacgttgatcttaaagggttcgagcctgatgtacgtattttgcttaccaaatacagcaatagtaatggctctcagtccccgtggatggaggagcaaattcgggatgcctggggaagcatggttctaaaaatgttgttcgtgaaacggatgaagttggtaaaggtcagatccggatga

SEQ ID NO: 5232 - DNA, 1611 bp, Homo sapiens
  SIMILAR (919)..(1608): 891254mologous to Escherichia coli K12 putative transposase,accession number AE000232,Smith-Waterman Score=1084.
  misc_feature (1)...(1611): n = a,t,c or g
atggagttttacatgaaggctttcaataagctgttttccctcgttgttgcatctgttctggttttctctcgtgctggctgcggtgacaaagaagaatcgaagaaattcagcgccaatttgaacggcactgaaattgccattacctatgtctacaaaggtgacaaggtgcttaagagggccttagcacttaccacgtacactttcgcctcttaccatttccaccttaatccggttagccaattcccgtttacgctttccccgttaggatgtgacgccgatatgattttaaaaataaaccccctccgccgtatgacgcctttcggcgctttaaaaataaaaaactgtgacaatctaaaaacttgtcacacttcacatggatctgtcatggcggaaacagcggttatcaatcacaagaaacgtaaaaatagcccgcgaatcgtccagtcaaacgacctcactgaggcggcatatagtctctcccgggatcaaaaacgtatgctgtatctgttcgttgaccagatcagaaaatctgatggcaccctacaggaacatgacggtatctgcgagatccatgttgctaaatatgctgaaatattcggattgacctctgcggaagccagtaaggatatacggcaggcattgaagagtttcgcggggaaggaagtggttttttatcgccctgaagaggatgccggcgatgaaaaaggctatgaatcttttccttggtttatcaaacgtgcgcacagtccatccagagggctttacagtgtacatatcaacccatatctcattcccttctttatcgggttacagaaccggtttacgcagtttcggcttagtgaagggtacccaaacccttggaaaatccccccgtttaatatatccccaagggcaatgggaaagaacaattttgagccattccagtccagttgcccaatggaccctaaaacaagccggtccaagtgggatattccggcttttttaaaagnccaattcaatgcattaatggaaagtgaaaaaggacagagccagaacttgtggaaatttgccgtttactcaggacttcgtcacggggaactggcagctctggcgtgggagaatgtggatctcgaaaagggaatagtgaatgtcagaagaaacctgacgatacttgatatgttcggtcccccaaaaacaaatgccgggatccgaacagtaacactactgcagcctgctcttgaagcactgaaggagcaatacaaactgaccgggcatcatcgcaaaagcgaaatcaccttttatcatcgggagtacggcagaaccgaaaagcaaaaactgcattttgttttcatgcccagggtgtgtaacggaaaacaaaaaccttattactcggtaagcagtttgggggcaaggtggaatgcagcagtaaaacgtgctggtattcgccgccgtaatccgtaccatacgcggcatacttttgcctgctggctgttgacggcaggagcgaacccggcatttatagccagccaaatggggcatgaaactgcgcagatggtgtatgaaatttacggtatgtggattgatgacatgaacgccgagcagataaccatgttgaatgcgcggttatcgtag

SEQ ID NO: 5233 - DNA, 1453 bp, Homo sapiens
  SIMILAR (515)..(1219): 881254mologous to Cloning vector pSacBII SacB,accession number U09128,Smith-Waterman Score=1066.
atggcggaaacagcggttatcaatcacaagaaacgtaaaaatagcccgcgaatcgtccagtcaaacgacctcactgaggcggcatatagtctctcccgggatcaaaaacgtatgctgtatctgttcgttgaccagatcagaaaatctgatggcaccctacaggaacatgacggtatctgcgagatccatgttgctaaatatgctgaaatattcggattgacctctgcggaagccagtaaggatatacggcaggcattgaagagtttcgcggggaaggaagtggttttttatcgccctgaagaggatgccggcgatgaaaaaggctatgaatcttttccttggtttatcaaacgtgcgcacagtccatccagagggctttacagtgtacatatcaacccatatctcattcccttctttatcgggttacagaaccggtttacgcagtttcggcttagtaaacaaaagagggtatcctctagactcaactgggaaagcgataagtttgacgcccaccgatccgatcctgaaagatcagaggcaagaatggtccggttctgcaacctttacatctgacggaaaaatccgtttattctacactgactattccggtaaacattacggcaaacaaagcctgacaacagcgcaggtaaatgtgtcaaaatctgatgacacactcaaaatcaacggagtggaagatcacaaaacgatttttgacggagacggaaaaacatatcagaacgttcagcagtttatcgatgaaggcaattatacatccggcgacaaccatacgctgagagaccctcactacgttgaagacaaaggccataaataccttgtattcgaagccaacacgggaacagaaaacggataccaaggcgaagaatctttatttaacaaagcgtactacggcggcggcacgaacttcttccgtaaagaaagccagaagcttcagcagagcgctaaaaaacgcgatgctgagttagcgaacggcgccctcggtatcatagagttaaataatgattacacattgaaaaaagtaatgaagccgctgatcacttcaaacacggtaactgatgaaatcgagcgcgcgaatgttttcaaaatgaacggcaaatggcaggcaccgtgtatgaaatctaacaatgcgctcatcgtcatcctcggcaccgtcaccctggatgctgtaggcataggcttggttatgccggtactgccgggcctcttgcgggatatcgtccattccgacagcatcgccagtcactatggcgtgctgctagcgctatatgcgttgatgcaatttctatgcgcacccgttctcggagcactgtccgaccgctttggccgccgcccagtcctgctcgcttcgctacttggagccactatcgactacgcgatcatggcgaccacacccgtcctgtggatctacccactagtcaattcaccatcttgttga

SEQ ID NO: 5234 - DNA, 4164 bp, Homo sapiens
  SIMILAR (2926)..(3804): 991254mologous to Cloning vector pZC320 SopA,accession number U26464,Smith-Waterman Score=1524.
atgactgagtacaagatccaccagcgctggttcgccaagttgaagcgcaaggctgcggcaaagctgcgcgagatcgagcagagctggaagcacgagaaggcggtgcctggggaggtcgacactctgcgcaagctcagccccgaccgcttccagcgaaagcggcgattgagcggggctcaagcgccgggcccctcggtccctaccagggagcctgagggtgggaccctggcggcttggcaggagggagagactgagactgctcagcactcaggtttgggcctgatcaacagttttgcttctggagaagtgaccaccaacggggaggctgcccccgagaatggagaggacggagagcatggcttgctgacatacatctgtgacgccatggagctggggcctcagagagccctcaaagaggagagtggggccaagaagaaaaagaaagatggggagtgggattttcccgatttcggaaccaccatcaaacaggattttcgcctgctggggcaaaccagcgtggaccgcttgctgcaactctctcagggccaggcggtgaagggcaatcagctgttgcccgtctcactggtgaaaagaaaaaccaccctggcgcccaatacgcaaaccgcctctccccgcgcgttggccgattcattaatgcagctggcacgacaggtttcccgactggaaagcgggcacccttgccagcatccagccatgggggatatgaaaaccccagattttgatgaccttctggctgcctttgacatcccagaccccaccagccttgatgccaaggaggccatccagacacccaggacgcctcatgctcccaagcacagccgcccccagaggggaagtgtggaccaggcggaaggagaaacatgccgagggccacagtcaccaggcccagtcgaggccaagcaggaggccagcccgttccagtgccccaaggaggagcggccagggggagtgccgtgtatggatcagggtggctgtcctctagctggcctgagccaggaggtacccacgatgccttctcttcctggaactgggctgacagctagcccaaaggcggggccgtgtagcaccccgacttctcagcacgggagcacagccaccttcctgccctctgaggatcaggtcctgatgagttctgccccaacactgcacctggggctggggacccccactcagagtcacccaccagaaaccatggccaccagcagtgagggggcctgcgcccaggcaccagatgtggaggggcggaccccaggtccccggagctgtgaccctggcctcatagattccctgaagaactacctgcttctgctgctgaagctgtccagcacagagacaagtggagcagggggagagtcccaggtgggggcagccaccggaggtctggtgccctcagccactctgacacccactgtggaagtggctggaaggagacatgaacatgaacatcaaaaaaattgtaaaacaagccacagttctgacttttacgactgcattctggcaggaggagcgactcaagccttcgcgaaagaaaataaccaaaaagcatacaaagaaacgtacggcgtctctcatattacacgccatgatatgctgcagatccctaaacagcagcaaaacgaaaaataccaagtgcctcaattcgatcaatcaacgattaaaaatattgagtctgcaaaaggacttgatgtgtgggacagctggccgctgcaaaacgctgacggaacagtagctgaatacaacggctatcacgttgtgtttgctcttgcgggaagcccgaaagacgctgatgacacatcaatctacatgttttatcaaaaggtcggcgacaactcaatcgacagctggaaaaacgcgggccgtgtctttaaagacagcgataagttcgacgccaacgatccgatcctgaaagatcagacgcaagaatggtccggttctgcaaccttcacatctgacggaaaaatccgtttattctacactgactattccggtaaacattacggcaaacaaagcctgacaacagcgcaggtaaatgtgtcaaaatctgatgacacactcaaaatcaacggagtggaagatcacaaaactatttttgacggagacggaaaaacatatcagaacgttcagcagtttatcgatgaaggcaattatacgggggatcctctagaggcggaaacagcggttatcaatcacaagaaacgtaaaaatagcccgcgaatcgtccagtcaaacgacctcactgaggcggcatatagtctctcccgggatcaaaaacgtatgctgtatctgttcgttgaccagatcagaaaatctgatggcaccctacaggaacatgacggtatctgcgagatccatgttgctaaatatgctgaaatattcggattgacctctgcggaagccagtaaggatatacggcaggcattgaagagtttcgcggggaaggaagtggttttttatcgccctgaagaggatgccggcgatgaaaaaggctatgaatcttttccttggtttatcaaacgtgcgcacagtccatccagagggctttacagtgtacatatcaacccatatctcattcccttctttatcgggttacagaaccggtttacgcagtttcggcttagtgaaacaaaagaaatcaccaatccgtatgccatgcgtttatacgaatccctgtgtcagtatcgtaagccggatggctcaggcatcgtctctctgaaaatcgactggatcatagagcgttaccagctgcctcaaagttaccagcgtacgcctgacttccgccgccgcttcctgcaggtctgtgttaatgagatcaacagcagaactccaatgcgcctctcatacattgagaaaaagaaaggccgccagacgactcatatcgatgttcagattgaaactgatggaaaactcaaccagtgcataaacgctggtcatgaaatgacgaaggctatcgccattgcacagtttaatgatgacagcccggaagcgaggaaaataacccggcgctggagaataggtgaagcagcggatttagttggggtttcttctcaggctatcagagatgccgagaaagcagggcgactaccgcacccggatatggaaattcgaggacgggttgagcaacgtgttggttatacaattgaacaaattaatcatatgcgtgatgtgtttggtacgcgattgcgacgtgctgaagacgtatttccaccggtgatcggggttgctgcccataaaggtggcgtttacaaaacctcagtttctgttcatcttgctcaggatctggctctgaaggggctacgtgttttgctcgtggaaggtaacgacccccagggaacagcctcaatgtatcacggatgggtaccagatcttcatattcatgcagaagacactctcctgcctttctatcttggggaaaaggacgatgtcacttatgcaataaagcccacttgctggccggggcttgacattattccttcctgtctggctctgcaccgtattgaaactgagttaatgggcaaatttgatgaaggtaaactgcccaccgatccacacctgatgctccgactggccattgaaactgttgctcatgactatgatgtcatagttattgacagcgcgcctaacctgggtatcggcacgattaatgtcgtatgtgctgctgatgtgctgattgttcccacgcctgctgagttgtttgactacacctccgcactgcagtttttcgatatgcttcgtgatctgctcaagaacgttgatcttaaagggttcgagcctgatgtatttattcgcgataagctcatggagcggcgtaaccgtcgcacaggaaggacagagaaagcgcggatctgggaagtgacggacagaacggtcaggacctggattggggaggcggttgccgccgctgctgctgacggtgtgacgttctctgttccggtcacaccacatacgttccgccattcctatgcgatgcacatgctgtatgccggtataccgctgaaagttctgcaaagcctgatgggacataagtccatcagttcaacggaagtctacacgaaggtttttgcgctggatgtggctgcccggcaccgggtgcagtttgcgatgccggagtctgatgcggttgcgatgctgaaacaattatcctga

SEQ ID NO: 5235 - DNA, 2902 bp, Homo sapiens
  SIMILAR (517)..(1176): 981254mologous to Cloning vector pSacBII SacB,accession number U09128,Smith-Waterman Score=1177.
atggcggaaacagcggttatcaatcacaagaaacgtaaaaatagcccgcgaatcgtccagtcaaacgacctcactgaggcggcatatagtctctcccgggatcaaaaacgtatgctgtatctgttcgttgaccagatcagaaaatctgatggcaccctacaggaacatgacggtatctgcgagatccatgttgctaaatatgctgaaatattcggattgacctctgcggaagccagtaaggatatacggcaggcattgaagagtttcgcggggaaagaagtggttttttatcgccctgaagaggatgccggcgatgaaaaaggctatgaatcttttccttggtttatcaaacgtgcgcacagtccatccagagggctttacagtgtacatatcaacccatatctcattcccttctttatcgggttacagaaccggtttacgcagtttcggcttagtgaaacaaaagatatcaccaatccgtatgccatgcgtttatacgaatccctgtgtcagtatctgcctcaattcgatcaatcaacgattaaaaatattgagtctgcaaaaggacttgatgtgtgggacagctggccgctgcaaaacgctgacggaacagtagctgaatacaacggctatcacgttgtgtttgctcttgcgggaagcccgaaagacgctgatgacacatcaatctacatgttttatcaaaaggtcggcgacaactcaatcgacagctggaaaaacgcgggccgtgtctttaaagacagcgataagttcgacgccaacgatccgatcctgaaagatcagacgcaagaatggtccggttctgcaacctttacatctgacggaaaaatccgtttattctacactgactattccggtaaacattacggcaaacaaagcctgacaacagcgcaggtaaatgtgtcaaaatctgatgacacactcaaaatcaacggagtggaagatcacaaaacgatttttgacggagacggaaaaacatatcagaacgttcagcagtttatcgatgaaggcaattatacatccggcgacaaccatacgctgagagaccctcactacgttgaagacacaggccataaataccttgtgttcgaagccaacacgggaacagataacggataccaaggcgaagaatctttatttaacaaagcgtactacgggcggcggcacgaacttcttccgtatagaaagccagaagcttcagcagagcgctaaaaaacgcgatgctgagttagcgaacggcgccctcggtatcatagagttaaataatgattacacattgaaaaaagtaatgaagccgctgatcacttcaaacacggtaactgatgaaatcgagcgcgcgaatgttttcaaaatgaacggcaaatggtacttgttcactgattcacgcggttcaaaaatgacgatcgatgcggcatatagtctctcccgggatcaaaaacgtatgctgtatctgttcgttgaccaaatcagaaaatctgatggcaccctacaggaacatgacggtatctgcgagatccatgttgctaaatatgctgaaatattcggattgacctctgcggaagccagtaaggatatacggcaggcattgaagagtttcgcggggaaggaagtggttttttatcgccctgaagaggatgccggcgatgaaaaaggctatgaatcttttccttggtttatcaaacggtttattgagaatatgtttttcgtctcagccaatccctgggtgagtttcaccagttttgatttaaacgtggccaatatggacaacttcttcgcccccgtgtggaccatgggcaaatattatacgcaaggcgacaaggtgctgatgccgctggcgattcaggttcatcatgccgtttgtgatggcttccatgtcggcagaatgcttaatgaattacaacagtactgcgatgagtggcagggcggggcagatgtcacttatgcaggagcgcccacttgctggccagagcttgacattattccttcctgtctggctctgcaccgtattgaaactgagttaatgggcaaatttgatgaaggtaaactgcccaccgatccacacttgatgctcctactggccattgaaactgttgctcatgactatggtggggtagttattgacagcgcgcctaacctgggtatcggcacgatgagggtagtatgtgctgctgatgtactaattgttcccacgcctgctgagttgtttgactacacctccgcactgcagtttttcgatatgcttcgtgatctgctcaagaacgttgatcttaaagggttcgagcctgatgtacgtattttgcttaccaaatacagcaatagtgatggctctcagcccccgtggatagaggagcaaattccggatgcgctgggaagcatggttcttaaaaatgttcaaaatacgtacatcaggctcgaaccctttaagatcaacgttcttgagcagatcacgaagcatatcgaaaaactgcagtgcggaggtgtagtcaaacaactcagcaggcgtgggaacaatcagcacatcagcagcacatacgacattaatcgtgccgatacccacaaccggtttacgcagtttcggcttagtgaaacaaaagaaatcaccaatccgtatgccatgcgtttatacgaatccctgtgtcagtatcgtaagccggatggctcaggcatcgtctctctgaaaatcgactggagcatagagcgttaccagctgcctcaaagttaccagcgtatgcctgacttccgccgccgcttcctgcaggtctgtgttaatgagatcaacagcagaactccaatgcgcctctcatacattgagaaaaagaaaggccgccagacgactcatatcgtattttccttccgcgatatcacttccatgacgacaggatag

SEQ ID NO: 5236 - DNA, 5909 bp, Homo sapiens
  SIMILAR (5001)..(5864): 1001254mologous to Cloning vector pZC320 SopA,accession number U26464,Smith-Waterman Score=1509.
atggcggtgaagaacacgttcttaagaagagacatctgttccgaagagagaaagcatcaaaccctatcacgggctattcttttaaccggtaaggaatttggccgcatgcgaaaccaccatcaaacgggagaatccccgggagaggcaaaccagcaagagccgctgcatgcaactctagcagggacaggcggtgaaggacaatcagctgttgcccgtctcactggtgaaaagaaaaaccaccctggcgcccaatacgcaaaccgcctctccccgcgcgttggccgattcattaatgcagctggcacgacaggtttccagattggaaagcgggcagtgaccccccctccccccataataggcgagaatctcaaacctgtcgacggtgagcgggagcatgtgtacgcacatgcacgtgtacgttgcgggaagtcagggaccccgaacggagggagcggctggagctgcggccgaggcacggattttgccgatttcggaaccaccatcaaacaggattttcgcctgctggggcaaaccagcgtggaccgcttgctgcaactctctcagggccaggcggtgaagggcaatcagctgttgcccgtctcactggtgaaaagaaaaaccaccctggcgcccaatacgcaaaccgcctctccccgcgcgttggccgattcattaatgcagctggcacgacaggtttcccgactggaaagcgggcagtgagcgcaacgcaattaattgacgcggccgaacctcgtcgctttcgtattgcctctcgtgtgatttcggcagcgttcggtcgcgtttccacctacggtgccgaatgcatgtgtatcagtccgctcaagagaacgggattttgccgatttcggaaccaccatcaaacaggattttcgcctgctggggcaaaccagcgtggaccgcttgctgcaactctctcagggccaggcggtgaagggcaatcagctgttgcccgtctcactggtgaaaagaaaaaccaccctggcgcccaatacgcaaaccgcctctccccgcgcgttggccgattcattaatgcagctggcacgacaggtttcccgactggaaagcgggcatgtgacaatctaaaaacttgtcacacttcacatggatctgtcatggcggaaacagcggttatcaatcacaagaaacgtaaaaatagcccgcgaatcgtccagtcaaacgacctcactgaggcggcatatagtctctcccgggatcaaaaacgtatgctgtatctgttcgttgaccagatcagaaaatctgatggcaccctacaggaacatgacggtatctgcgagatccatgttgctaaatatgctgaaatattcggattgacctctgcggaagccagtaaggatatacggcaggcattgaagagtttcgcggggaaggaagtggttttttatcgccctgaagaggatgccggcgatgaaaaaggctatgaatcttttccttggtttatcaaacgtgcgcacagtccatccagagggctttacagtgtacatatcaacccatatctcattcccttctttatcgggttacagaaccggtttacgcagtttcggcttagtgaaacaaaagaaatcaccaatccgtatgccatgcgtttatacgaatccctgtgtcagtatcgtaagccggatggctcaggcatcgtctctctgaaaatcgactggatcatagagcgttaccagctgcctcaaagttaccagcgtatgcctgacttccgccgccgcttcctgcaggtctgtgttaatgagatcaacagcagaactccaatgcgcctctcatacattgagaaaaagaaaggccgccagacgactcatatcgctatcagagatgccgagaaagcagggcgactaccgcacccggatatggaaattcgaggacgggttgagcaacgtgttggttatacaattgaacaaattaatcatatgcgtgatgtgtttggtacgcgattgcgacgtgctgaagacgtatttccaccggtgatcggggttgctgcccataaaggtggcgtttacaaaacctcagtttctgttcatcttgctcaggatctggctctgaaggggctacgtgttttgctcgtggaaggtaacgacccccagggaacagcctcaatgtatcacggatgggtaccagatcttcatattcatgcagaagacactctcctgcctttctatcttggggaaaaggacgatgtcacttatgcaataaagcccacttgctggccggggcttgacattattccttcctgtctggctctgcaccgtattgaaactgagttaatgggcaaatttgatgaaggtaaactgcccaccgatccacacctgatgctccgactggccattgaaactgttgctcatgactatgatgtcatagttattgacagcgcgcctaacctgggtatcggcacgattaatgtcgtatgtgctgctgatgtgctgattgttcccacgcctgctgagttgtttgactacacctccgcactgcagtttttcgatatgcttcgtgatctgctcaagaacgttgatcttaaagggttcgagcctgatgtacgtattttgcttaccaaatacagcaatagtaatggctctcagtccccgtggatggaggagcaaattcgggatgcctggggaagcatggttctaaaaaatgttgtacgtgaaacggatgaagttggtaaagctgccccgatggtggattcgttaattgcgcgcgtaggagtaatggctcgcggtaatgccattactttgcctgtatgtggtcgggatgtgaagtttactcttgaagtgctccggggtgatagtgttgagaagacctctcgggtatggtcagctcgaaggattcctgagaatgtaaaagttggtgctggtgggctgtgtgacaatctaaaaacttgtcacacttcacatggatctgtcatggcggaaacagcggttatcaatcacaagaaacgtaaaaatagcccgcgaatcgtccagtcaaacgacctcactgaggcggcatatagtctctcccgggatcaaaaacgtatgctgtatctgttcgttgaccagatcagaaaatctgatggcaccctacaggaacatgacggtatctgcgagatccatgttgctaaatatgctgaaatattcggattgacctctgcggaagccagtaaggatatacggcaggcattgaagagtttcgcggggaaggaagtggttttttatcgccctgaagaggatgccggcgatgaaaaaggctatgaatcttttccttggtttatcaaacgtgcgcacagtccatccagagggctttacagtgtacatatcaacccatatctcattccctttctttatcgggttacagaaccggtttacgcagtttcgggcttagtgaaacaaaagaaatcaccaatcccgtatgcccttgcgtttataccaatccctgtgtcagtatcgtaagccggatggctcaagcatcgtctctctgaaaatcgactggatcatagagcgttaccagctgcctcaaagttaccagcgtatgcctgacttccgccgccgctttctgcagacaaaggccataaataccttgtattcgaagccaacacgggaacagaaaacggataccaaggcgaagaatcctttatttaacaaagcgtactacggcggcggcacgaacttcttccgtaaagaaagccagaagcttcagcagagcgctaaaaaacgcgatgctgagttagcgaacggcgccctcggtatcatagagttaaataatgattacacattgaaaaaagtaatgaagccgctgatcacttcaaacacggtaactgatgaaatcgagcgcgcgaatgttttcaaaatgaacggcaaatggtacttgttcactgattcacgcggttcaaaaatgacgatcgatggtattaactcaaacgatatttacatgcttggttatgtatcaaactctttaaccggcccttacaagccgctgaacaaaacagggcttgtgctgcaaatgggtcttgatccaaacgatgtgacattcacttactctcacttcgccatgccgcaagccaaaggcaacaatgtgggtatcacaagctacatgacaaacaaaagcttctttcaagataaaaaggcaacatttgcgcccagccttcttaatgaacatcaaaggcaataaaacatccgttgtcaaaaacagcgtcctgggagcaggacaggtggccgtccgctagttgcggcaaaaagaagtggccggtcttgattggcgttgtgtttgaaaacaggttttttattacctaccacggcgggctgtacatctctgacgtacagaaggaggacgccctctccacctatcgctgcatcaccaagcacaagtatagcggggagacccggcagagcaatggggcacgcctctctgtgacagcggttatcaatcacaagaaacgtaaaaatagcccgcgaatcgtccagtcaaacgacctcactgaggcggcatatagtctctcccgggatcaaaaacgtatgctgtatctgttcgttgaccagatcagaaaatctgatggcaccctacaggaacatgacggtatctgcgagatccatgttgctaaatatgctgaaatattcggattgacctctgcggaagccagtaaggatatacggcaggcattgaagagtttcgcggggaaggaagtggttttttatcgccctggaaaagatgccggcgatgaaaaaggctatgaatcttttccttggtttatcaaacgtgcgcacagtccatccagagggctttacagtaaccggtttacgcagtttcggcttagtgaaacaaaagaaatcaccaatccgtatgccatgcgtttatacgaatccctgtgtcagtatcgtaagccggatggctcaggcatcgtctctctgaaaatcgactggatcatagagcgttaccagctgcctcaaagttaccagcgtatgcctgacttccgccgccgcttcctgcagtgcataaacgctggtcatgaaatgacgaaggctatcgccattgcacagtttaatgatgacagcccggaagcgaggaaaataacccggcgctggagaataggtgaagcagcggatttagttggggtttcttctcaggctatcagagatgccgagaaagcagggcgactaccgcacccggatatggaaattcgaggacgggttgagcaacgtgttggttatacaattgaacaaattaatcatatgcgtgatgtgtttggtacgcgattgcgacgtgctgaagacgtatttccaccggtgatcggggttgctgcccataaaggtggcgtttacaaaacctcagtttctgttcatcttgctcaggatctggctctgaaggggctacgtgttttgctcgtggaaggtaacgacccccagggaacagcctcaatgtatcacggatgggtaccagatcttcatattcatgcagaagacactctcctgcctttctatcttggggaaaaggacgatgtcacttatgcaataaagcccacttgctggccggggcttgacattattccttcctgtctggctctgcaccgtattgaaactgagttaatgggcaaatttgatgaaggtaaactgcccaccgatccacacctgatgctccgactggccattgaaactgttgctcatgactatgatgtcatagttattgacagcgcgcctaacctgggtatcggcacgattaatgtcgtatgtgctgctgatgtgctgattgttcccacgcctgctgagttgtttgactacacctccgcactgcagtttttcgatatgcttcgtgatctgctcaagaacgttgatcttaaagggttcgagcctgataaaaatggagataagaaatataccaggttctcagaattgttttga

SEQ ID NO: 5237 - DNA, 6722 bp, Homo sapiens
  SIMILAR (3447)..(4145): 971254mologous to Cloning vector pBACe3.6 levansucrase,accession number U80929,Smith-Waterman Score=1198.
atggacaacttcttcgcccccgttttcaccatgggcaaatattatacgcaaggcgacaaggtgctgatgccgctggcgattcaggttcatcatgccgtttgtgatggcttccatgtcggcagaatgcttaatgaattacaacagtactgcgatgagtggcagggcggggcggtcaccgtcgacagcgacacacttgcatcggatgcagcccggttaacgtgccggcacggcctgtgtaaccagtgtgacaatctaaaaacttgtcacacttcacatggatctgtcatggcggaaacagcggttatcaatcacaagaaacgtaaaaatagcccgcgaatcgtccagtcaaacgacctcactgaggcggcatatagtctctcccgggatcaaaaacgtatgctgtatctgttcgttgaccagatcagaaaatctgatggcaccctacaggaacatgacggtatctgcgagatccatgttgctaaatatgctgaaatattcggattgacctctgcggaagccagtaaggatatacggcaggcattgaagagtttcgcggggaaggaagtggttttttatcgccctgaagaggatgccggcgatgaaaaaggctatgaatcttttccttggtttatcaaaccgccgggttattttcctcgcttccgggctgtcatcattaaactgtgcaatggcgatagccttcgtcatttcatgaccagcgtttatgcactgatccccgatgtgctgattgttcccacgcctgctgagttgtttgactacacctccgcactgcagtttttcgatatgcttcgtgatctgctcaagaacgttgatcttaaagggttcgagcctgatgtacgtattttgcttaccaaatacagcaatagtaatggctctcagtccccgtggatggaggagcaaattcgggatgcctggggaagcatggttctaaaaaatgttgtacgtgaaacggatgaagttggtaaaggtcagatccggatgagaactgtttttgaacaggccattgatcaacgctcttcaactggtgcctggagaaatgctctttctatttgggaacctgtctgcaatgaaattttcgatcgtctgattaaagggtaccgagctcgaattcgtaatcatggaaggacagagaaagcgcggatctgggaagtgacggacagaacggtcaggacctggattggggaggcggttgccgccgctgctgctgacggtgtgacgttctctgttccggtcacaccacatacgttccgccattcctatgcgatgcacatgctgtatgccggtataccgctgaaagttctgcaaagcctgatgggacataagtccatcatgttcaacggaagtctacacgaaggtttttgcgctggatgtggctgcccggcaccggtgtgacaatctaaaaacttgtcacacttcacatggatctgtcatggcggaaacagcggttatcaatcacaagaaacgtaaaaatagcccgcgaatcgtccagtcaaacgacctcactgaggcggcatatagtctctcccgggatcaaaaacgtatgctgtatctgttcgttgaccagatcagaaaatctgatggcaccctacaggaacatgacggtatctgcgagatccatgttgctaaatatgctgaaatattcggattgacctctgcggaagccagtaaggatatacggcaggcattgaagagtttcgcggggaaggaagtggttttttatcgccctgaagaggatgccggcgatgaaaaaggctatgaatcttttccttggtttatcaaacgtgcgcacagtccatccagagggctttacagtgtacatatcaacccatatctcattcccttctttatcgggttacagaaccggtttacgcagtttcggcttagtgaaacaaaagaaatcaccaatccgtatggccatgcgttaatacgaatccctgtgtcagtatcgtaagccggatggctcaggcatcgtctctctgaaaatcgactggatcatagagcgttaccagctgcctcaaagttaccagcgtatgcctgacttccgccgccgcttcctgcaggtctgtgttaatgagatcaacagcagggggtcttctagagtccccaaacagggctgtcaagtccagtgtaaagagaatggcgctttcactgtgcttgttgacaactatgtgaaggaagaagaaggcacaggggttgtccaccaagctccttacttcggtgctggagaggatccgcggaattatacatccggcgacaaccatacgctgagagaccctcactacgttgaagacaaaggccataaataccttgtattcgaagccaacacgggaacagaaaacggataccaaggcgaagaatctttatttaacaaagcgtactacggcggcggcacgaacttcttccgtaaagaaagccagaagcttcagcagagcgctaaaaaacgcgatgctgagttagcgaacggcgccctcggtatcatagagttaaataatgattacacattgaaaaaagtaatgaagccgctgatcacttcaaacacggtaactgatgaaatcgagcgcgcgaatgttttcaaaatgaacggcaaatgtcaggcaccgtgtatgaaatctaacaatgcgctcatcgtcatcctcggcaccgtcaccctggatgctgtaggcataggcttggttatgccggtactgccgggcctcttgcgggatatcgtccattccgacagcatcgccagtcactatggcgtgctgctagcgctatatgcgttgatgcaatttctatgcgcacccgttctcggagcactgtccgaccgctttggccgccgcccagtcctgctcgcttcgctacttggagccactatcgactacgcgatcatggcgaccacacccgtcctgtggatctacccactatgtgacaatctaaaaacttgtcacacttcacatggatctgtcatggcggaaacagcggttatcaatcacaagaaacgtaaaaatagcccgcgaatcgtccagtcaaacgacctcactgaggcggcatatagtctctcccgggatcaaaaacgtatgctgtatctgttcgttgaccagatcagaaaatctgatggcaccctacaggaacatgacggtatctgcgagatccatgttgctaaatatgctgaaatattcggattgacctctgcggaagccagtaaggatatacggcaggcattgaagagtttcgcggggaaggaagtggttttttatcgccctgaagaggatgccggcgatgaaaaaggctatgaatcttttccttggtttatcaaacgtgcgcacagtccatccagagggctttacagtgtacatatcaacccatatctcattcccttctttatcgggttacagaacccgtttacgcagtttcggcttagtgaaacacaagagatcaccaatcccctgacttcagcgcaggtaaatgtgtcaaaatctgatgacacactcaaaatcaacggagtggaagatcacaaaacgatttttgacggagacggaaaaacatatcagaacgttcagcagtttatcgatgaaggcaattatacatccggcgacaaccatacgctgagagcccctcactacgttgaagacaaaggccataaataccttgtattcgaagccaacacgggaacagaaaacggataccaaggcgaagaatctttatttaacaaagcgtactacggcggcggcacgaacttcttccgtaaagaaagccagaagcttcagcagagcgctaaaaaacgcgatgctgagttagcgaacggcgccctcggtatcatagagttaaataatgattacacattgaaaaaagtaatgaagccgctgatcacttcaaacacggtaactgatgaaatcgagcgcgcgaatgttttcaaaatgaacggcaaatggtacttgttcactgattcacgcggttcaaaaatgacgatcgatggtattaactcaaacgatatttacatgctcggttatgtatcaaactctttaaccggcccttacaagccgctgaacaaaacagagcttgtgctgcagatgggtcttgatccaaacgatgtgacattcacttactctcacttcgcagggccgcaagccaaaggcgacaatgtgacaaaggccattaaataccttgtattcgaagccaacacgggaacagaaaacggataccaaggcgaagaatctttatttaacaaagcgtactacggcggcggcacgaacttcttccgtaaagaaagccagaagcttcagcagagcgctaaaaaacgcgatgctgagttagcgaacggcgccctcggtatcatagagttaaataatgattacacattgaaaaaagtaatgaagccgctgatcacttcaaacacggtaactgatgaaatcgagcgcgcgaatgttttcaaaatgaacggcaaatgtgcgactctaaagcacccccctgaatcagccgatctcgacccgcatgcgttagcgcgtgaaaaaacaggagcagtaagaagtatgctgctggatagcgtcgaaccgcttcctcttgttgatgtggtgaaaagttggcatggtcgtcgcccaatggctgtaggaacggggagtgaaagcgccatcgctgaggcattgctggcgcacctgggattacgccattattttgacgccgtcgtcgctgccgatcacgtcaaacaccataaacccgcgccagacacatttttgttgtgcgcgcagcgtatgggcgtgcaaccgacgcagtgtgtggtctttgaagatgccgatttcggtattcaggcggcccgtgcagcaggcatggacgccgtggatgttcgcttgctttctttggatacagctgcgccttccaccccaggaccttcacacacggctgatcccccagagcccttgccggaggagctcattcctgctcctgtttcaagtccagcttccaggccccctacagcctcagtccctgtggcctccccaggggcagccctgctgttcctgacctcagccccctataggaaagggtggtttacttttgatttgatattgggacgcattcctgtgcgctggaatatccgcagaagtcatcccttgctcaacccaggaagtgtcaaggaagtggcctgtgggggaaaccactctgtgttcctgctggaagatggggaagtttacacatgtggtttgaacacaaggggcaactgggccatgagagggaaggaaacaagccagtgtgacaatctaaaaacttgtcacacttcacatggatctgtcatggcggaaacagcggttatcaatcacaagaaacgtaaaaatagcccgcgaatcgtccagtcaaacgacctcactgaggcggcatatagtctctcccgggatcaaaaacgtatgctgtatctgttcgttgaccagatcagaaaatctgatggcaccctacaggaacatgacggtatctgcgagatccatgttgctaaatatgctgaaatattcggattgacctctgcggaagccagtaaggatatacggcaggcattgaagagtttcgcggggaaggaagtggttttttatcgccctgaagaggatgccggcgatgaaaaaggctatgaatcttttccttggtttatcaaacgtgcgcacagtccatccagagggctttacagtgtacatatcaacccatatctcattcccttctttatcgggttacagaaccggtttacgcagtttcggcttagtgaaacaaaagaaatcaccaatccgtatgccatgcgtttatacgaatccctgtgtcagtatcgtaagccggatggctcaggcatcgtctctctgaaaatcgactggatcatagagcgttaccagctgcctcaaagttaccagcgtatgcctgacttccgccgccgcttcctgcaggtctgtgttaatgagatcaacagcagaactccaatgcgcgggggatctcacaccccaaccggattcagcacgcaaggcataattaattatttttctttcttcgcggtggcggccgccagagggggagaggcccaaaacgcgcgaaaaacacaatcgcttcgtggaaacaacaacagggcttatgagaggcaaaaatcagagaaacctaggacaaaaatagtgggtatcctctacagtcggctggattcagccagtaggcctttttcttcggtttgcctatttagcgtgctcaccacgaaatgcccagacccccggcgcacaccgtgtgcctggcacactggacaccaactcggacccgccaccacccacaccgccggcaagggcgcgcccacgcggcccccgctggtccagaccgcccgcaacaaacccaatggacaaccccgaagcaccccacacccccaccgcgtacagaaaggcggcgcgcacacgaaccgcacccgcccccgcaagcgcgggccaacgcgccgaacaccgcgaaggaaccgcgacgccaccagagccaccacgcagcccacgccaccaccgggcgcggcagccaggagccgaacgcccccacacacaccaccccgccaacgcaaccgccgcaacgccggcgcaaccgacgccacgaccagcgacggcagccccggagagcccgggcgagcaagggcccacaccaacgcccccccgagagcggccacaccccggcccggccccaaacgaccgcgagagcgaagaaaaaggaaagaaacacgaaacgtggcttga

SEQ ID NO: 5238 - DNA, 6604 bp, Homo sapiens
  SIMILAR (4622)..(6265): 931254mologous to Homo sapiens putative p150,accession number U93563,Smith-Waterman Score=2703.
atgaagcgtgcgcctgttattccaaaacatacgctcaatactcaaccggttgaagatacttcgttatcgacaccagctgccccgatggtggattcgttaattgcgcgcgtaggagtaatggctcgcggtaatgccattactttgcctgtatgtggtcgggatgtgaagtttactcttgaagtgctccggggtgatagtgttgagaagacctctcgggtatggtcaggtaatgaacgtgaccaggagctgcttactgaggacgcactggatgatctcatcccttcttttctactgactggtcaacagacaccggcgttcggtcgaagagtatctggtgtcatagaaattgccgatgggagtcgccgtcgtaaagctgctgcacttaccgaaagtgattatcgtgttctggttggcgagctggatgatgagcagatggctgcattatccagattgggtaacgattatcgcccaacaagtgcttatgaacgtggaatacaaactaccatcagagaatactataaacacctctatgcaaataaactagaaaatctagaagaaaaggataaattcctggacacatacaccatcccaatactaaaccaggaagaagttgaatccctgaatagaccaataataggctctgaaattgaggcaataattaccaaccaaaaaaagtccaggactggacggattcacagccgaattcaaacagagaagccaggacttactgtgcaagaaatggaaaatagccccaaaggcattttggagatcatttggggctacccttcccatcacaaatgcataatacaagggcgtggaggacagaatgggggcaccactgcccagtacaacctcacattactggctctgctccccaaattctgttgccacactccttggctgcccaagtgtgactctgccaaaccggattcagcaactcagcttgtcctactttcacaaggatccgtcagggcggaaccaccggttatcaatcacaagaaacgtaaaaatagcccgcgaatcgtccagtcaaacgccctcactgaggcggcaaatagtctctcccgggatcaaaaacgtatgctgtatctgttcgttgaccagatcagaaaatctgatggcaccctacaggaacatgacggtatctgcgagatccatgttgctaaatatgctgaaatattcggattgacctctgcggaagccagtaaggatatacggcaggcattgaagagtttcgcggggaaggaagtggttttttatcgccctgaagaggatgccggcgatgaaaaaggctatgaatcttttccttggtttatcaaacgtgcgcacagtccatccagagggctttacagtgtacatatcaacccatatctcattcccttctttatcgggttacagaaccggtttacgcagtttcggcttagtgaaacaaaagaaatcaccaatccgtatgccatgcgtttatacgaatccctgtgtcagtatcgtaagccggatggctcaggcatcgtctctctgaaaatcgactggatcatagagcgttaccagctgcctcaaagttaccagcgtatgcctgacttccgccgccgcttcctgcagtcacatggatctgtcatggcggaaacagacggttatcaatcacaagaaacgtaaaaatagcccgcgaatcgtccagtcaaacgacctcactgaggcggcatatagtctctcccgggatcaaaaacgtatgctgtatctgttcgttgaccacatcagaaaatctgatggcgccctacaggaacatgacggtatctgcgagatccatgttgctaaatatgctgaaatattcggattgacctctgcggaagccagtaaggatatacggcaggcattgaagagtttcgcggggaaggaagtggttttttatcgccctgaagaggatgccggcgatgaaaaaggctatgaatcttttccttgggttatcaaacgtgcgcacagtccatccagagggctttacagtgtacatatcaacccatatctcattcccttctttatcgggttacacaaccggtttacgcactttcggcttagtgaaacaaaagagatcaccactccgtatgccatgcgtgtatacgaatccctgtgtccagatcgtaagccggatggctcaggcatcgtctctctggaaaatcgactggatcatagagcggtaccagctgcctcaaagttaccagcgtatgccctgacttccgccgccgcttcctgcaggatgttcagaatgaaactcatggaaacacttaaccagtgcataaacgctggtcatgaaatgacgaaggctatcgccattgcacagtttaatgatgacagcccggaagcgaggaaaataacccggcgctggagaataggtgaagcagcggatttagttggggtttcttctcaggctatcagagatgccgagaaagcagggcgactaccgcacccggatatggaaattcgaggacgggttgagcaacgtgttggttatacaattgaacaaattaatcatatgcgtgatgtgtttggtacgcgattgcgacgtgctgaagacgtatttccaccggtgatcggggttgctgcccataaaggtggcgtttacaaaacctcagtttctgttcatcttgctcaggatctggctctgaaggggctacgtgttttgctcgtggaaggtaacgacccccagggaacagcctcaatgtatcacggatgggtaccagatcttcatattcatgcagaagacactctcctgcctttctatcttggggaaaaggacgatgtcacttatgcaataaagcccacttgctggccggggcttgacattattccttcctgtctggctctgcaccgtattgaaactgagttaatgggcaaatttgatgaaggtaaactgcccaccgatccacacctgatgctccgactggccattgaaactgttgctcatgactatgatgtcatagttattgacagcgcgcctaacctgggtatcggcacgattaatgtcgtatgtgctgctgatgtgctgattgttcccacgcctgctgagttgtttgactacacctccgcactgcagtttttcgatatgcttcgtgatctgctcaagaacgttgatcttaaagggttcgagcctgatgccaccgaaacgagcgatcagggtcggcaaagctgtggagatgaaatgggcaacaccttccacactgcgagtaaagctcgcaatccgggtggaggcctccacgtcctagcgcagtccagtcccgggcgcagggaggagagctggtcagccaagattccaagacaggtgtccacctcctccaacgaagcggaacacgccaccaggttcatgtggaggctcccaggcgcccgcgccgcgcttcgggtgatccggacggcggtggagaagctgagccgggctgaagcggggagccagacagcggcgggagcgatggagcgcgctgtagtgcgctgcgtaccttcggaacccaagctgagcctgtcattcgctttggctgatggtagccacaagaacatgcagcgcgaccagagcgagccgctgggtcgagtcctcagccgcatcgctaccaatgccctaaagggtcacgctaaggcggccgccgccaagaagagcaggaagagccggccgaatgctagcggcggtgcggcctgttcagggccggggcctgagccggctgtgttctgcgagcccgtggtgaagctgtactaccgggaagaggcagtggctgaggacgtgctcaacgtggatgcctggcaagacggcgcggtgctgcagatcggcgatgttaagtacaaggtggagcgcaacccgcccgccttcaccgaactgcagttgccgcgctacatcatggccgggttccctgtgtgccccaaactcagcctcgaatttggggatcccgccagctcccttttccgctggtataaggaagccaagcccggagcggcggagcccgaggtcggtgtcccctcgtcattgtctccctcctcaccttcttcttcttggactgagactgatgtggaggagcgtgtctacaccccgtccaatgccgacatcgggctaaggctcaagcttcactgcaccccaggcgatgggcagcgctttgggcacagccgggagttggaaagtgtgtgtgtggtagaggctgggcctggcacctgcacttttgaccaccggcatctctacacgaagaaggtgactgaggacgctctcatccgcactgtctcttacaacatcctggcagacacgtacgcgcagactgagttctcgcgaacggttctgtacccatactgtgccccctacgccctggagctcgactaccgccagaaccttatccagaaggaactcaccggctacaacgccgatgtcatctgtttcaggagcttggtacccgccctagaggccttcgggctcgagggggtgtttcgaatcaagcagcacgaaggcctggccactttctaccgaaagtctaagttcagccttcttagccagcatgacatttcattctacgaagccctcgagtccgacccacttcacaaagaactgctggagaaactagttttgtacccatcagcgcaggagaaggtgctccagagatcttctgttcttcagcatataaacagaaccaaagacaaaaaccatatgattatctcaatagatgcggaaaaggcctttgacaaaattcaacagtgcttcatgctaaaaactctcaataaattaggtattgatgggacgtatctcaaaataataagagctatctatgacaaacccacagccaatatcatactgaatgggcaaaaactggaagcattccctttgaaaactggcacaagacagggatgccctctttcaccactcctattcaacaaagtgttagaagttctggccagggcaatcaggcaggagaaggaaataaagggtattcagttaggaaaagaggaagtcaaattgtccctgtttgcagatgacatgattgtatatctagaaaaccccattgtctcagcccaaaatctccttaagctgataggtaacttcagcaaagtctcagaatacaaaatcaatgtgcaaaaatcacaagcattcttatacaccaataacagacaaacagagagccaaatcacgagtgaactcccattcacaattgcttcaaagagaataaaacacctaggaatccaacttacaagggacatgaaggacctcttcaaggagaactacaaaccactgctcaacaaaataaaagaggatacaaacaaatggaagaacattccatgctcatgggtaggaagaatcaatatcgtgaaaatggccatactgcccaaggtaatttatagattcaatgccatccccatcaagctaccaatgactttcttcacagaattggaaaaaactactttgaagttcatatggaaccaaaaaagagcctgcattgccaagtcaattctaagccaaaagaacaaagctggaggcatcacgctacctgacttcaaactgtactacaaggctacagtaaccaaaacagcatggtactggtaccaaaacagagatatagaccaatggaacagaacagaggcctcagaaataatgccgcatatctacaaccatctgatctttgacaaacctgagaaaaacaagcaatggggaaaggattccctatttaataaatggtgctgggaaaactggctagccatatgtagcaagctgaaactggatcccttccttacacctcatacaaaaactaattcaagatggattaaagacttaaatgttagacctaaaaccataaaaaccctagaagaaaacctaggcaataccattcaggacataggcatgggcaaggacttcaagcctaaaacaccaaaagcaatggcaacaaaagccaaaattgacaaatgggatctaattaaactaaagagcttctgcacagcaaaagaaactaccatcagagtgaacaggcaacctacagaatgggagaaaatttttgcaatctacccatctgacaaagggctagtatccagaatctacaatgaactcaaacaaatttacaagaaaaaaacaaacaaccccatcaaaaagtgggcaaaggacatgaacagacacttctcaaaagaagacatttttgcagccaaaagacacatgaaaaaatgctcatcatcactaatcatcaaagaaatgcaaatcaaaaccacaatgagataccatctcacaccagttagaatggcgatcattaaaaagtcaggaaacaacagtcaggcaccgtgtatgaaatctaacaatgcgctcatcgtcatcctcggcaccgtcaccctggatgctgtaggcataggcttggttatgccggtactgccgggcctcttgcgggatatcgtccattccgacagcatcgccagtcactatggcgtgctgctagcgctatatgcgttgatgcaatttctatgcgcacccgttctcggagcactgtccgaccgctttggccgccgcccagtcctgctcgcttcgctacttggagccactatcgactacgcgatcatggcgaccacacccgtcctgtggatctacccactagtcaattcaccatcttgttga

SEQ ID NO: 5239 - DNA, 6510 bp, Homo sapiens
  SIMILAR (7)..(1236): 911254mologous to Cloning vector pSacBII SacB,accession number U09128,Smith-Waterman Score=1935.
  misc_feature (1)...(6510): n = a,t,c or g
atgaacatgaacatcaaaaaaattgtaaaacaagccacagttctgacttttacgactgcacttctggcaggaggagcgactcaagccttcgcgaaagaaaataaccaaaaagcatacaaagaaacgtacggcgtctctcatattacacgccatgatatgctgcagatccctaaacagcagcaaaacgaaaaataccaagtgcctcaattcgatcaatcaacgattaaaaatattgagtctgcaaaaggacttgatgtgtgggacagctggccgctgcaaaacgctgacggaacagtagctgaatacaacggctatcacgttgtgtttgctcttgcgggaagcccgaaagacgctgatgacacatcaatctacatgttttatcaaaaggtcggcgacaactcaatcgacagctggaaaaacgcgggccgtgtctttaaagacagcgataagttcgacgccaacgatccgatcctgaaagatcagacgcacgaatggtccggttctgcaccctttacatctgacggaaaaatccgtttattctacactgactattccggtaaacattacggcaaacaaagcctgacaacagcgcaggtaaatgtgtcaaaatctgatgacacactcaaaatcaacggagtggaagatcacaaaacgatttttgacggagacggaaaaacatatcagaacgttcagcagtttatcgatgaaggcaattatacatccggcgacaaccatacgctgagagaccctcactacgttgaagacaaaggccataaataccttgtattcgaagccaacacgggaacagaaaacggataccaaggcgaagaatctttatttaacaaagcgtactacggcggcggcacgaacttcttccgtaaagaaagccagaagcttcagcagagcgctaaaaaacgcgatgctgagttagcgaacggcgccctcggtatcatagagttaaataatgattacacattgaaaaaagtaatgaagccgctgatcacttcaaacacggtaactgatgaaatcgagcgcgcgaatgttttcaaaatgaacggcaaatggtacttgttcactgattcacgcggttcaaaaatgacgatcgatggatgccagcctacgtgttctgaggctttgcagaactttcaacggtataccggcatacagcatgtgcatcgcataggaatggcggaacgtatgtggtgtgaccggaacagagaacgtcacaccgtcagcagcagcggcggcacccgcctccccaatccaggtcctgcccgttctgaacattttgaggcatttcagtcagttgctcaatgtacctataaccagaccgttcagctggatattacggcctttttaaagaccgtaaagaaaaataagcacaagttttatccggcctttattcacattcttgcccgcctgatgaatgctcatccggagttccgtatggcaatgaaagacggtgagctggtgatatgggatagtgttcacccttgttacaccgttttccatgagcaaactgaaacgttttcatcgctctggagtgaataccacgacgatttccggcagtttctacacatatattcgcaagatgtggcgtgttacggtgaaaacctggcctatttccctaaagggtttattgagaatatgtttttcgtctcagccaatccctggtcttccttagagctagcagtgatcatgggaccaattctggccaataagtgtgacaatctaaaaacttgtcacacttcacatggatctgtcatggtcggaaacagcggttatcaattcccaagaaaaggtaaaattagcccgcgaatcgtccagttcaaaggacctcactgaggcggcaaaaagtctctcccgggatcaaaaacgtaagccgtatctgttcgttgcccagatcagaaaatctgagggcaccctacaggaaacatgacggtatctgcgagatccatgttgctaaatatgctgaaatattcggattgacctctgcggaagccagtaaggatatacggcaggcattgaagagtttcgcggggaaggaagtggttttttatcgccctgaagaggatgccggcgatgaaaaaggctatgaatcttttccttggtttatcaaacgtgcgcacagtccatccagagggctttacagtgtacatatcaacccatatctcattcccttctttatcgggttacagaaccggtttacgcagtttcggcttagtgaaacaaaagaaatcaccaatccgtatgcccatggcgttatacgaatccctgtgtcagtatcgtcggccggatggctcaagcatcggctctctgaaaatcgactggaatataaagcggttaccagctgcctcaaaagtaccaacgtatggcctgacttccggcgccgcttactgcaggtctgtgttaatgagatcaacagcagaactccaatgcgcctctcatacattgagaaaaagaacggccgccagacgactcatatcgatctggctctgaaggggctacgtgttttgctcgtggaaggtaacgacccccagggaacagcctcaatgtatcacggatgggtaccagatcttcatattcatgcagaagacactctcctgcctttctatcttggggaaaaggacgatgtcacttatgcaataaagcccacttgctggccggggcttgacattattccttcctgtctggctctgcaccgtattgaaactgagttaatgggcaaatttgatgaaggtaaactgcccaccgatccacacctgatgctccgactggccattgaaactgttgctcatgactatgatgtcatagttattgacagcgcgcctaacctgggtatcggcacgattaatgtcgtatgtgctgctgatgtgctgattgttcccacgcctgctgagttgtttgactacacctccgcactgcagtttttcgatatgcttcgtgatctgctcaagaacgttgatcttaaagggttcgagcctgatgtacgtattttgcttaccaaatacagcaatagtaatggctctcagtccccgtggatggaggagcaaattcgggatgcctggggaagcatggttctaaaaaatgttgtacgtgaaacggatgaagttggtaaagctgccccgatggtggattcgttaattgcgcgcgtaggagtaatggctcgcggtaatgccattactttgcctgtatgtggtcgggatgtgaagtttactcttgaagtgctccggggtgatagtgttgagaagacctctcgggtatggtcaggtaatgaacgtgaccaggagctgcttactgaggacgcactggatgatctcatcccttcttttctactgactggtcaacagacaccggcgttcggtcgaagagtatctggtgtcatagaaattgccgatgggagtcgccgtcgtaaagctgctgcacttaccgaaagtgattatcgtgttctggttggcgagctggatgatgagcagatggctgcattatccagattgggtaacgattatcgcccaacaagtgcttatgaacgtggtcagcgttatgcaagccgattgcagaatgaatttgctggaaatatttctgcgctggctgatgcggaaaatatttcacgtaagattattacccgctgtatcaacaccgccaaattgcctaaatcagttgttgctcttttttctcaccccggtgaactatctgcccggtcaggtgatgcacttcaaaaagcctttacagataaagaggaattacttaagcagcaggcatctaaccttcatgagcagaaaaaagctggggtgatatttgaagctgaagaagttatcactcttttaacttctgtgcttaaaacgtcatctgcatcaagaactagtttaagctcacgacatcagtttgctcctggagcgacagtattgtataagggcgataaaatggtgcttaacctggacaggtctnggtgtgacaatctaaaaacttgtcacacttcacatggatctgtcatggcggaaacagcggttatcaatcacaagaaacgtaaaaatagcccgcgaatcgtccagtcaaacgacctcactgaggcggcatatagtctctcccgggatcaaaaacgtatgctgtatctgttcgttgaccagatcagaaaatctgatggcaccctacaggaacatgacggtatctgcgagatccatgttgctaaatatgctgaaatattcggattgacctctgcggaagccagtaaggatatacggcaggcattgaagagtttcgcggggaaggaagtggttttttatcgccctgaagaggatgccggcgatgaaaaaggctatgaatcttttccttggtttatcaaacgaaatcccagaaagaggacagaacaaggcaaggcacagaacaaggttcagtggtggctgaccaggactcctgttatggtccagaagttcatcaatggggacgtcacgcggcttggagctccgatcgaggcgcaggcgctgatcgccacctacggccgtgatcgtgatcctggccggccgttgtggttggggtcggtcaagtcgaacatcggtcatacgcaagcggcggcgggtgtggctggtgtgatcaagatggtgatggcgatgcggcacgggcagctgccacgcacgttgcacgtggaatcgccgtcgccggaggtggattggtcggcggggacggttcaactccttacggagaacacgccctggcccaggagtggtcgtgttcgtcgggtgggggtgtcgtcgttcgggatcagtggtactaacgcgcacgtcatcctcgaacagcccccgggagtgccgagtcagtctgcggggccgggttcgggttctgtcgtggatgttccggtggtgccgtggatggtgtcgggcaaaacacccgaagcgctatccgcgcaggcaacggcgttgatgacctatctggacgagcgacctgatgtctcctcgctggatgttgggtactcgctggcgttgacacggtcggcgctggatgagcgagcggtggtgctggggtcggaccgtgaaacgttgctgtgcggtgtgaaagcgctgtctgccggtcatgaggcttctggntgtgacaatctaaaaacttgtcacacttcacatggatctgtcatggcggaaacagcggttatcaatcacaagaaacgtaaaaatagcccgcgaatcgtccagtcaaacgacctcactgaggcggcatatagtctctcccgggatcaaaaacgtatgctgtatctgttcgttgaccagatcagaaaatctgatggcaccctacaggaacatgacggtatctgcgagatccatgttgctaaatatgctgaaatattcggattgacctctgcggaagccagtaaggatatacggcaggcattgaagagtttcgcggggaaggaagtggttttttatcgccctgaagaggatgccggcgatgaaaaaggctatgaatcttttccttggtttatcaaacgtgcgcacagtccatccagagggctttacagtgtacatatcaacccatatctcattcccttctttatcgggttacagaaccggtttacgcagtttcggcttagtgaaacaaaagaaatcaccaatccgtatgccatgcgtttatacgaatccctgtgtcagtatcgtaagccggatggctcaggcatcgtctctctgaaaatcgactggatcatagagcgttaccagctgcctcaaagttaccagcgtatgcctgacttccgccgccgcttcctgcaggtctgtgttaatgagatcaacagcagaactccaatgcgcctctcatacattgagaaaaagaaaggccgccagacgactcatatcaagacactctcctgcctttcttgttggggaaaaggacgataacacttatgcaataaagcccacttgctggccggggcttgacattattccttcctgtctggctctgcaccgtattgaaactgagttaatgggcaaatttgatgaaggtaaactgcccaccgatccacacctgatgctccgactggccattgaaactgttgctcatgactatgatgtcatagttattgacagcgcgcctaacctgggtatcggcacgattaatgtcgtatgtgctgctgatgtgctgattgttcccacgcctgctgagttgtttgactacacctccgcactgcagtttttcgatatgcttcgtgatctgctcaagaacgttgatcttaaagggttcgagcctgatgtacgtattttgcttaccaaatacagcaatagtaatggctctcagtccccgtggatggaggagcaaattcgggatgcctggggaagcatggttctaaaaaatgttgtacgtgaaacggatgaagttggtaaaggtcagatccggatgagaactgtttttgaacaggccattgatcaacgctcttcaactggtgcctggagaaatgctctttctatttgggaacctgtctgcaatgaaaatttcgatcgtctgattaaaccaccctgggagattagataa

SEQ ID NO: 5240 - DNA, 231 bp, Homo sapiens
  SIMILAR (1)..(231): 931254mologous to Escherichia coli fecE,accession number M26397,Smith-Waterman Score=360.
aatcatcttgccgttcgtcggttaaccgagctttccggcggtcagcgccagcgcgcatttctggcaatggtcctggcccagaatacgcccgttgtattacttgatgagccaaccacctatcttgatatcaatcaccaggtggacctgatgcggttgatgggcgaactccggactcagggtaaaacggtggtcgattaagtgcgcgaccttaatcaggttagccggtactgc

SEQ ID NO: 5241 - DNA, 306 bp, Homo sapiens
  SIMILAR (31)..(294): 751254mologous to Escherichia coli RecF protein,accession number K02179,Smith-Waterman Score=345.
tgcttacgaattctatgtccgtacccgtacatcccgctgactgagaaaaccctggcctgacccgcgttatataccttggagctcacggccgatatggctgagacctgtaagcaatttctccctgagttttctctgactttctctttccagcgcggctgggagaaagagacagaatatgctgaggtgctggaacgtaattttgaacgcgatcgccagctaacctacaccgcgcacggcccgcacaaagcggacttacgcattcaggaatccggggttccatacaacgaaattttggttaccttgtga

SEQ ID NO: 5242 - DNA, 273 bp, Homo sapiens
  SIMILAR (4)..(273): 921254mologous to Escherichia coli Regulatory protein KdpD,accession number D90708,Smith-Waterman Score=415.
acgaattcgagcgtcggacccggagatcgtctgctgtaacaaactgccgcgccgcatcgggggaagctgaaagttttcttcggtgcctgtgcaggcgtcgggaagacctgggcgatgctggcagaagcccagcgactgcgggcgcaagggctggatattgtggttggcgtggtagaaacccacgggcgaaaagataccgccgccatgctggaagggctggctgttctgccgttaaaacgccaggcgtaccgtgggcggcatatcagcgagttt

SEQ ID NO: 5243 - DNA, 2553 bp, Homo sapiens
  SIMILAR (217)..(969): 961254mologous to Escherichia coli RNA polymerase beta subunit,accession number U76222,Smith-Waterman Score=1246.
ttagtgtggtaattcacacgccagcaaaaactctgccgttccttcatcaacaatcaggtccgtgacatatcctcccagcagggcacccaacgttgcgtcatagcctctttccccaccagcaaggaagatcttccgttcaatctgccttaggtgcagcgagcggcaacggcctgaaacttgtaggccgattcgaatggggtccaagtcgccgggcgcgatctggataccctgatgccacaggatatgatcaacgccaagccgatttccgcagcagtgaaagagttcttcggttccagccagctgtctcagtttatggaccagaacaacccgctgtctgagattacgcacaaacgtcgtatctccgcactcggcccaggcggtctgacccgtgaacgtgcaggcttcgaagttcgagacgtacacccgactcactacggtcgcgtatgtccaatcgaaacccctgaaggtccgaacatcggtctgatcaactctctgtccgtgtacgcacagactaacgaatacggcttccttgagactccgtatcgtaaagtgaccgacggtgttgtaactgacgaaattcactacctgtctgctatcgaagaaggcaactacgttatcgcccaggcgaactccaacttggatgaagaaggccacttcgtagaagacctggtaacttgccgtagcaaaggcgaatccagcttgttcagccgcgaccaggttgactacatggacgtatccacccagcaggtggtatccgtcggtgcgtccctgatcccgttcctggaacacgatgacgccaaccgtgcattgatgggtgcgaacatgcaacgtcaggccgttccgactctgcgcgctgataagccgctggttggtactggtatggaacgtgctgttgccgttgactccggtgtaagtggtggtgtcgttcagtacgtggatgcttcccgtatcggtatcaaagtaacgaagacgagatgtatccgggtgaagcaggtatcgacatctacaaccttgcctcttttcctgatggaatccaatcctcttttctggatggcggtactggtcagtgcgggtatccttggacaatggccgattggacgtctggcggataagtttggtcgactgctggtgttgcgtgttcaggtctttgtcgtcattctcggcagtatcgcgatgggttctctgggctttctctttggttgagatatccgggatctggatttcatgggtgatgcctttggtcgccagcaggcgcgccagtttggtgcgtgcatccgccgctttatccatcgccgtaccgagcatccgtaaaccttcttccggtgcgtgcatatgaatgccgtgggaagcgatcgccagatcccagcgccactgggcatgacggatatcgtcctgaattggcttcatttcagcttccgtcgcgcctgcatccagcgctgctttcgcttcgaagtgagcgtgaaccagttgatcttcaaccttgattttcaggtcgttaatcgactgcttacgttccgcgaccactttttgcaaggcagctttgtcctgggtatggcagttcgcacaagtctgggcgaagttatcaaacggattaccaattttatggtcggtgtagagtttgccttcggcgttctgcacttttggcatatggcagtcgatacaggtcacgttgtttttaccgtgaatgcccgctgtccaggtttcatattccgggtgctgcgctttcagcattggcgttttcgacagggagttagtccagtcagagaaggcaattttgtcgtaatactgctccatattttcgagctttgtttttgcagtcgagtatactcccatggcatgccgcaaacatcgattctggtcgaacgtcggcttctcaaaggttacaatggctccatcggcacgcatacgacgggaagggtactcggttgctttgggactatgcccccagacaccggcaaaacagtcggcctggagttccatacgcacagataagcggtttacttccgcctgcgtcgcgttttgttgcagttgacgaactttcggctcgatgcctaacagtttctgcacatgatgaccgacttcatgggcgataacgtacccctgggcaaaatcgccatccgcgccaagtttgtctttcatgtcatcatagaaggagagatcgatataaaccgtgccatccgccgggcaatagaacggccccattatggactggcccgccccgcagccggtacgcgtcattccacggtacatgaccagcttcggttgctgataggtcttacccatcttctcgaactgttgtccccaggtgtcttccgtggttgccagaatcaccgaggtgaattttgcggcttcgtcttcatttgggctaattgaccgcgttgattgttgttgggaaaccggctgcccggtcatcaacccggttaaatcaacaccatagtagcctgcaaccagcacgactatcagtaaaatcagcccgcctttaccgcttggcaggcgaaaaccggggacagcccatagatggaccaccagagctgttgcgcctgtcttcaacat

SEQ ID NO: 5244 - DNA, 862 bp, Homo sapiens
  SIMILAR (421)..(170): 851254mologous to Escherichia coli orotidine 5' monophosphate (OMP) decarboxylase (E.C. 4.1.1.23),accession number J02768,Smith- Waterman Score=339.
atgccaagttttgcatggcttcaagttcttcgacataaatgcccgggttacctgtttgacttcctgaccgaatacctgtttaaagcgcacagcttcctgagcagaacacaccacaccatcaaggccacatttttgcgtcagtgccgccagacgttctgcataatctgccaggtgacagtgtcatgccaagatcgaccaggtcgctggcttccatgctggtcaacactgtcacagcattcaaaagcggtgcatctttgcctaacggaaccagtgcctcacgcgctggggtcatcatacgcgccccaccagaggcatgaacattctccatccacacgccttattcagctgcagcagcgacagcgtgcgctgcagtgttggggatatcgtggcctttcagctttcaggccgtgtcgcctcgctgcacgtgcccgccgtggtatcaagcgccagactggccatggagttacaggcagagcctattattcgatcgaattttgacgttctgactcgctgtacgaaagccttttttgtcgtgggtaacgcgcttgatgaaaatcccctgattcgggtgggcgtgctgaataagaaggaaatgcagacgtatcgggatttaggcgcagtaggtgtcatttgtggtcgcttctatgacaaggaagggatgcccgtcgtggctgatgttgaccagcgtattctgggaatcagtctggctcagctaaggcagattgaacggaagatcttccttgctggtggggaaagaggctatgacgcaacgttgggtgccctgctgggaggatatgtcacggacctgattgttgatgaaggaacggcagagtttttgctggcgtgtgaattaccacactaa

SEQ ID NO: 5245 - DNA, 579 bp, Homo sapiens
  SIMILAR (1)..(576): 921254mologous to Escherichia coli orotidine 5' monophosphate (OMP) decarboxylase (E.C. 4.1.1.23),accession number J02768,Smith- Waterman Score=876.
gacccacgcgattgacgcctgaaggtcgccaaatagatggtcacattgtttgggccacagtttgtgcgcgaacttcaacagcgtggttttgatatctttcttgacctgaaattccacgatatccccaacactgcagcgcacgctgtcgctgctgcagctgacttaggcgtgtggatggtgaatgttcatgcctctggtggggcgcgtatgatgaccgcagcgcgtgaggcactggttccgtttcgccccgatgcaccgcttttgattgctgtgccagtatgacgcagcataaaagccagcgacctggtcgatcttggcatgacactgtcacctgcagattatgcagaacgtctggcggcactgacgcaaaaatgtggccttgatggtgtggtgtgttctgctcaggaagctgtgcgctttaaacaggtattcggtcaggagttcaaactggttacgccgggcattcgtccgcaggggagtgaagctggtgaccagcgccgcattatgacgccagaacaggcgttgtcggctggggttgaatatatggagaatgggcgcccgggaacgcaatcggtaaaa

SEQ ID NO: 5246 - DNA, 1101 bp, Homo sapiens
  SIMILAR (568)..(978): 991254mologous to Homo sapiens Human potassium channel K+ Hnov42,accession number Y34130,Smith-Waterman Score=697.
tttcgtggggaagggccccaggcaggctgaggattctaggtgcggggcgggaaggaggaccggccgaaccttgggtgagggacagagggcgtgcgtgtggtgtgtccccaagggcaggaaggtggcgaagggaggcgaatccgagtgggtggagggaggggaagggcgggaggagaaaaaggtgggaggaggaccaggtgggagggtggcggctcactcaggacccaccgggggcagcgcgatgaggcgggtgaccctgttcctgaacggcagccccaacaacggaaaggcgggtgctggatatggaactttatccgatttgctttctgggggcagcagtaaacccggcataaaagccaccaatgtgtataatgggaaaggtggactgattgatgatattgctttgatcagggatgatgatgttttgtttgtttgtgaaggagaatcatttattgatcctcagacagattctaagcctcctgagggattgttaggattccacacagactggctgacattaaatgttggagggcggtactttacaactacacgcattactcctaccaggcaaatctttgctgtgcaaatcttgaatgagctgatctctctggatcagtgcttgactgtgcgaatctccagggagtcaagatgctctgttctaatgcagaaggagcatccctgaaactgtgtaattttgaggatccttctggtcttaaagccaatttagaaggtgctaatctgaaaggtgtggatatggaaggaagtcagatgacaggaattaacctgagagtggctaccttaaaaaatgcaaagttgaagaactgtaacctcagaggagcaactctggcaggaactgatttagagaattgtgatctgtctgggtgtgatcttcaagaagccaacctgagagggtccaacgtgaagggagctatatttgaagagatgctgacaccactgcacatgtcacaaagtgtcagatgagaattttaggggctggaggaagatgtaaaagatgaaaatgttttccttatcacttttctttctccacccactcagttgtctagaagaaataacactgtaaggaaatttaaaaaaaaaaaa

SEQ ID NO: 5247 - DNA, 601 bp, Homo sapiens
  SIMILAR (169)..(5): 981254mologous to Homo sapiens FLJ00074 protein,accession number AK024480,Smith-Waterman Score=278.
aatacaggctgtcacagtcgtcgtcaaagtcattggtctcccgcagctggttaaacatgcgcttcatctcatcggtgatgttcatggagccgacctcatcgtccgagaaccggttcacctccccgtcctgctcagagatgtcatcatcggaagccaccttacgctctttctttttggggaccacctcgccctgcaggtcgatggtcggattgcagttggtgaaatcctcccagagcagcagcgtgtcttcattctcttcccacgtcaggctgtcacagtcgtcgtcaaagtcaaaggtctcccgcctggcaggtacttgagaaggttccgagaagagaagtttccgagaagagaaggttccgtgcttgaggctgggacttcccgagagcactctgtatgcccactgcagtgtttgaagccgcacacatgtgttctctggaacatcgcaccactccagcaaggtggctgtgggtatgtccattgtacagatgagaaaactttgagtcgtgccaggtgaaatgacttgttccttgtcaaagcctactggacactggcttcttttcctccaagggtctccagaggtcatctgtttcttcctcat

SEQ ID NO: 5248 - DNA, 603 bp, Homo sapiens
  SIMILAR (115)..(498): 771254mologous to Homo sapiens Polypeptide fragment encoded by gene 69,accession number W88827,Smith-Waterman Score=504.
tcatgtaatctggcacatgccgaggaagacctcaaagtgccggcaacttctgtgctctggggcgtccagaaatgcagacacagccgccaggcaaagcacctgctcctcccatcgcccccctggcaaaatccccagtctgggtccacggagagtcccaggctgcagctctgtgccaagcagccgaggggaacagagcacgggctcgccagctgcccccaggtgtggagacgtgacgcacacagaggcctcccaggaggagcagccatgactccgggggacacatgggccagcttcaaccccagagcagggcacagcaaaagccaaggtgagggacaggagagcagtggtgcatccaggcaagacaggcatcccgtcagccgctgggtagaaaggcagagggaggcctggggagcccccaggagcagcagtgcaggtggagtaaaggttgctgcgaccacagaaagggaacccgagtttaaaataaagactggaaaggcgtgaagcaaaggaaagaggctttctgctctcgttcagcatccttttcccagagcagggaggtagggtgcccgctatgatggcaggggccggacttacagcaccaca

SEQ ID NO: 5249 - DNA, 1185 bp, Homo sapiens
  SIMILAR (688)..(987): 781254mologous to Homo sapiens dJ963K23.4 (KIAA0939 (novel Sodium/hydrogen exchanger family member)),accession number AL031685,Smith-Waterman Score=364.
gcaggccgtgccttcactgacaggaatggcttttctaatcatttccctgatttctgctctttcaaacagggtaacttctttcaaaatattggttccatcacctaaatcttggctgttctccagggttttttttttgttttaatgctttaatatgtggaccaagtgacacacattacagaatctccccttccctctgtctcttacagttttgcgtttggctccctaatatctgctgtcgatccagtggccactattgccattttcaatgcacttcatgtggaagaagatacagaaaaggggcatgtcagacttacccccgcctccccctccacctttttttttttttttagtacagaagaaaaatatgctcctgggagctgttgtcggaaagcagcagttttgtgacttctccacatctcccatcaactctccctcgattctccttccttgacagttgtcatttacgtgctgaagcatattgacttgaggaaaacgccttcctgcaggcattgtgagatctgagttggggatcacacggcagtgctttctgttctgttctctccctctctaggcatcatggccatccttttctcaggcatcgtgatgtcccactacacgcccagggaagccagcccatgaagctgctgcctcttcactgtgtcctctcacactgtttgctgtcacccaggcctgcggggagccatcccctatgccctgagcctacacctggacctggagcccatggagaagcggcagctcatcggcaccaccaccatcgtcatcgtgctcttcaccatcctgctgctgggcggcagcaccatgcccctcattcgcctcatggggcttccaggaggtgccccccgatggtgccagctggtggccgtcgggccgcctttcctccctgctcagggcaacactgtggagtcggagcacctgtcggagctcacggaggaggagtacgaggcccactacatcaggcggcaggaccagctcagtttgttcaactgaaactgaagttgcctgtggccatcaccctgcctcccacctcctccctagacaccccacacaaaacacccagtagcatcccctcccttccatggccctgcccctgacgccctgacggcttggttgtgtctctcgacccaggacctgcaccacgggcgcatccagatgaaaactctcacc

SEQ ID NO: 5250 - DNA, 254 bp, Homo sapiens
  SIMILAR (32)..(172): 441254mologous to Caenorhabditis elegans contains similarity to Pfam domain: PF00201 (UDP-glucoronosyl and UDP-glucosyl transferases), Score=134.3, E-value=3.3e-37, N=1,accession number Z70782,Smith-Waterman Score=113.
atgagtctgcgggagacagcagagcttggaggctgggctgtgaggagcggcgacgccctttgctgtcttcccgaggccctggagtgccgtgcgtgtgaaggagtacgggtatacgcggctgcacatcctcaacgggacccacatccacatccagcaggtgtcggacgaccaggcctttgctcagtgccaccctccctgaccctcttgttaaaacagctccacctaaccggaggtcatcaggttcggtgaaataa

SEQ ID NO: 5251 - DNA, 308 bp, Homo sapiens
  SIMILAR (37)..(264): 241254mologous to Mus musculus immunoglobulin light chain variable region,accession number AJ231222,Smith-Waterman Score=70.
ctacggccgccgtgcgctggaatcctgcagatctacctcgatttcctattttccactatctttgtagaatccactccccttctttccacagcgcaggtaatactggctttcgatacacgtattctaacctggctgacacctggagaggacaggcccgaatcttccgccaggtgcacggctggccactcgaccaactaccagactgcctgctgcgagtcccagaggacgagacacaacccctccccattcctatctctttctactcagagaccgaggcaaaaggagaggcgccctacatagagccagag

SEQ ID NO: 5252 - DNA, 1078 bp, Homo sapiens
  SIMILAR (749)..(991): 401254mologous to Brassica napus myrosinase-binding protein related protein,accession number U59446,Smith-Waterman Score=103.
aatacacgccctccaacaccaccaggcatttatttttcattttcctacaattataaatatcagtcctcctctcccagctgtttctgaaggaattacagagaaacatgatttgaaatggacaaggcttccctcactcactcacttcccagtgtgcagttctctgcagctggatgaacaaaaaaatcccctacctcgatttcctattttccactatctttgtagaatccactccccttctttccacagcgcaggtaatactggctttcgatacacgtattctaacctggcgtaagttttcagttgtttcaaagtggtacctaacaagctcactcgctcttctacgaagccagggctcaggtaccagtagcgtccggccccctgctccgcagtgacacctggagaggacaggcccgaatcttccgccaggtgcacggctgtccactcgaccaactaccagactgcctgctgcgagtcccagaggacgagacacaacccctccccattcctatctctttctactcagagaccgaggcaaaaggagaggcgccctacatagagccagagaaactggatgcacccgcggtcgcgactgccaccgctcacggacttagcgccctccggagaaaaaggagaggggtagaagggttaggggaagaaggggaggggggggaaaaagaaggagaaggaagagaaagaagcggaagggaagtaaaggaagagaggatgctgctgctgctgctgctgctgcccagagcccgcgcacccgagcgcccgccccagactgagagcggcgcccccagccggctcccagcgcacgagctccgcctcggcccctcctccccgccccgcgcaggtcccgccccgcgcaggtcccgccagactccgcgagcccgtgggcggccgcggcggggctggcgctgccaccgccgcagtgtccgggagggggagcacgaccgcttcgccttctgccgcagccgccggcgccaggggggaccgcgaggtgggagcctcggagaccccgcccagccgctgcgccgggccttctccagagccctggtcccctcccgcgacaaagtga

SEQ ID NO: 5253 - DNA, 1671 bp, Homo sapiens; identical to SEQ ID NO: 243
  SIMILAR (1159)..(1668): 791254mologous to Homo sapiens NAG13,accession number AF194537,Smith-Waterman Score=664.

SEQ ID NO: 5254 - DNA, 954 bp, Homo sapiens
  SIMILAR (52)..(450): 541254mologous to Gibbon ape leukemia virus pol polyprotein,accession number M26927,Smith-Waterman Score=371.
atgcaccttaccatcccattaaaacctaatcacccttaccccactcaatgccaatatcccatcccacggcatgctttaaaaagattaaagcctgttatcactcgcctgctacagcacggccttttaaggcctataaactccccttacaattcccccattttacctgttcaaaaaccagacaaggcttacaggttagttcagaatctgccccttatcaaccaaattgttttgcctatccaccccgtggtgccaaacccatatactctcctatcctcaatacctccctccacaacccatttttctgttctggatctcaaacatgctttctttactattcctttgtaccctttatcccagcctctcttcgctttcacttggactgaccctgacacccatcaggctcagcaaattacctgggccgtactgccgcaagccttcacagacagcccccacttcaaatcacccaagcagcttctcaggctcttggtattcagtggaaacttcatatcccttatcgtcttcaatcttcaggaaaggcagaacggactcgtggtctttgaaagacacacctcaccaagctcagcctccaacttaaaaaggactggacagtacttttacctcttgcccttctcagaattaagagcctgtcctcgagatgctacagggtacagtccatttgaacttgtatacggatgcgctttcttactcagccccaacctcgtcccagacaccagccccctagacaggtccagcaaaacgtccccagacatttcacaccagcaagctgccgccctcctccacacttacataaaaaacctttctccttatatcaactctactccccccatatttggacctctcacaacacaaactactattcctgtggccactcctttatgtatctctcagcaaagacccactggaattcccctgggtaacctttcaccttcttga

SEQ ID NO: 5255 - DNA, 1080 bp, Homo sapiens
  SIMILAR (464)..(544): 401254mologous to Feline leukemia virus gag-pol precursor polyprotein gPr80,accession number M18247,Smith-Waterman Score=43.
atggaagtctatacgcagaaagcatactggagggtgcccctgggatcaaccgtgggggaccaaggaggtcatggccggttcattcatccatttgccatcaaaattgaacaagggagtacaaacagatgccccagtggatcacctgctaccaagtatgtccttctctgcctccatggtgaaaaagtagacctacttcctgctgatcagcaaagtatattctcaccaggaagaagcacacaggggcacttaattagcataacaggtgtcctgatgaacaggcattcgacgtacatggataaagaaaaagtgaaaatggtcactgctttgtggacagatgaagaactgtccaaactcacctggacgcgcatgaaatttgatgccatgactcaattgggagacctcccttgggagatcaatcccctgtcctcctgctctctgctccgtgagaaagatccacctacgacctcaggtcctcagaccgaccagcccaaggaacatctcaccaatttcaaatccacaaccaatcatgcaccccttaccatcccattaaaacctaatcactcttatcccgctgaatgccaatatcccgtcccacagcacgctttaaaaggattaaagtctattatcactcgcctgctacagcatggccttctaaagcctataaactgcccttacaattcccccattttacctgtcctaaaaccagacaaggcttacaggttacttcaggatctgcgccttatcaaccaaattgttttgtctatccaccccgtgttgccaaaaccaaatactctcctatcctcaatacctccctccacaacccattactctgttctggatctcaaacatgctttctttactattcctttgcacctttcatcccagcctctcttcgctttcacttggactgaccctgacacccatcaggctcagcaaattacgtgggctgtactgccacaaggcttcacagacagcccccattacttcaatcaagcccaaatttcttcctcatctgttacctatctcggcataattctcatgaaaacccacgtgctctccctgctgatcgtgtctggctaa

SEQ ID NO: 5256 - DNA, 1423 bp, Homo sapiens
  SIMILAR (923)..(1339): 531254mologous to Gibbon ape leukemia virus pol polyprotein,accession number M26927,Smith-Waterman Score=387.
gttctctaggcttgagtgccttgaccatatagaaaagaggctagatgaggcatcttgtaaaaatctctccgaatctggagatctaggatttgatgaaaccggcaattatcacagcaatggtggcagcactggctgcctcagaaggttaaatgtggaaataaactgccatactcacaaaagaaagaatattttgaaagttaagtgtgaaatagacagtacaccccaagagagagaaggttcagagctggctgctcgtaaggatgagacagccttggctgttactgggaaaactcccgttatggaagtcttacatgactattcatacggggattgggaagaggcgttactatcgggtgtccataagaggggacgaaggagagaatccaggaaacaaaatcgtattataaacctagaaacaggtgcatggcagccaagcaggaccacaagggaaaatgtcaggcggtcaggaggaacaaaggaggagcaagcccgccatctccctgtgagacgcttccccggagcgaacccagcctttgtgactccagatcagctgaaagtagaacaaagacaagcaacctctcttgcatcccggcatcactacagcaagtttgtgggccacgtgaatttatctggtcgggcaatcattgtcaccctttcttaccaatcaccagatgttatggctgtctctgctaccactactgtatggaaaactcaatcctatagaattcttgtcagagaaatcctactcctgtttgtcagagatccacgcttccatttttctggtgtgagcttttgtggcaaagccagtaccaatgtcactgaagggcagaaacagctgaagactgacactgcccaatcgccttggaagccccctagaccatcacggatgcccgagcttcgagtaactctcacagtggagggccaatatcccatcccacagctcgctttaaaaagattaaagcctgttatcactcgcctgctacagcatggccttttagagcctataagctctccttacaattcccccattttacctgtcctaaaaccagacaagccttacaagttagttcaggatctgcgccttgtcaaccaaattgttttgcctatccaccccatggtgccaaacccatatacactcctatcctcaatacctccctccacaacccattattctgttctggatctcaaacattctttcgttactattcctttgcacccttcatcccagcctctcttcactttcacttggactgaccctgacacccatcaggctcagcaaatcacctgggctgtactaccacaaggcttcacagacagcccccattacttcagtcaagcccaaatttcatcctcatctgttacctatctcgggataattctcataaaaacacacgtgctctccctgctgatcgtgttcgactga

SEQ ID NO: 5257 - DNA, 386 bp, Homo sapiens
  SIMILAR (235)..(375): 271254mologous to unidentified PROTEASE,accession number A69020,Smith-Waterman Score=35.
accgtcacggacgccgagcttcgggtaactctcacagtggaagcacgctttaaaaagattaaagcctgttatcacttgcctgctacagcatggctttttaaagcctataaactctccttacaattccctcattttacctgtcctaaaaccagacaagccttacaagttagttcaggatctgcgccttatcaaccaaattgttttgcctatccaccccatggtgagccaggcgtgaagcagcaaagagtgtgtgagcaagtggacgtggggaccagccatagcacacagccaggagcaccagcacaggcgcgagcaatgtgggaggctgtggctggaccaggtgtgcctcaagtggcttccgccttgggcgccagcatctggatgag

SEQ ID NO: 5258 - DNA, 630 bp, Homo sapiens
  SIMILAR (206)..(325): 251254mologous to AKV murine leukemia virus gag-pol polyprotein (tag amber codon at 2250-2252 inserts Gln in Mo- MuLV),accession number J01998,Smith-Waterman Score=43.
tgtgaaataaaaaacagaaaagcagctgaaaaagtcaataaaaccaaaggtaaattctttgagatcaatacctatcctgggcccataaaaaccggagaacctagtgggcagacacagaagtggctggacatcgtgaggaacacactggtggaagaagacacaagcagctggtcatggagagcccaccagccgaagagcacgctgacggggaccggcaggccatcaaccaatggcacaatgtcaagtttggccagaacagtcagagaagagccaggcaaccagcccaactacagaggaaaaccatctcccttctggttcccccatctggtgagagctgcttctactcaacctgttatcactcgcctgctacagcatggccgtttaaagcctataaactctccttacaatttccccattttacctgtcctaaaaccagacaagccttacaagttagttcaggatctgcaccttatcaaccaaattgttttgcctatccaccccgtggtgccaaatccatatactctcctatcctcaatacctgcctctacaacccattattctgttctggatctcaaacatgctttctttactattcctttgcacccttaattccagcctctcttcactttc

SEQ ID NO: 5259 - DNA, 1080 bp, Homo sapiens
  SIMILAR (514)..(1044): 481254mologous to Murine leukemia virus gag-pol polyprotein,accession number U13766,Smith-Waterman Score=416.
atgacctcaaacaagtccatagctccagattcccgtaatcatcggaagaaacggcatacaaaacaagcttttcgatacaccatctgcagtggaaccaccatcaaaatgcagatttttacaaaaactcttacagagaagaccatcaccctggaggttgaaacttcagatacaatagaaaatgtaaaggccaagatccaggataaggaaggaaatctgcctgcccacctgcacccaggtgaaataaacagctttattgctcacacaaagcctgtttggtggtctcttcacacagacacgcatgaaatttggtgctgtgactcggatcgggggaccacccttgggagatcaatcccctgtcctcctgttctttgttccaagagaaagatccacctacgaccttggtcctcagaccgaccagcccaagaaacatctcaccaatttcaaatccacctcctttgtgttctcctcttgtattcccccaccttaaccctcaagtatatctctactccctccttggcgaccgatcatgcaccccttaccatctcattaaaacctaatcacccttaccctgctcaatgccaatatcccatcccacagcatgctttgaaaggattaaagcctgctatcactcgcctgctacagcatggccttttaaagcctataaactctccttacaattcccccattttacctgtcctagaaccagagaagatttacaggttagttcaggatctgcgccttatcaaccaaattgttttgcctatccaccccgtggtgccaaacccatatactctcctatcctcaatacctccctccacaatccattattctgttctggatctcaaacgtgctttctttactattcctttgtacccttcatcccagcctctcttcgctttcacttggactgaccctgacacccttcaggctcagcaaattacctgggctgtactgccgcaaagcttcacagacagcccccattacttcagtcaagcccaaatttcttccttatctgttacctatctcagcataattctcataaaaacacacacgctctccctgctgatcatgtccgattaa

SEQ ID NO: 5260 - DNA, 2146 bp, Homo sapiens
  SIMILAR (1478)..(1882): 601254mologous to Homo sapiens NAG13,accession number AF194537,Smith-Waterman Score=369.
ggacgccaaggggcgcttggaggaaagccgggctggggagctggccgcctatgtgcaggagaacctggaggccgcacagctggctggcgagctggcccggcaggagatgcatggagagctggtgctgctccgagagaagagccgggctctggaggcatccgtggcgcagctggccgggcagttaaaggagctgagtggccatctcccggctctgagcagccggctcgatctgcaggagcagatgctgggcctcaggctgtccgagggtagaggcctgacaggccggtcccaagcctcccgtcccacccagcgactgtccccagggcctgggagaccccgagccccagagactcctgtgtggggcaggacagccgctgagcagcctcggcccagcatctgcagcccggaggctgagaacagggagccttctggggaccgctgggctcgggagctcaggttgctgggctcctggaaggtgactgtgaggcccgagactgggcagcggggcagggcagtcctgcggaggcgggagtcgtggaggccccgtcagcccctcttctctcctaggctcctacaaccccctgaccctcggcctgttcacgctggtctacttcttcctggcctgctggacctacgggctcacggtgtctgccggggtcttcatcccgtccctgctcatcggggctgcctggggccggctctttgggatctccctgtcctacctcacgggggcggcggtgagtggggccggaggggaggctgtggggccctgcagctgagccaggtcttgcggcatcgcgggccggagcagaagtcccagggcaggacaaaagtgtcgcacctcacgtggttcacgggccgtgggcgttgtcctcgcgtggttcacgggccgtgggcgttgtcctgctgtggtggcagcgtgtactgtggcagcgcagcccatgtgtggagtctggaccaggcgaagggtagtgagtatcctgtgatgagaggtgctcacacagcagacaggtcattacttggaagtgatgctgcagaggacaatcaagagagtggcagctggcacgctttaaaaagattaaagcctgttatcactcgcctgctacagcatggccttttaaagcctataaactctccttacaattcccccatttcacctgtcctagaaccagagaagccttacaggttagttcaggatctgagccttatcaaccaaattgttttgcctatccaccccatggaattgttcaggcctcctccctttcctacacatcaagctcggggatttgcccctgcccaggactggcaaattgactttactcacatgccccgagtcaggaaactaaaatacctcttagtctgggtagacgctttcactggatggggaatgcaagcagaaacttctcctcttttgacacgttctccagatgatatggtgaccacgaagcctccactggtgatagccaggcaaagagggtctggagtggacttccaacgaactccagaagacctgcagcagaagggcctgactgttagaaggaaaactaataaacataaaggaatagcatcaacatcaacaaaaggaggtccacatgaaaaccccatccgaaggtcaccaacatcaaagaccaaagaaatacaaacttccatcagagaatactataaacacctctacacaaataaactagaaaatctagaagaaatggataaattcctggacacatacagcctcccaagactaaaccaggaagaagtcgaatccctgaatagatcaataacaagttctgaaagtgaggcagcaattaatagactaccaaccaaaaaaagcccaggaccagatggattcgcagccaaattctaccagaggtacaaagaggagctgtggcacaaatctaaaaaaaaatggacaatatcaaatattggtgaagaggagatggagcaaccagaacgctgtcacactcttgattggaacatacaacagtacgatcacaacagaaaatcatttgacagttccttaaaaagtgaaaatacacttactataggtcccagcctttcactcctatgtcactcctatttacccaagaaaaataaaagcatccgtccatacaaagagtctgtcacaatgtgtggacgagactatttgtaa

SEQ ID NO: 5261 - DNA, 858 bp, Homo sapiens
  SIMILAR (358)..(702): 841254mologous to Homo sapiens reverse transcriptase homolog= pol {retroviral element},accession number S61070,Smith-Waterman Score=498.
atgcatgaaatttggtgccgtgactccgatcgggggacctcccttgggagatcaatcccctgtcctcctgctctttgctctatgaaaaagatccacttacaacctcgggtcctcagacccaccagcccaaggaatatctcaccaattttaaatcggcagctgaagactgacgctgcccaatcgcctcggaagcctacaggatcatcacagacgctctgggtaactctcacagtggaggcatgctttaaaaggattaaagtctgttatcactcgcctgttatagcatggccttttaaagcctataaactctccttacaattcccccattgtacctgtcctaaaaccagacaagacttacaggaaggtggagtcattcactgcaaagaccatcaaaaggtgtcagatcccattgctgtaggcaaggcttatgctgataaggtggctagacaagcagctagctttccaacttctgtccctcacggccagtttttctccttcatatcagtcactcccatctactcccctgctgaaacttccacctatcaatctcttcccacacaaggcaaatgtttcttagaccaaggaaaatatctccttccagcctcacaggcccattctattctgtcgtcatttcataacctcgtccatgtaggttacaagccactagcccatctcttagaaactctcatttcctttccatcctggaaatctatcctcaaagaaatcacttctcagtgttctatttgctattctactaccgctcggggattgttcaggcttccttcctttcttacacatcaagctcgaggatttgcccctgcccaggactggcaaattgactttactcacatgccctga

SEQ ID NO: 5262 - DNA, 2082 bp, Homo sapiens
  SIMILAR (7)..(636): 991254mologous to Escherichia coli IS5 39.3kDa protein,accession number U70214,Smith-Waterman Score=1081.
atggccaacctgctggagcagcatcaactggcccgccaattgttcaagaccatcaatcgctggctggccgaagcaggcgtcatgatgactcaaggcaccttggtcgatgccaccatcattgaggcacccagctcgaccaagaacaaagagcagcaacgcgatccggagatgcatcagaccaagaaaggcaatcagtggcactttggcatgaaggcccacattggtgtcgatgccaagagtggcctgacccacagcctggtcaccaccgcggccaacgagcatgacctcaatcagctgggtaatctgctgcatggagaggagcaatttgtctcagccgatgccggctaccaaggggcgccacagcgcgaggagctggccgaggtggatgtggactggctgatcgccgagcgccccggcaaggtaagaaccttgaaacagcatccacgcaagaacaaaacggccatcaacatcgaatacatgaaagccagcatccgggccagggtggagcacccatttcgcatcatcaagcgacagttcggcttcgtgaaagccagatacaaggggttgctgaaaaacgataaccaactggcgatgttattcacgctggccaacctgtttcgggcggaccaaatgatacatctgaattattatcacgatccccattcgacggaaattgaagaggatggcagcactatcagtgacgatgcggtgaagcaacggggtgaaataaaagtgggagtcacgggcaatatcagtcagcgagtgtccctgcgcggcagcgtggcgtggcagaaagggagtgatgattttgcccagacggcagggtttttgtcgatgacggtgaaatgccacagccctgattactatagtaaagcctgttatcactctcctgctacagcatggccttttaaagcctataaactctccttaccattcccccattttacctgtcctaaaaccagacaagccttacaagttagttcagaatctgcgccttatcaaccaaattgtttcgcctgtccaccccgtgtatttattcaggtacttaacccaatgaatattgcctatcgtaaacgggaagcggataaagtactggcaacccggctcgcgctgcgtacccaccgaattagttatatcacgctcatcgcggtgatcctgttttttgccttttcgtttaccttctcaattagccacgaagaagccgtttctgcctttgaacaaaatatctcagcactggcgctggccgcgcaggtgatccctgggcatatcattcatatcacctctacggtgcttaatatctttgccgtactgaccgcattctttggcatttatctcggtttccacgaggccattaaaggcattattctcaatctgttaagccgaattattgataccaagaaaattaactcacgcgtgctgactctggcgatctgcgcttttatcgtcattacgttgacgatttgggtttcgtttcgtgtatcggtgctggtgttctttcagttgggaagcccgttatatgttaaaaatggacagatcattaatcaaccaacaaacgcatttcagtctgatttcagccttgccgctttatggcgtaacgaaaatcatgctggggtaaaagatgcaaatcccgtggcagttaatcaggaaacacctaagctctctatagcgcttaatggcattgtactcacatcgaatgatgagacttcttttgtcttaattaatgaggggagcgaacaaaagcgatactccctcaacgaagcccttgagtcagcgccgggaacgtttattagaaaaataaataaaaccagcgttgtgtttgaaactcacgggcattacgaaaaagtaactctccatccagggctacctgacatcatcaagcagcctgattcagaaagtcaaaatgtactcgctgattatattatcgccacgcctatacgtgatggagaacagatatacgggcttcgattgaaccctcgtaagggcctcaatgcatttaccaccagcttgctacaaccagaggatatcgacctcaggatcaataatctatcgctgacccaacctgatgaggttcacaggcattaa

SEQ ID NO: 5263 - DNA, 936 bp, Homo sapiens
  SIMILAR (349)..(924): 411254mologous to Sus scrofa pol protein,accession number AF038601,Smith-Waterman Score=386.
atgtgtcatttcctggagaaagcatttcctggagatagcacagaatactgccactatgtcctcctcttggtgtatggaaagcataagaacagacagagcctttctcagtccttgactaagaatactacagactggataatttgtaaagaagagagctttatttcttacagttctggaagttggggagttgaagggcatatggtgctggtgtctggtgagggcctttgggctgcatcatcccgttgtggaaaagtggaagggcaagttgttcctcgccaggccgagctaggtcccaattcttcctcagcctctgctcctccaccctataatctttttatcgcctcccctcctcacacctggtcgggcttacagtttcgttccgtgactagccctccccctcctgcccagcaatttactcttaaaaaggtggctggagctaaaggcatagtcaagcacgctttaaaaagattaaagcctgttatcactcgcctgctacagcatggccttttaaagcctataaactctccttacaattcccccattttacctgtcctaaaaccaggcaagccttacaagttagttcaggatctgcgccttatcaaccaaattgttttgcctatccaccccgtggtgccaaacccatatactctcctatcctcgatacctgcctctacaacccattattctgttctagatctcaaacatgctttctttactattcctttgcacccttcatcccagcctttcttcgctttcacttggactgaccctgacacccatcaggctcagcaaattacctgggctgtactgcctcaagtcttcacagacagcccccattacttcagtcaagcccaaatttcttcctcatctgttacctatctcagcgtaattctcataaaaacacacgtgctctccctgctgatcatgttcagctga

SEQ ID NO: 5264 - DNA, 957 bp, Homo sapiens
  SIMILAR (592)..(954): 551254mologous to Feline leukemia virus gag-pol precursor polyprotein gPr80,accession number M18247,Smith-Waterman Score=340.
atggccaaagccgtcctgagcaaaaagaacaaaactggaagcaccacactacccgacttcaaaatatattacaaggatatagtaactgaagaacctggtattgaaaccctgaggcacacaagtagcacaaagttttccaaaggcctacctagtcgtgaatctttctcagagaagcaaaacaaaacaacaacccacctgcacccaggtgaaataaacagctttattgctcacacaaagcctgcttggaggtctcttcacacggacgcgcatgaaatttggtgccgtgactcggatcaggtgaactcccctgggagatcaatcccctgtcctcctgctctttgctccatgagaaagatccacctacgacctctggtcctcagaccagccagcccaaggaacatctcaccaattttaaatccgctacacctcattgctgcccttcttcccaatccaaagcctccttttcgtcctcctcttgtatcccccgaccttaacccacaagtaaaagatatctctactccctcctgggcaaccgatcatgtacacctcaccgtctcattaaaaccttatcacccttaccctgctcaatgccaatatcccatcccacagcacgctttgaaaggattaaagcctgttatcactcgcctgctacagcatggccttttaaagcctataaactctccttacaattcccacattttacctgtcctaaaaccagacaagccttacaagttagttcaggatctatgccttatcaacccaattgttttgcctatccaccccatggtgccaaacccatatactctcctatcctcaatacctccctccacaatccattattctgttctggatctcaaacatgctttctttactattcctttgcacccttcatcccagcctctctttgctttcacctggactgaccctgacattcatcaagctcagcaaattacctag

SEQ ID NO: 5265 - DNA, 1803 bp, Homo sapiens
  SIMILAR (362)..(583): 1001254mologous to Cloning vector pCMVLacI lac repressor,accession number U64448,Smith-Waterman Score=354.
  misc_feature (1)...(1803): n = a,t,c or g
atggaggctgagaagttccatcagatgccatctgtgagccggagaaccaggaaagccagtggtgtaattcagtccaaatctgagaacctgagaaccaggggagccaatagtcacgctttaaaaagattaaagcctgttatcactcgcctgctacagcatggccttttaaagcctataaactctccttacaattcccccattttacctgtcctaaaaccagacaagccttacaaacggtttctcgccttttacggttggagtccacgttctttaatagtggactcttgttccaaactggaacaacactcaaccctatctcgggttattcttgtgatttataagggattttgccgatttcggaaccaccatcaaacaggattttcgcctgctggggcaaaccagcgtggaccgcttgctgcaactctctcagggccaggcggtgaagggcaatcagctgttgcctgtctcactggtgaaaagaaaaaccaccctggcgcccaatacgcaaaccgcctctccccgcgcgttggccgattcattaatgcagctggcacgacaggtttcccgactggaaagcgggcagtgagcgcaacgcaattaatggattttgccgatttcggaaccaccatcacacaggattttcgcctgctggggcaaaccagcgtggaccgcttgctgcaactctctcagggccaggcggtgaagggcaatcagctgttgcctgtctcactggtgaaaagaaaaaccaccctggcgcccaatacgcaaaccgcctctccccgcgcgttggccgattcattaatgcagctggcacgacaggtttcccgactggaaagcgggcaatcttctcagcttagcagcttaagactgacactgcccgatcgcctcagaagccccctagaccatcacggacgccgagcttcaggtaactctcacagtggaagcccaaagcctccttcgtgtcttcctctcatatctccccaccttaacccacaagtatgggacatctctactccttccctggcaaccgatcacatgcccattaccatcccgttaaaatctaatcacccttaccccactcaacttaaagtgccaatatcccatcccgcagcatgctttaaaaagattaaagcctgttatcactcgcgtgctacagcatggcgttttaaagcctacaaactctccttacaattcccccattttacctgtcctaaaaccagacaagccttacaagttagttcaggatctgcgccttatcaaccacattgttttgttgcctatccaccccatggtgccaaacccatatactctcctatcctcaatacctccctccacaatccattattctgttctggatctcaaacatgctttctttactattcctttccacccttcatcccagcctctcttggctttcacttgggactgaccctgacatccatcaagctcagcaaattacctagggctgtactgccggcaaaggtttcccaggacaggcccccattacttcaatcaagcccaaatttcttcctcatctgttacctatctcggcataattctcataaaaacatacgtgctctccctgccaatcgtgtccgactgatctctcaaaccccagcaccttctacaaaacaacaactcctttccttcctaggcatggttagcgtggtcagaattcttacacaagagccaggaccgcaccctgtagcctttctgtccaaacaacttgaccttactgttttagcctagccctcatgtctgcgtgcagggctgccgtnttttaatacttttagagggcctcaa

SEQ ID NO: 5266 - DNA, 1847 bp, Homo sapiens
  SIMILAR (928)..(1089): 831254mologous to Homo sapiens Human secreted protein, SEQ ID NO: 5210,accession number G01129,Smith-Waterman Score=239.
atggaggacagggtggggccgagtgaggagaggagccagcagaagttatccataacacctgccaggctggcgggtggtgacagtcttaaccctgctggaaggacaggtgacctcttagtggagacatcccctttgctggcagctgtcttcccagcccacgacaacagcctctgcaacaagccttactggttagttcaggatctgcgccttatcaaccaaattgttttgcctatccaccccatgatgttactaggggagatatcagtcaccaaggccttggctggctccctgataaaagcccttgcagtattccacactgcagaatccccaggctatgctctcctggattcttactacctgctccagaaagggagtgtttgcatctccatcctccaagaagaggaagcattttcttggccggggaaaggagagtgtcgagataagtcctgggcctctctgggcctaatacccgcatttccccagggaggacagtggaaacaggccctggggcttctggaccacagctgcctctgctttggggaattaggcaccaggttggcagccccagcatccttcagcaccttcccaataacaaaccgagagcgggagagaaaaactgacaagctgattccaaaattcatgtggaaatgcaagggacccagaataaccaaaacaatcttggaaaagaatgaagttggagaatttacacttcttgatttcaaaacttaccacaaatttgcagtaatcaaaactatgtggtactggcataaggacagatacattgatcaacagaatgacattgaaagtccagaaataaattcatatgtttatggtcaactgatttttgacaaagactcagcccgcctgcacccaggtgaaataaacagtcttgttgctcacacaaagcctgtttggtggtctcttcatatggacgcgcatgaaatttggtgccgtgactcggattgggggacctcccttgggagatcaatcccctgtcctcctgctctttgctccatgagaaagatccacctacgacctcgggtcctcagaccgaccagcccaaggaacatctcaccaatttcaaatccgggacacctctctgattatacacccacgtttcaagggtgtcagaccatgcagggacgcctgccttggtccttcacccttagcggcaagtctcgcttttctggggaaggggcaactcaacgccaatatcccatcccacagcaagctttgaaaggattaatgcctgctatcactcgcctgctacagcatgggccttttaaaccctataaactctccttacaattcccccatttttcctgtcctaaaacgagacaagccttacaagttagttcaggatctgcgccttatcaaccaaattggttttggcctatccaccccgtggtgccaaacccatatactcttctatcctcaatacctgcctctacaacccattattctgttcgtatatgtcaaacatgctttctttactattcctttgcacccttcatcccagcctctctccactttcacttggactgaccctgacacccattaaggctcaacaaattacctgggctgcactgccacaagggtttcacagacagcccccattacttcagtgaagcccaaatttcatcctcatctgttagtcatactcccgttcaccgttctcaactactcatacatgccctggctcttctttacactggccgggtttacactggtttctccaaggacatcacagctggatatctcctgggtgctatccccaaactggccacttctaaactcttgaagtaaataaataatctttgctggcaggactctgctgaatctcctta

SEQ ID NO: 5267 - DNA, 539 bp, Homo sapiens
  SIMILAR (79)..(510): 301254mologous to Homo sapiens Po protein,accession number X07704,Smith-Waterman Score=133.
tttttttttttttttttacagaaatgcggtttactttgtaggccacgttggttcaataaatgatgcagcggacacagcccgcccagccccggcgcccgcccgcgccctccctcgcggtcccggccccactcctccgcccctaggcgccgcggcaggtgtccgcggtgaccggcaggcagctgaggaagcggaagccgaatctgctctccgccgtgttctgcaccgacagggccaccagggggcagctacggtccacgctcttacgtcacacccgaactcggtgttctttctggagccgacagtcctccaggcccagcccggcctctgcgggaggcgacggcagggtggggtcacccgggatggcgggcaggtgctgcggcgcggggatctcggggttctcgggccgcgcaggcccctcccgcgcgtggaagagcttccccgagctcactgggggcagcaggccccgcgtccctggtctccggcgactgacccggggctcccgcacccggcctttgcgcaggggtcgaggtgggcgcggc

SEQ ID NO: 5268 - DNA, 2083 bp, Homo sapiens
  SIMILAR (1264)..(1998): 281254mologous to Gallus gallus transitin,accession number X80877,Smith-Waterman Score=273.
atgcgcgttctctgatctgtagaatgcgttggggttgaggcagccatcactgtcctgccatgaactgagcctgggtactgggaggcaagaggggctccctgctgcactgccttgtgaggctggacgggggcagggctggggtctggagctggagtggccatcaagcagagcgtggtccacaggcagccccggccctggccacagctggacacagggagcccagagtcctctggaaagcattccgagcggcatcacaagaccgtggagtggggctccctgccctgtctgaacaccagcagctcagggggcgctgactccgactccagcagctgccggccgggcctgcacttccttcgtgcaggtgatagggcacccgcaccgggaccaccgcgcttcctccgagcaagcgctggtgcaggccgggagctacagcagggactcagaagatctccagaaaacccactcacccaggcacggcgagccggtcctgtcgccccagccctgcacagaccccgaccactggagcccggaactcctgcagagcccgacaggcctgaagatcgtggctgtgagctgccgggagaagttcgtccgcatcttcaacccgtcgcaggagagcacggccgacctgagcggcatggtgctgaagcagctggtgcgcggcttcccggagcgcctgtaccgcttcccgccgggcacgctgctggccccgcggcaccacgtcacggtctggggcgaggcgacccgcagcgccaagaagccgctgcgcgcgtcctcgagccgggagcccgttcccctcctctccatccgcggctgcgcgacgctgctcctgagccccaagggcgaggtcctcagtgagcaccggatcccacgccgcgagactccggccccgagggtcttcgccgacggcaccgacttgtccatcgaccgcttcccgctccctgaggccgggcccggcgccgacacccgcaagccgccgcgcccacctcgacccctgcgcaaaggccgggtgcgggagccccgggtcagtcgccggagaccagggacgcggggcctgctgcccccagtgagctcggggaagctcttccacgcgcgggaggggcctgcgcggcccgagaaccccgagatccccgcgccgcagcacctgcccgccatcccgggtgaccccaccctgccgtcgcctcccgcagaggccgggctgggcctggaggactgtcggctccagaaagaacaccgagttcggaactttctccactcagtaagggagatctacgaaaaactcacagaaccttctcccctcagtagggagatctacgaaaaactcacagaaccttctccactcggtagggagatctacgaaaaactcacagaactttctgcactcggtagggagatctacgaaaaactcacagaaccttctccactcggtagggagatctacgaaaaactcacagaaccttctccactcggtagggagatctacgaaaaactcacagaaccttctccactcggtagggagatctacgaaaaactcacagaaccttctccactcggtagggagatctacgaaaaactcacagaactttctgcactcggtagggagatctacaaaaaactcacagaactttctccactcggtagggagatctacgaaaaactcacagaaccttctccactcggtagggagatctacgaaaaactcacagaaccttctccactcggtagggagatctacgaaaaactcacagaactttctgcactcggtagggagatctacgaaaaactcacagaaccttctccactcggtagggagatctacgaaaaactcacagaactttctgcactcggtagggagatctacgaaaaactcacagaaacttctccactcggtagggagatctacgaaaaactcacagaaccttctccactcggtagggagatctacgaaaaactcacagaactttctgcactcggtagggagatctacaaaaaactcacagaactttctccactcgaagtctacacaaatgctaaaattcacagaatgtacactgcctcagaaaagtcaattttgccacgatga

SEQ ID NO: 5269 - DNA, 453 bp, Homo sapiens
  SIMILAR (291)..(434): 641254mologous to Homo sapiens meningioma-expressed antigen 11,accession number U73682,Smith-Waterman Score=157.
gaaaatatttatgataactaaaatgtgatagctgatacattactgtggaaagctgtttgaatctttctctagagctttctaagactatcatggaatgctttctgtctagatgatttcttctaagcctgagattttcgggaaaatgattgcaaatttactgttttagtgactgccatatgtcaatttgttgtagaatttaaatgtgcctgattcatctctccctgctgaaaatgaagccactggccctggctttgttcctccacctcttgctccagtcagaggtccattgtttccagtgggatggcaagaggcccattcttgaggaagagggacctccttttccccccacctcctccagggagccatggtttggagcttctcgagattattttccaccaggggatttcccaggtccaccacctgctccatttgcaagtatggcttttttaaact

SEQ ID NO: 5270 - DNA, 2762 bp, Homo sapiens
  SIMILAR (2)..(2140): 921254mologous to Homo sapiens meningioma-expressed antigen 11,accession number U73682,Smith-Waterman Score=3367.
gacaggccggggttactgtggcgaccacgagagcagctttggcgctatggaggagcccggggctacccctcaaccgtatttggggctgctcctggaggagctacgcagggttgtggcagcactgcctgaaggtatgagaccagattctaatctttatggttttccatgggaattggtgatatgtgcagctgttgttggattttttgctgttctcttttttttgtggagaagttttagatcggttaggagtcggctttatgtgggacgagagaaaaagcttgctctaatgctttctggactaattgaagaaaaaagtaaactacttgaaaaatttagccttgttcaaaaagagtatgaaggctatgaagtagagtcatctttaaaggatgccagctttgagaaggaggcaacagaagcacaaagtttggaggcaacctgtgaaaagctgaacaggtccaattctgaacttgaggatgaaatactctgtctagaaaaagagttaaaagaagagaaatccaaacattctgaacaagatgaattgatggcggatatttcaaaaaggatacagtctctagaagatgagtcaaaatccctcaaatcacaagtagctgaagccaaaatgaccttccagatatttcaaatgaatgaagaacgactgaagatagcaataaaagatgctttgaatgaaaattctcaacttcaggaaagccagaaacagcttttgcaagaagctgaagtatggaaagaacaagtgagtgaacttaataaacagaaagtaacatttgaagactccaaagtacatgcagaacaagttctaaatgataaagaaagtcacatcaagactctgactgaacgcttgttaaagatgaaagattgggctgctatgcttggagaagacataacggatgatgataacttggaattagaaatgaacagtgaatcggaaaatggtgcttacttagataatcctccaaaaggagctttgaagaaactgattcatgctgctaagttaaatgcttctttaaaaaccttagaaggagaaagaaaccaaatttatattcagttgtctgaagttgataaaacaaaggaagagcttacagagcatattaaaaatcttcagactcaacaagcatctttgcagtcagaaaacacacattttgaaaatgagaatcagaagcttcaacagaaacttaaagtaatgactgaattatatcaagaaaatgaaatgaaactccacaggaaattaacagtagaggaaaattatcggttagagaaagaagagaaactttctaaagtagatgaaaagatcagccatgccactgaagagctggagacctatagaaagcgagccaaagatcttgaagaagaattggagagaactattcattcttatcaagggcagattatttcccatgagaaaaaagcacatgataattggttggcagctcggaatgctgaaagaaacctcaatgatttaaggaaagaaaatgctcacaacagacaaaaattaactgaaacagagcttaaatttgaacttttagaaaaagatccttatgcactcgatgttccaaatacagcatttggcagaggctcacgaggcccagggaatcctctggaccatcagattaccaatgaaagaggagaatcaagctgtgataggttaaccgatcctcatagggctccctctgacactgggtctctgtcacctccatgggaccaggaccgtaggatgatgtttcctccgccaggacaatcatatcctgattcagcccttcctccacaaaggcaagacagattttgttctaattctggtagactgtctggaccagcagaactcagaagttttaatatgccttctttggataaaatggatgggtcaatgccttcagaaatggaatccagtagaaatgataccaaagatgatcttggtaatttaaatgtgcctgattcatcttttccttgctaaaaaagaagccactggccctggctttgttcctccacctcttgctccagtcagaggtccattgtttccagtggatgcaagaggcccattcttgagaagaggacctcctttccccccacctcctccaggagccatgtttggagcttctcgagattattttccaccaagggatttccccaggtccaccacctgctccatttgcaatgagaaatgtctatccaccgaggggttttcctccttaccttcccccaagacctggatttttccccccacccccacattctgaaggtagaagtgagttcccctcaggtttgattccaccttcaaatgagcctgctactgaacatccagaaccacagcaagaaacctgacaatatttttgctctcttcaaaagtaattttgactgatctcattttcagtttaagtaactgctgttacttaagtgattacacttttgctcaaattgaagcttaatggaattataattctcaggatagtattttgtaaataaagatgatttaaatatgaatcttatgagtaaattatttcaattttattttagacggtataactatttcaatttgattaatccactattatataaacaatagtgggagttttatatatgtaatctttcaggtggggaggctttaaattctgaagtctgtgtctttatgccaagaactgtatttactgtggttgtggacaaatgtgaaagtaactttatgcttaaataaattatagttgatttaaagatttgtttggcattgataataataaaatcagtagtttttctat

SEQ ID NO: 5271 - DNA, 3681 bp, Homo sapiens
  SIMILAR (315)..(2669): 951254mologous to Homo sapiens MEA6,accession number U94780,Smith-Waterman Score=3839.
  misc_feature (1)...(3681): n = a,t,c or g
tgcccggcggaaaccaaaccgagggatggggtggcgaggacagggtacgtcgcaggcttgtgcgggtcgggttcggacctgcgctgcctcgggatgtaaagtataacaagagggtcgggatgggcagcgtaggcctgtgaggcctgcgggtgcccctgtcccccagctccccccgcagccggctccgcagtggtccactccggttgccgggtgcggattcgggttccggaccgaaggctgtgtgttctccgccgttcattgtggccccgacaggccggggttactgtggcgaccacgagagcagctttggcgctatggaggagcccggggctacccctcaaccgtatttggggctgctcctggaggagctacgcagggttgtggcagcactgcctgaaggtatgagaccagattctaatctttatggttttccatgggaattggtgatatgtgcagctgttgttggattttttgctgttctcttttttttgtggagaagttttagatcggttaggagtcggctttatgtgggacgagagaaaaagcttgctctaatgctttctggactaattgaagaaaaaagtaaactacttgaaaaatttagccttgttcaaaaagagtatgaaggctatgaagtagagtcatctttaaaggatgccagctttgagaaggaggcaacagaagcacaaagtttggaggcaacctgtgaaaagctgaacaggtccaattctgaacttgaggatgaaatactctgtctagaaaaagagttaaaagaagagaaatccaaacattctgaacaagatgaattgatggcggatatttcaaaaaggatacagtctctagaagatgagtcaaaatccctcaaatcacaagtagctgaagccaaaatgaccttccagatatttccaatgaatgaagaacgactgaagatagcaataaaagatgctttgaatgaaaattctcaacttcaggaaagccagaaacagcttttgcaagaagctgaagtatggaaagaacaagtgagtgaacttaataaacagaaagtaacatttgaagactccaaagtacatgcagaacaagttctaaatgataaagaaagtcacatcaagactctgactgaacgcttgttaaagatgaaagattgggctgctatgcttggagaagacataacggatgatgataacttggaattagaaatgaacagtgaatcggaaaatggtgcttacttagataatcctccaaaaggagctttgaagaaactgattcatgctgctaagttaaatgcttctttaaaaaccttagaaggagaaagaaaccaaatttatattcagttgtctgaagttgataaaacaaaggaagagcttacagagcatattaaaaatcttcagactgaacaagcatctttgcagtcagaaaacacacattttgaaaatgagaatcagaagcttcaacagaaacttaaagtaatgactgaattatatcaagaaaatgaaatgaaactccacaggaaattaacagtagaggaaaattatcggttagagaaagaagagaaactttctaaagtagatgaaaagatcagccatgccactgaagagctggagacctatagaaagcgagccaaagatcttgaagaagaattggagagaactattcattcttatcaagggcagattatttcccatgagaaaaaagcacatgataattggttggcagctcggaatgctgaaagaaacctcaatgatttaaggaaagaaaatgctcacaacagacaaaaattaactgaaacagagcttaaatttgaacttttagaaaaagatccttatgcactcgatgttccaaatacagcatttggcagagagcattccccatatggtccctcaccattgggttggccttcatctgaaacaagagcttttctctctcctccaactttgttggagggtccactcacactctcacctttgcttccagggggaggaggaagaggctcacgaggcccagggaatcctttggaccatcagattaccaatgaaagaggagaatcaagctgtgataggttaaccgatcctcatagggctctctctgacactgggtttctgtcacctccatgggaccaggaccgtaggatgatgtttcctccgccaggacaatcatatcctgattcagcccttcctccacaaaggcaagacagattttgttctaattctggtagactgtctggaccagcagaactcagaagttttaatatgccttctttggataaaatggatgggtcaatgccttcagaaatggaatccagtagaaatgataccaaagatgatcttggtaatttaaatgtgcctgattcatctctccctgctgaaaatgaagccactggccctggctttgttcctccacctcttgctccagtcagaggtccattgtttccagtggatgcaagaggcccattcttgagaagaggacctcctttccccccacctcctccaggaagccatgtttggagcttctcgagattatttttccaccagggggatttcccagggtccaccaccttgctccatttggcaatgaggaaatgtcttatcccaccgagggggtttttccttccttaacctttcccccaaggacngggggttttttccccccacccccacatttttgaaggtaggaagtgaatttcccttaggttttgattccaacttcaaatgagcctgctactgaacatccagaaccacagcaagaaaacctgacaatatttttggctctcttcaaaagtaattttgactgatctcattttcagtttaagtaactgctgttacttaagtgattacacttttggctcaaattgaagcttaatggaattataattctcaggatagtattttgtaaataaagatgatttaaatatgaatcttatgagtaaattatttcaattttattttagacggtataactatttcaatttgattaatccactattatataaacaatagtgggagttttatatatgtaatcttgcaggtggggaggctttaaattctgaagtctgtgtctttatgccaagaactgtatttactgtggttgtggacaaatgtgaaagtaactttatgcttaaataaattatagttgatttaaagatttgtttggcattgataataataaaatcagtagtttttctataactatggctctattaattaacttttttccttttaccaataactttgaggtgcaaaactcaaacttatgtgggtcttttgtgttcaattatgttatgacaaatgtgctctctttcttgtaaatagacatgagtggcccaaagcaacaaattaatacacttttaaaagtcaaaattgattatattttaaagataaccaggatattatctaatggtgaattgtagaattttgatcttcttattcactgagtttcttgcacggtttctttattgctttttttcccgcctgttcttttgtaaggtatttactattttctgtggaggatattgagatgtactacaggataactgtagtgaatgatgtgtcatcattttgagctttggactcaatatctttagtgtttccctaaatcagatttgtaggtcatgttaagcttcttgcacattaatatgattatggaaggaaaggcagtgaagcataactaataaacatcataatactt

SEQ ID NO: 5272 - DNA, 447 bp, Homo sapiens
  SIMILAR (442)..(416): 771254mologous to Homo sapiens Human secreted protein, SEQ ID NO: 5210,accession number G01129,Smith-Waterman Score=36.
  misc_feature (1)...(447): n = a,t,c or g
ctttttgagggtcttctgttatttctttattggggtgggggtggggtgcatcattcagatctttgtgctggtgcatacgtgcannnnnnnnnnnnnnnnnnnnnnnnnnnnnnngcatgtgttcacgtatgtatacatatacacacaaggccagagctctagtgtgctggaggaggggcaagctctttttccaagagggtattagaaagaggttgattccagaggatgagtggtctctgaggctatagccccccactgggtgggcagccagctctgtgagaatgccagggtgcagctgacagcgctggaggcctggggactggactctgagaggagcttgggcagacacagcagcctccggccccaacactgccctgggttggcaggcccagccctggtcctgacaggcaggtcctgagctccctcgtgccgaattcctgcaggcgg

SEQ ID NO: 5273 - DNA, 441 bp, Homo sapiens
  SIMILAR (23)..(91): 471254mologous to Homo sapiens Fragment of human secreted protein encoded by gene 99,accession number Y02923,Smith-Waterman Score=62.
  misc_feature (1)...(441): n = a,t,c or g
tgacgctgcggaatcggcacagggagctaaggacctgcctgtcaggaccagggctgggcctgccaacccaggtcagtgttgtggccggaggctgctgtgtctgcccaagctcctctcagagtccagtccccaggcctccagcgctgtcagctgcaccctggcattctcacagagctggctgcccacccagtggggggctatagcctcagagaccactcatcctctggaatcaacctctttctaataccctcttggaaaaagagcttgcccctcctccagcacactagagctctggccttgtgtgtatatgtatacatacgtgaacacatgcnnnnnnnnnnnnnnnnnnnnnnnnnnnnntgcacgtaggcaccagcacaaagatctgaatgatgcaccccacccccaccccaataaagaaataacagaaaaccctcaaaa

SEQ ID NO: 5274 - DNA, 468 bp, Homo sapiens
  SIMILAR (12)..(455): 321254mologous to Homo sapiens alpha-1 type I collagen,accession number M20789,Smith-Waterman Score=109.
atgcgctggcccgatctcccgcggggtaaccacagagcccggacggcgatctgtgctttcgccatagaaagggggaaaggagacctgcagccccagctggacagtgccctgcaggacgtcaacgacatgtacctgctgctggaagagacggaaaaccaggccgtgcgccgggcgctgatcgatgagcggggccgattctgcacctttatcaccttcctgcaccctgtggtggtgggactcctggggactcaaaccccagaagggcaccagcacaaagatctgaatgatgcaccccacccccaccccaataaagaaataacagaaaaccctcaacccgagccggcctgctccttcccagctgacacgtgcagctgtccgggggcctcaccctctgtcctggagatcgggtttcatgatggccccaaggagtactggctgccccagggcctggtccctgcactcacctga

SEQ ID NO: 5275 - DNA, 365 bp, Homo sapiens
  SIMILAR (21)..(308): 371254mologous to Homo sapiens Fragmented human NF-H gene +1 frameshift mutant product,accession number W18664,Smith-Waterman Score=93.
gtgtgctgcaacgcgggcaaagggaaaggagacctgcagccccagctggacagtgccctgcaggacgtcaacgacatgtacctgctgctggaggagacggagaagcaggccgtgcgccgggcgctgatcgaggagcggggccgcttctgcaccttcatcaccttcctgcagcctgtggtgaatggagagctgaccatgctgggagagatcacccacctgcagggcatcatcgacgacttggtggtgctgacagcagaaccccacaaactgcctcccgccagcgagcaggtaatcaaagacctaaagggctcggactacagctggtcctaccagaccccaccaatgtattgcggccgctctagagg

SEQ ID NO: 5276 - DNA, 265 bp, Homo sapiens
  SIMILAR (149)..(214): 451254mologous to Bacteriophage S13 C gene,accession number M14428,Smith-Waterman Score=62.
tttcaggatgtgacaacgtttttaatgcaaagtcaaccattagcatctttcccatgtacttattagatgtgaaatggcaggacttcacgatgcttttctccaggtaaacattgagagtattgttccggaacattccacccgctgcaagttgttgggaaaatttattcgaatttggataaaatactttaggcatctcgtgcacggtgggggctctgctcccgtaagcctggttactggtcctgtacacaaccacccactagttctc

SEQ ID NO: 5277 - DNA, 461 bp, Homo sapiens
  SIMILAR (92)..(322): 271254mologous to Arabidopsis thaliana F4N2.10,accession number AC008262,Smith-Waterman Score=84.
tgtctccgtgtacaggaccagtaaccaggcttacgggagcagagcccccaccgtgcacgagatgcctcgggtggaatgttccggaacaatactctcaatgtttacctggagaaaagcatcgtgactggccccgataactgcatcacctcctgtgaccggctcaacttccaccccagttacaacatcaacaggccatccatctgcgattgaggggctggaaactccctttaggagtcctctgaccccagggcctcctggaaaatcatcatccctcatcacccacagtcgcccgattgtgacggcacagactgcgctgccttccctgaaaatattattcgtctgcggagtaggaaaatatgcaaacggggccgtgaagtcctgccatttcacatctaataagtacatgggaaagatgctaatggttgactttgcattaaaaacgttgtcccatcctgaaaaaa

SEQ ID NO: 5278 - DNA, 675 bp, Homo sapiens
  SIMILAR (108)..(19): 361254mologous to Homo sapiens type IV collagen alpha 4 chain,accession number X81053,Smith-Waterman Score=44.
tttttttttttttttttcaggatgtgacaacgtttttaatgcaaagtcaaccattagcatctttcccatgtacttattagatgtgaaatggcaggacttcacggccccgtttgcatattttcctactccgcagacgaataatattttcagggaaggcagcgcagtctgtgccgtcacaatcgggcgactgtgggtgatgagggatgatggattttccaggaggccctggggtcagaggactcctaaggggagtttccagcccctcaatcgcagatggatggcctgttgatgttgtaactgggggtggaagttgagccggtcacaggaggtgatgcagttatcggggccagtcacgatgcttttctccaggtaaacattgagagtattgttccggaacattccacccgctgcaagttgttgggaaaatttattcgaatttggataaaatactttaggcatctcgtgcacggtgggggctctgctcccgtaagcctggttactggtcctgtacacggagacagccttctgggtcctgtagccccggaaccaccccgggttgttgaacctgcccggcaggtccgcgctcacgcggtagtagtcgctggtcctctccggcggggccgtggccttgggcgccacaggctccgcgcacgctctggggcattcctcagccat

SEQ ID NO: 5279 - DNA, 2067 bp, Homo sapiens
  SIMILAR (1247)..(1294): 931254mologous to Homo sapiens reverse transcriptase homolog= pol {retroviral element},accession number S61070,Smith-Waterman Score=76.
atgcgaggatcctccatcattaatgcctctttaataaaaactcttctcaaggccgctttacttccaaaggaagctggagtcattcactgcaagggccatcaaaaggcatcagatcccatcactcagcgcaatggttatgctgataagacaaaattcttaggtttggccttcccacctctgtacagtccaaaaatgaactggcctttattagtcaaatcacccaagcagtttctcaggctcttggtatttggtaaaaccttcataccccttactgtcctcaatcttcaggaaagtgagatttggcccagagagatcaaccacggctcttttgagcaggtggaacatggtgatgtggccaacactgagaggaggggagctcttgggagcctccaccgtcccaactgctgccacccagggatggtcagccatacccacacacctcccatggcagtgggtttatcacgcatctgtgtagtttcttttcgcaaatgtaagcagatagctatctattttaaccctatcagcatcttgtacagcgcttgcgaggctgagagatcatgggagcctcatgctgccccagctgctgcctctccagtgaggggtctgctgtgcccatgtgtcatccatggtgctctcaatcagatctacgtttggagctttgcgatgagagggtctgctttcctctacttgttctacatcttcctccagttgctctgtttactgatgccgtattggtataggcctgtaacaggtgctggctccttctctcctagactgttgctgttcactgcagttcccccattttgtctgtccaaaaaccggaaagccttacagccctcacgtcagtgtgcggtggctgccgccgccctaatacttttagaggccctcaaaatcacaaactatgctcaactcactctctacagttctcataacttccagaatctattttcttcctcccacctgacgcatatactttctgctccccggctccttcagctgtactcactctttgttgagtctcccacagttaccattgttcctggcccagacttcaatccggcctcccacattattcctgataccacacctgacccccatgattgtacctctctgatccacctgacattcactccatttccccaaatttccttctttcctgttcctcaccctgatcacacttggtttattgatggcagttccaccaggcctaatcaccacacaccagcaaaggcaggctatgctatagtacaagccactagcccgcctcttagaacctctcatttcctttccatcgtggaaatctatcctcaaggaaatcacttctcagtgttccatctgctattctactacccctcagagattgttcaggccccctcccttccctacacatcaaactcggggatttgccccacccaggactggcaaattgatattactcacatgccccaagtcagaaaactaaaatacctcttagtcttggtagacacagggtctaagaaggcgaccgtggtcatttcttcccttctgtcagacataattcctcggtttggccttcccacctctatacagtctgataacggaccagcctttattagtcaaatcacccaggcaatttctctagctcttggtattcagcgaactcatggtcttttaaaaactcacctcaccaacctcagccaccaacttaaaaaggactggacaatacttttaccactttctcttctcagaattcaggcctgtcctcggaatgctacaggactgcacagtgatggagaggcccgaagctccttccaggctcaccatttcaacttcatcacacatgggacagtccctgatgtttttgttccaattttacaactcctgaatgaggactttgaagatccatgcttgggttacttgcctagccctgagatcagtatttgtctagaaccaactagttggagtaaggacaggagctgttcttcaggagaggagggaagtgctgggcagacagtaacgggtgacctccacaaagctcagactcctgaattggaccagccagcctccttgaactgccctgatttataa

SEQ ID NO: 5280 - DNA, 1761 bp, Homo sapiens
  SIMILAR (931)..(1527): 661254mologous to Homo sapiens reverse transcriptase homolog= pol {retroviral element},accession number S61070,Smith-Waterman Score=573.
atgcaggttgccactcgccccgggaagggggagatcaacaggtgggggtctctgcccgggcgatcactctccatggaggacagccccgattgtgccctggggactgtgcaatcccgtattgtctcggagtgttcacaacaaagagctttgtccctgaggactgcccgagggcagaggaggaggagagagaagcagcaaatgaattcccaggttgggaaggaaggagctctgacctccagccctctggcgttaaagataaatcctctacagttcccatccaaacggcatccattactcacaatcagaattgggtggggacctagattccactcccaggaatctcctctgggccaggtacaaaattctgagctacaaccagatgaacagtacttcccaacaacacacagagaggttaatccaagggagaaaaacctgggtcaaatgaaaagatcgaggcttgcagacctcattaagcacagtgcctccctttacacgcagctaccaaacacaccctcagctctctgctgcccacagctgaggttcccagaagagcaaatgctgctgatccggaccgaagttagtctcttcccgctggaagtggcaatgagccaggataaatgtacatgcttcccagactccttgcaggaagggatggccaaagccacacaatcagaagttgttgggtggagattctgggaaaactctttaaaaggagccgacacaacactccttcagctatactcactctttgttgagtctcccacaattaccattgttcctggcccggacttcaatccggcctcccacattattccggataccacacctgaccctcatgactgcatctctctgatccacctgactttcaccccatttccccacatttccttcttccctgtttctcatcctgatcacacttggtttactgatggcagttccaccaggcctaattgccactcaccagcaaaggcaggatatgcaatagtatcttccacatctgttattgacgctaccgctctgcccccctccactacctctcagcaagccgaaccagctgccttaactcaggccctcactcttgcaaaaaggctaggcatcaatatttatactgactctaaatatgccttccatattctgcactaccatgcagtcatattggctgaaagaattttccttactacacaagggtcctccatcattaatgcttctttaataaaaactctgctcgaggccgctttacttccaaaggaagctggggtcattcactgcaagaggcatcaaaaggcgtcagatcccattgctctaggcaacgcttgtgctgataaggtggctaggcaagcagctagctttccaacttctgtctctcacagcaattctgatgcagataaggtggctagacaagcagctagctctccaacttctgtccctgacggccagtttttctccttcacatcggccactcccacctactcccccgctgaaacctccacctatcaatctcttctcacacaaggcaaatggttcttagatctaggaaaatacctccttccagcctcacaggccccttctattctgtcgtcatttcataacctcttccatgtaggttacaagccactagcctgtctcttagaacctctcatttcctttccatcatggaaatctatcctcaaggagatcacttctcagtttcccatctgctattctactacccctcatggattgttcaggcctcctccctttcctacacatcaagctcagtga

SEQ ID NO: 5281 - DNA, 1967 bp, Homo sapiens
  SIMILAR (7)..(1254): 391254mologous to Baboon endogenous virus strain M7 gag-pol precursor polyprotein,accession number D10032,Smith-Waterman Score= 718.
atggttggatactttcgcctttggatacctggttttgccatcctaacaaaaccattatataaactcacaaaaggaaacttagctgaccccatagatcctaaatcctttccccactcctctttctgttccttgaagacagctttagaaactgcccccactctagctctccctgactcatcccaacctgcttcattacacacagccgaagtgcagggctgtgcagtcggaattcttacacaaggaccaggatcgcgtcctgtagcctttttgtccaaacaacttgatcttactgttttaggctggccatcatgtctccgtgcagccgctgctgctgccctaatacttttagaggccctcaaaatcacaaactatgctcaactcactctctacagctctcataatttccaaaatctattttcttcctcacacctgacacatatactttctgctcccggactccttcagctatacttacactttgttgagtctcccacaattaccattgttcctggcccggacttcaatccggcctcccacattattccggataccacacctgaccctcatgactgcatctctctgatccacctgacattcaccccatttccccacatttccttcttccctgtttctcaccctgatcacacttggtttattgatggcagttccaccaggcctaatcgccactcaccagcgaaggcaggctatgctatagtatcttccacatctatcattgaggctactgctctgcctccctccactacctctcagcaagctgaactagttgccttaactcaagccctcactcttgcaaaaggactatgcgtcaatatctatactgattctaaatatgccttccatatcctgcaccaccatgcagtcatatgggctgaaagaggtttcctcactacacaagggtcctccatcattaatgcctctttaataaaaactctgctcaaagccgctttacttccaaaagaagctggggtcattcactgcaaggggcatcaaaaggcatcagatcccattgctctaggcaatgcttatgttgataaagtggctagacaagcagctagctctccaacttctgtccctcacggccagtttttctccttcacttcagtcactcccacctactcccccactgaaacttccacctatcaatctcttcccacacaaggcaaatggttcttagaccaaggaaaatatcttcttccagcctcacaggcccattctattctgtcatcatttcataacctcttctatgtagacataattcctcggtttggccttcccacctctatacagtctgataacggaccagcctttactagccaaatcacccaagtagtttctcaggctcttggtattcagtggaaccttcataccccttaccgtcctcaatcttcaggaaaggtggaacggactaatggtcttttaaaggcacacctcaccaagtttagcctccaacttacaaaggattggacagcacttttacctcttgctcttctcaaaatcagagcctgtcctcgagatgctacaggatacagtccatttgaacttttatatggacgcactttcttgcttggccccaacctcatcccagacaccagccctctaggcgactatcttccagtactccagcaggctagacaggaaattcgccaggctgctaatcttctcttgcctactccagatccccagccatatgaagacaacctagctggacgatcagttcttgttaagaatctgacccctcaaactctacaacctcgatggaccggaccctacttagtcatctatagtaccccgactgccgtctgcctgcagaatcctccccactgggttcaccattccagaataaagctgtgtccatcggacagccagcctaatccctcctcttcctcctggaagtcgcaagtactctcccccacttcccttaaactcactcatatttctgaagaaca

SEQ ID NO: 5282 - DNA, 1911 bp, Homo sapiens
  SIMILAR (123)..(161): 761254mologous to Homo sapiens Human secreted protein, SEQ ID NO: 5210,accession number G01129,Smith-Waterman Score=58.
taaaacggccccacccttatctccctttgctgactctcttttcggactcagcccacctgcacccaggtgaaataaacaaccatgttgctcacacaaggcctgtttggtggtctcttcacacggacgtgcatgaaatttggtgccgtgactcggattggggggacctcccttgggagatcaatcccctgtcctcctgctctttgctccatgagaaagatccacctacgacctcaggtcctcagaccaaccagcccaagaaacatctcaccaatttcaaatccggtaagcggcctctttttactctcttctccaacctccctcactatccctcaacctctttctcctttcaatcttggcgccacacttcaatctctcccttctcttaatttcaattcctttcattttctggtagagacaaaggagacatgttttatccgtgtacccaaaactccggcgccagtcacggactgggaaggcagccttcccttggtgtttaatcactgcagggacacctctgtgattattcacccacgtttcaaaggtgtcagaccacgcagggacgcctgccttggtccttcacccttagcggcaagtcctgcttttctggggaaggggcaagccgagctaggtcccaattcttcctcagcctctgctcctccaccctataatctttttatcgcctcccctcctcacacctggtccggcttacagtttcgttcggtgactagccctcccccacctgcccagcaatttactcttaaaaaggtggctggagccaaaggcatagtcaagcggctgaagactgacactgcccgatcgccttggaagacccctagaccatcacggacgccgagcttcagaaaagcagaacggactaaaggtcttttaaaaatacacctcaccaagctcagccaccaacttaaaaaggactggacaatacttttaccactttcccttctcagaattcaggcctgtcctcggaatgctacaagactggctactggccaattgggatatccttttatcagtcaaagctatgtcctggtcaatggatttcaaactgttgaggatctatgtgaagctgcagaccttcgagtgagtgttgcagaccttcgagtgagtgttacagctcttaaggtggcgcgtctggagttgttcgttcctcccggtgggctcgtggtctcgctggcttcagcagtgaagctgcagaccttcgcggtgttacagctcataaaagcaaaaagatgggactggggcaccttggagcagggggcggcgctcatcggggaggctcgggacgcacaggagcccacggagggggtgggaggctcaggcatggcgggctgcaggtccagagacctgccccgcgggaaggcagctaaggcccggcgagaaatcgagcgcagcgccgggctgacgatcaagaaggaaagatgcatacgaaatggatacagcaaagaaaaaatgaaactcatagttgtttctcatggcctccatgtaaatgacttgcagcataaactgacgcttttcaccaaggaaacatacacatacctagccagggattcagagaagcagaagcaggggtatctagcaggacttgaaggagcccatgccaacagggtgaaccagcagatcagtgacaacttagccatagtctttggacaaaagattcaaggccatctctccactactggacagctgcttatggcaggtcaagaaggaaagctgggccagcttcttttcctgggaatttcgggttggacaattcaactgaatgatgtttattgtctacagacacaatcaacaattgtccacataagatcagaagcagggaattccaatccacgagaatggctgccgcttttacaaggaatcagcagtaaagatgaaacacagccctttatgccttag

SEQ ID NO: 5283 - DNA, 2146 bp, Homo sapiens
  SIMILAR (845)..(1321): 311254mologous to Feline leukemia virus gag-pol precursor polyprotein gPr80,accession number AF052723,Smith-Waterman Score= 180.
ctagtagacactgggaaatgtcagtgagagctcccagggtatggagatatgagggctgttgttcttagggtaagatggagtcccgtgatggctgcgttccccaaatggcaccctctccacagctgtccaagtattggggtggggagtaattggcccggtgcgagtttcctgtctggtgcaatgacctcgcagggtctccaaactgccactcatacttgtatcactgtacatatgggtagaggagctctcctcctgctgtgtggcccggttcctgtcagaccacagactggtactggtccatggcctatgggttggggacccctgtacttcactgaagccatttatcagctcaaggagccttttggcagagccttcaggattttctaggtataaaatcatatcatcagtgaagagagataatttcagtctgtggtctgacaggaaccgggccacacagcaggaggtgagtggcaggtgactgagtgaagcctcatctgtatacaggaaaaggaggtgagattaacagagtgacttgtcagctagtcagcacggcttgtttccacttgctacagaggtgaggagtagtggtgctgccagctgccctgatagtgactccatctgccctgcccccaccatcgccccaggccgtgccacacctccccaagccaactgctgggcttctgaaggcaccctgagataccaagcgttacctggcaaccgcgcacctgtgagccaggtcagccaggcaggtggtgctaacctgtgtgttcagcagcccaagaaacatctcaccaatttcaaatccggtaagcggcctctttttactctcttctccaacctccaaggaccgagatcgcgtcctgtagcctttttgtccaaacaacttgaccttactgttttaggctggccatcatgtctccgtgcagcagctgctgccgccctaatagttttagaggcccttaaaatcacaaactatgctcaactcactctctacagctctcataatttccaaaatctattttcttcctcccacctgacgcatatacttttctgttcccctggctccttcagctgtactcactctttgttgagtctcccacaattacccattgttcctggcccagacttcagtccggcctcccacattattctggataccacacctgaccctcatgactgtatctctctgatccacctgacattcaccccatttccgcatatttccttctttcctgctcctcaccctgatcacgcttgatttattaatggcagttccaccaggcctaatcgccacacaccagcaaaggcaggctatgctatagtacaagtcactagcccgcctcttaaaacctctcatttcctttccatcgtggaaatctatcctcaaggaaataacttctcagtgttccatctgctattctactactcctcagggattattcaggcccccctcctttccctacacatcaagctcagggatttgccaccgcctaggactggcaaatcagcgttactcaacatgccccgagtcaggaaactaaaatacctcttagtcttggtagacacagggtctaagaaggcgaccgtggtcatttcttcccttctgtcagacataattcctcggtttggccttcccacctctatacagtctgataacggaccagcctttattagtcaaatcacccaggcaatttctctagctcttggtattcagcgaactcatggtcttttaaaaactcacctcaccaacctcagccaccaacttaaaaaggactggacaatacttttaccactttctcttctcagaattcaggcctgtcctcggaatgctacaggactgcacagtgatggagaggcccgaagctccttccaggctcaccatttcaacttcatcacacatgggacagtccctgatgtttttgttccaattttacaactcctgaatgaggactttgaagatccatgcttgggttacttgcctagccctgagatcagtatttgtctagaaccaactagttggagtaaggacaggagctgttcttcaggagaggagggaagtgctgggcagacagtaacgggtgacctccacaaagctcagactcctgaattggaccagccagcctccttgaactgccctgatttataa

SEQ ID NO: 5284 - DNA, 420 bp, Homo sapiens
  SIMILAR (15)..(221): 361254mologous to Mus musculus T2,accession number X67863,Smith-Waterman Score=76.
cggacgcgtgggggagaaaaagagtaggaggagaagcagaggagcaggagataaaggataaaatgagaggaggaggagaaatagaggagaagcagaggagcaggagataaaggataaaatgagaggaggaggagaaatagaggagaaccagtggagaaggaggaggatgacaggaggaggaagaggcaatggagaagaggagaggaggagaagaggagaagggggaggaactgtggaggaggaggaggagaggagaaggaggatgggagaaggaggaggcttccttgtttcctcctccttccttctttgcttgtttctctgctgtggctcgtttcctttttgccctgtgtgtttggctttttcggtgctccggccgttgtctttgctcgctttcgggggcttcgggctttttgtcgcttt

SEQ ID NO: 5285 - DNA, 469 bp, Homo sapiens
  SIMILAR (2)..(124): 1001254mologous to Homo sapiens ferredoxin,accession number M34788,Smith-Waterman Score=209.
ctcagaagataaaataacagtccactttataaaccgtgatggtgaaacattaacaaccaaaggaaaagttggtgattctctgctagatgttgtggttgaaaataatctagatattgatggctttgtaatgagcaccacccggctgctcgaacctgaaaccgtagagcaccattccttcctctttcttcccaacctgacatccagtccatcggcacctcctgccagttgtgcccccaagattcgcctccagcatgtcctgttggctccatccctacagtcggcacgaggggctggccagccactgggcgcctggagctgtgctaacctgcttctgctctggagtttaacagccagatcacggttgggctgccaaatctgtttgacaaaatctatggacaatatgactgttcgagtgcctgaaacagtggctgatgccagacaatccattgatgtgggcaagacctcctga

SEQ ID NO: 5286 - DNA, 777 bp, Homo sapiens
  SIMILAR (777)..(595): 1001254mologous to Homo sapiens ferredoxin,accession number M34788,Smith-Waterman Score=300.
tcaaaacaaaggggctacagaccccatgcaagtccaaaatccagcagggcagtcaaatcttaaagctccaaaatgatctcctttgactacatgtctcacatccaggtcacactgatgcaagagctgggttcccatggtcttgggcagctccacccctgtggctttgcaggatacagcctccctcctggctgctttcatgggctggcattgagtgtctgtggcttttccaggcatatcatgcaagctgtcagtggatctaccattctgaggtttggagggcagtggccctcttcgcacagctccactaggcggtgccccaatagggactctgtgtgggggctccaaccccacatttcccttctgcacaaagccatcaatatctagattattttcaaccacaacatctagcagagaatcaccaacttttcctttggttgttaatgtttcaccatcacggtttataaagtggactgttattttatcttctgagcaagttaggcacgtcagacaatcagtgccaaagccaagtttcaagtcccggcagattacttcaacgcaggggctttcaacacttgagcaactagcaaagggcctgctccgggcccgcgccgacacgctcagcgaccggctcgcctccgcgctcccgcccggcccccggttcctcagcaggccgctggatccagcgcgggacccagcgtggtgcagccaccggccggccgggccgccgaggacagcagaagcggcgcgcagcagccgggcgcccccagcggcagccat

SEQ ID NO: 5287 - DNA, 2630 bp, Homo sapiens
  SIMILAR (423)..(980): 831254mologous to Homo sapiens ferredoxin,accession number M34788,Smith-Waterman Score=716.
gggtatgcggaacagaacacagtggtctagctaaccgatttccgctagacgtccagctatctttcaaaatattttgtttctgcacggcaacttcagccgctaaaaaagcatccagcttacaacggaacctggagggttggtaaaggccccctgcgctggccccgccccatgggaccgggcggcgtgggcgtgagaggcggggcggggcgcgctctgcttgccaatgtctttataggtcacccggaaggcacgcggaacctcggcgcggtgcttccagcagggtctctccgccactccagccccgcgcccctcgccgcggccctcgggcgtctgcgccgcagctgccgcccccgcctctttggagtctctcgcggcctcaaagcgcggcctgcgtcgcttccggcagttcccgaccgcgggcgatggctgccgctgggggcgcccggctgctgcgcgccgcttctgctgtcctcggcggcccggccggccggtggctgcaccacgctgggtcccgcgctggatccagcggcctgctgaggaaccgggggccgggcggtagcgcggaggcgagccggtcgctgagcgtgtcggcgcgggcccggagcagctcagaagataaaataacagtccactttataaaccgtgatggtgaaacattaacaaccaaaggaaaagttggtgattctctgctagatgttgtggttgaaaataatctagatattgatggctttggtgcatgtgagggaaccctggcttgttcaacctgtccacctcatctttgaagatcacatatatgagaagcttagatgcaattcactgatgaggagaatgacaatgctcgatctgggcaatggactacccagccagatccccggttgctgccaaatcctgtttgacaaaaatctatggacaatatgactgttcgagtgcctgaaacagtggctgatgccagacaatccattgatgtgggcaagacctcctgaactagaacaaatagggaatattttcatggaaaatttacctatttttataattattatttcttaaagtgattaaattgagaacatggatgagtggacttcatattatgactagctttactattttaattcaccttgcataactactgaattttgtcattcttgaaagtatgcaatttttattttggttatattacaaaaatgtcaatcaaatattaaaaaatagttaatgtgatagaaaaaccttacatatttttttctcatgtgtgtgtatcgcgacttgcgcaatgtgttttcataatatctcatctggtttacctagaagataggttaaggaaaatatattattattccctgttttgatgtgggtgaaggccagagatctaacctggcttggtttagggccataccaactatttacaaactctgtactagaccctgtgtccttattcctataagctatgtgttcagactgaaactggagaaattacgactattctatctctagtagtagttaaattccgagtggtgtatggcacaaaaaatatttattggctcagtaaagctgcttaacttcaaaagatagttattgccctttataaataaatatttcaaaattttgatgcggaaggactaagtctggccgtagacgattataatgctatcaaagaagtttgatctctgttttgactaaactagaggaaaaatgattggatgtgtttattcttttctaagcagaatggtttaactttgtactctttgaaaaataatgctgatttataaatctctgcctataacagaatggaaaccttatgaatgaattgtgtttctctgtcctgagctcggtacccctggagaagggaatgagcaggctgacacgttgcacagccccaggtggcgccattctctcacgcaaggatggggctgcagggtgagcagcgtgggctgcagtgtgtcagtcccaggagtgagggagtggcaagcaccacagattaccacgtatgtgtggaagacattcgtactcttatctttactataaataaattcataaaagttaacaaaggggtacacagtatggtctttggaaatataataaaacatcaactaacttggactaattgtgaggaaagagcagaccaaattagtagaaagaggttataagacaattgagttagcttcatgtgtattattgcagcttgatcatttatataaatatttgtctagtacaatgcttgacatacagcattgtgttatgcccattggggacacagaggtgaacaagacaaggaatgccatcagggaattcaccttttattaggaaaatataaaatatgtatgtatgtgcagataatttgcttgaactaaactgactagttctgctaaataagattttaaactaattcatatgtaaaaagtgattaggaagaacttgaagtatcatttgatgcttaataactattgagtaggtttttttttttttttttggtggggggagcgggggacagggtcttactctgtcactcaggccagagtacaatagtatgatctcggctcactgcaacttctgcctcccagtttcaagggattctcgtgcctcagcctcccaggtagctggtactacaggcacggaccaccacgcctgggctaatt

SEQ ID NO: 5288 - DNA, 503 bp, Homo sapiens
  SIMILAR (60)..(389): 501254mologous to Homo sapiens GAGE-8,accession number AF055473,Smith-Waterman Score=270.
  misc_feature (1)...(503): n = a,t,c or g
aagcattcagaaggcacacatacttacacttccctgagacttagttcgaaatgtgaaatatgatttggcgaggaagatcaacatataggcctaggccgaggagaagtgtaccacctcctgagctgattgggcctatgctggagcccggtgatgaggagcctcagcaagaggaaccaccaactgaaagtcgggatcctgcacctggtcaggagagaaaagaagatcagggttcagctaagactcaagtgcctgacctggaagctgatctccaggagctgtctcagtcaaagactgggggtgaatgtggaaatggtcctgatgaccaggggaagattctgccaaaatcagaacaatttaaaatgccagaaggaggtgacaggcaaccacaggtttaaatgaagacaagctgaaacaacccaaaactgtttttatttaagatatttgacttaaaaatatcgaaataaacttttgcagctttctccnnnnnnnnnnnnnnnnnnnnn

SEQ ID NO: 5289 - DNA, 330 bp, Homo sapiens
  SIMILAR (33)..(299): 331254mologous to Glycine max N-75,accession number M16976,Smith-Waterman Score=110.
tcacaaggccacaaactgtatggtgtcattgacataacactctccccaagacaaaaccctggttccaggagcccggtgatgaggagcctcagcaagaggaaccaccaactgaaagtcgggatcctgcaccccgtcttccccgcagcccttaatccgccgatcctccctggcgatctcagcgcccccaggggctgaccaggccaccgccagaacctctccgtcctcacgggtctcctcctgcccacctaagtctcttctgccagcggtcatgccctgggcctcaggaaagaccgcacccctccacgatgtgaaggaatgcacgggcgtcat

SEQ ID NO: 5290 - DNA, 661 bp, Homo sapiens
  SIMILAR (429)..(560): 341254mologous to Homo sapiens 24-JUN-1996 cDNA encoding GAGE -1 tumour rejection antigen precursor,accession number V05540_cd1,Smith-Waterman Score=67.
gtcttttgccaggagccttaagaaattgctcagctagcttgaccaacttaatggcttcccaagcattcagaaggcacacatacttacacttgccctgagacttagttcgaaagtatttacaaacttttaaaaaatgacaagttaatatttggtcatggaagtggtcaaatatagctgtcttttcaagtgcatttaccaattcacagtattctgtttgcagtgtgaaatatgatttggcgaggaagatcaacatataggcctaggccgaggagaagtgtaccacctcctgagctgattgggcctatgctggagcccggtgatgaggagcctcagcaagaggaaccaccaactgaaagtcgggatcctgcacctgggtcaggagagagaagaagatcagggtgcagctgagactcaagtgcctgacctggaaggctgatctccaggagctgtctcagtcaaagactgggggtgaatgtggaaatggtcctgatgaccaggggaagattctgccaaaatcagaacaattttaaaatgccagaagggaggtgacaggcaaccacaggtttaaatgaagacaagctgaaacaacacaaaactgtttttatctaagatatttgacttaaaaatatcgaaataaacttttgcagctttctccaaaaaa

SEQ ID NO: 5291 - DNA, 155 bp, Homo sapiens
  SIMILAR (155)..(102): 1001254mologous to Homo sapiens mitochondrial 5'(3')- deoxyribonucleotidase (dNT-2),accession number AJ277557,Smith- Waterman Score=94.
  misc_feature (1)...(155): n = a,t,c or g
ggtgaagaggacatgctcccagctgggggttggctcggcccctgtcgcaggccacttgcctgtgatgtccggccggtcgtctatgagaaggtcagcaganccacggtcttgtctctggtcagcacaatctgctccagaaagtcagggccaaagta

SEQ ID NO: 5292 - DNA, 348 bp, Homo sapiens
  SIMILAR (249)..(121): 931254mologous to Homo sapiens mitochondrial 5'(3')- deoxyribonucleotidase (dNT-2),accession number AJ277557,Smith- Waterman Score=209.
ccgccttcgcagcgggtgtgaggatggcacgagatgcggcaaggaggccgtcagcacgcgcagccagtgctcagtcaacagggactgactgcgggtcactgtcaccaccagcactgtcgcaggccacttgcctgtgatgtccggccggtcgtctatgagaaggtcagcagagaccacggtcttgtctctggtcagcacaatctgctccagaaagtcagggccaaagtacttctccacccaggcatactggacgcaaacaggcaagggcaggtggtgagaagaaagtgacatcagacccagcgaacactgcacagcataacccaaacacagggagcagagggcggccat

SEQ ID NO: 5293 - DNA, 467 bp, Homo sapiens
  SIMILAR (74)..(280): 751254mologous to Homo sapiens mitochondrial 5'(3')- deoxyribonucleotidase (dNT-2),accession number AJ277557,Smith- Waterman Score=278.
ctttctggagcagattgtgctgaccagagacaagaccgtggtctctgctgaccttctcatagacgaccggccggacatcacagcaatgtggactgatgcaatgaatgacaggagggcagagcaaagctcctgcagggaaggggccgagccaacccccagctgggagcatgtcctcttcaccgcctgccacaaccagcacctgcagctgcagcccccccgccgcaggctgcactcgtgggcggacgactggaaggccattctggacagcaagcggccctgctgagctggactgtgcttcgggctcctctgtggggctctgacctcagggctcccagctcggggcctgtggggccagtatgctggtctgggaggccctcctagactcctgggccccatgacctcctgctgcatgtcccttcccttccccagccctgccaggccttaacctgatcacggggcagggctgg

SEQ ID NO: 5294 - DNA, 724 bp, Homo sapiens
  SIMILAR (344)..(36): 931254mologous to Homo sapiens mitochondrial 5'(3')- deoxyribonucleotidase (dNT-2),accession number AJ277557,Smith- Waterman Score=530.
gccccacagaggagcccgaagcacagtccagctcagcagggccgcttgctgtccagaatggccttccagtcgtccgcccacgagtgcagcctgcggcgggggggctgcagctgcaggtgctggttgtggcaggcggtgaagaggacatgctcccagctgggggttggctcggcccctgtgatgtccggccggtcgtctatgagaaggtcagcagagaccacggtcttgtctctggtcagcacaatctgctccagaaagtcagggccaaagtacttctccacccaggcatacttctcatagggacagtacttgaaacatcttgcatggggcttgtgcaagatgaaaaacgtcagtgttttgtaggctggccatctccttgacagcttcccacggcccctggcagaggctcaagttcaaaaaagaaattctttgactcccaaatgctgatggccttctcgctcagccctggccgcaggcggccgtactgctccgacacccagaagccgcgccggtcctccagcgcgatgaagggctggtcgggaaagcgcgcgcggaacttcctgaggaatccgccctcgaagtcagccagcacgccgtccatgtccaccagcacccgtagggcgcggcctcccgccaggcccagcccgcccgccgccccgcgccgccccgcgggaaccgccgcgctgcagagccgccgcgcacaccagccgcccagccggatcat

SEQ ID NO: 5295 - DNA, 1554 bp, Homo sapiens
  SIMILAR (808)..(1551): 701254mologous to multiple sclerosis associated retrovirus polyprotein,accession number AF009668,Smith-Waterman Score=919.
atggctgccttgtcagagcgctttcatgccaaggagccagcaggatctgacagctacccttggactagcagagttttgcaaagaaatgatggtgacagtttatttacggacgctcagattcgcggccgtataatggaggcagccctactaggaaaggcaagggtgcaggtttttgagaatgcatcggtaagggccattaaatccgaccttcctcagtcctccttgtggtctaggaggaaaactagtgtttctgcttctgtgtcagtgagcgcaactattctgatcagcagggtccgcggaccattaagaaaacaagcaaagaaatctccaaaggcccacaaaaaacccctggctattggttatgtcccctacaagcttagggggaggggaatttggcccaacccagaagggctaaggagaaataggaaaaagcccatgaattattcagtgatgtccaccataactcagggaaaggaagaaaatccttctgccttcctcaagtggctacaggaggccttaagaaaatatactcccctgtcaaccggctccatcaagggtcaattgatcctcaaagataagtttattacccaatcagctgcagatatcaggagaaagctccaaaagcaagccctgggccctgatctaaatctggaggtgttattaaatctggcaacctcggtgttccataatagggaccaagaagaacaggcccaaagggaaaagcgagatcagagaaaggctgcagcctttgtcatgacaattagagaaacaaacattggtggttcagagaggacagaaaatggagcaggagtacaaaaatcgaatggtcagtggagactagtgcaagatcttagactcatcaatgaggcagtaattcctctatatccaattgtacccaacccctataccctgctctctcaaatacaagaggaagcagaatggttcactgttctggacctcaaggatgccttcttctgtattcccctgcactctgactcccagtttctctttgcctttgaggattccacagaccacacgtcccaatttacatggatggtcttgccccaagggtttagggatagccctcatctgtttggtcaggcactggcccaagatctagaccacttctcaagtcgaggtactctggtccttcagtatgtggatgatttacttttggctaccaatttggatgcctcatgccagcaggctactctagatctcttaaactttctagctaatcaaggatacaaggcatctaaattgaaggcccaactctgcctacaacaagtcaaatatctaggcctaattttagccagaggaaccaagaccctcagcaaggaacaaatacagcctgtgctggcttatcctcaccctaagacattaaaactgttgcaggggttccttggaatcacaggcttttgccaactatggatcactagatacagtgagatagccaggcctctctatattctaatcaaggagacccagagggcaaatactcatctaatagaatgggaaccagaggcagaaacagccttcaaaaccttaaaatag

SEQ ID NO: 5296 - DNA, 366 bp, Homo sapiens
  SIMILAR (230)..(51): 431254mologous to Homo sapiens Human secreted protein, SEQ ID NO: 7083,accession number G03002,Smith-Waterman Score=89.
atgaagccgtggatcctcacagtgagtgttacagttcttaaagatggtgtgtccggagttttttcattctggtgggtttgtggtctcactgacttcaggactgaatctgcagatcttcacggagtgaagctgcagaccttcacagtgagtgttacagctcataaagttagtgtggacccaaagagtgagcagcagcaagatttattgcaaagagtgaaagaacaaaacttacacagcgtggaaggggacccgagtgggttgccgctgctggctagggacaccccaactgctgttgggaatttggctgatgaccgctctagctacttcctgctggataggggtgaagaaggggccctgcagttgtag

SEQ ID NO: 5297 - DNA, 717 bp, Homo sapiens
  SIMILAR (1)..(192): 841254mologous to Homo sapiens reverse transcriptase,accession number AF015998,Smith-Waterman Score=292.
atgaattcagttatagaatctatgggagcattacagccaggattgccttctgctataattccaaaaaattggcctttaatagtcatagatttaaaagacggtttatttactatccctttagctgagcaagactgtgaatggtttgcatttacaattcctgtggtaaataacctgcagcctgctaagcgttttcattgttttacagatgggtctaataatggtaaagcttcttattctggatcaaaaaataaagttttccagatgtcctatacttcagctcaaaaagcagagcttgtagctgtaattgagttaattgaaaatgctcagttacgatttcatacagatgaacaactgatgactttatttacccaattacaaacagcagttaggagtagaatgcaccctttttacatcactcacattagggctcatacacctcttccaggacctttgactgaagggaatcaaatggctgatcgcctagttgctaatgcaatatctagtgctagacactttcagcaacacctgttgaacacagccacccacctggggacagatcaagaagctgtcacagatggcggaaaaaacttgaggaaagcgggacaagcagtcacgagtaatttaatggtagctataatagcagttatcaccactgccatgagtattccttcaacaagggctgacacagagaacaattatacttattgggcatattga

SEQ ID NO: 5298 - DNA, 689 bp, Homo sapiens
  SIMILAR (130)..(678): 741254mologous to multiple sclerosis associated retrovirus polyprotein,accession number AF009668,Smith-Waterman Score=708.
gtatgttcaactattgagggccaggaaattgacttcctcctggacactggcgccgccttctcagtgttaatctcctgtcctggacgactgtcctcaaggtccgttaccatccgaggaatcctgggacagcctgtaaccaggcaatatcccttaaggcctgaagttcataaaggattacagaatattgttaaacatttgaaagctccaggcttagtaaggaaatgcagcagtcactgcaacaccccaattctaggagtacaaaaaccgaacggtcagtggagactagtgcaagatcttagactcattaatgaggcagtagttccactatatccagttgtacccaacccctataccctgctctctcaaacaccagaggaagcagaatggttcatggttctggacctcaaggatgccttcttctgtattcccctgcactctgactcccagttcctctttgcttttgaggatcccacagaccacacgtcccaaattacgtggatggtcttgccccaagggtttagggatagcccttatctgtttggtcaggcactggcccaagatctaggccacttctcaagtcgaggcactctggtccttcaatatgcagatgatttacttttcgctaccagttcagaagcctcatgccagcaggctactctagacctcttgaactttctagctaatcaaag

SEQ ID NO: 5299 - DNA, 616 bp, Homo sapiens
  SIMILAR (501)..(614): 411254mologous to Homo sapiens Gag-Pro-Pol protein,accession number AF164613,Smith-Waterman Score=66.
agggaaagcacatttagttgattatatcaaggcctgtgatagtatcagaggtaatctacataaagctactttgttggcacaggcgatggcaggactgagagtggataaaggaaatactccatttcctggagcttgttttaactgtgggaagcatggtcatactaaaaagaatgtagaaaaaaaatcagcgactgagcaatactgtgaacggtttgcatttacaattcctgcagtaagcaacctgcagcctgcgaagtgttttcattgtttcacagatgggtatagtaatggtaaagcttcttattctggatcaaaaggtaaagttttccagacaccctatacttcagctcaaaaagtggagcttgtagctgtaattgaggtattgactgcttttgatatgcctattaatgtgatttctgattcttcatacatggttcactccacacagttaattgaaaatgctcagttacaatttcatacagatgaacaactgataataaaaacaaaaaagggggagaaacagggattaagggatagcccatatacaattgaatctagcattattaactttcaattttttaagcctgcccaaaggccagatgttatcagcagctga

SEQ ID NO: 5300 - DNA, 461 bp, Homo sapiens
  SIMILAR (74)..(298): 601254mologous to Human endogenous retrovirus K pol protein,accession number Y17832,Smith-Waterman Score=234.
  misc_feature (1)...(461): n = a,t,c or g
cgtggccgaattcggaacgattgatttaaattcctgcagaaacaacctgcagcctgctaagcattttcattgtttcacagatgggtccagtaatggtaaagcttcttattctggatcaaaaggtaaagttttccagacgccctatatttcagctcaaaaagtggagcttgtagctgtaattgaggtattgactgcttttgatatgcctattaatgtgatttctgattcttcatacatggttcattccacacagttaattgaaaatgctcagttacgatttcatacagatgaacaactgataataaaaacaaaaaaggggggaaacagggattacgggacagcccagacacaattgaatcttgcattattaactttccatttttcgagccttcccaaaggccagatgttaccagcagctgaacagcatctacagaaaccagctgcaaagacacaagcagaan

SEQ ID NO: 5301 - DNA, 1148 bp, Homo sapiens
  SIMILAR (402)..(1145): 701254mologous to multiple sclerosis associated retrovirus polyprotein,accession number AF009668,Smith-Waterman Score=919.
aagggctaaggagaaataggaaaaagcccatgaattattcagtgatgtccaccataactcagggaaaggaagaaaatccttctgccttcctcaagtggctacaggaggccttaagaaaatatactcccctgtcaaccggctccatcaagggtcaattgatcctcaaagataagtttattacccaatcagctgcagatatcaggagaaagctccaaaagcaagccctgggccctgatctaaatctggaggtgttattaaatctggcaacctcggtgttccataatagggaccaagaagaacaggcccaaagggaaaagcgagatcagagaaaggctgcagcctttgtcatgacaattagagaaacaaacattggtggttcagagaggacagaaaatggagcaggagtacaaaaatcgaatggtcagtggagactagtgcaagatcttagactcatcaatgaggcagtaattcctctatatccaattgtacccaacccctataccctgctctctcaaatacaagaggaagcagaatggttcactgttctggacctcaaggatgccttcttctgtattcccctgcactctgactcccagtttctctttgcctttgaggattccacagaccacacgtcccaatttacatggatggtcttgccccaagggtttagggatagccctcatctgtttggtcaggcactggcccaagatctagaccacttctcaagtcgaggtactctggtccttcagtatgtggatgatttacttttggctaccaatttggatgcctcatgccagcaggctactctagatctcttaaactttctagctaatcaaggatacaaggcatctaaattgaaggcccaactctgcctacaacaagtcaaatatctaggcctaattttagccagaggaaccaagaccctcagcaaggaacaaatacagcctgtgctggcttatcctcaccctaagacattaaaactgttgcaggggttccttggaatcacaggcttttgccaactatggatcactagatacagtgagatagccaggcctctctatattctaatcaaggagacccagagggcaaatactcatctaatagaatgggaaccagaggcagaaacagccttcaaaaccttaaaatag

SEQ ID NO: 5302 - DNA, 852 bp, Homo sapiens
  SIMILAR (361)..(810): 721254mologous to multiple sclerosis associated retrovirus polyprotein,accession number AF009668,Smith-Waterman Score=563.
atgcaggtttttgagaatgtgtcagtaagggccactaaatctgaccttcctcggtcctctttgtggcctagaaggaaaacaagtgtttctgctgctgctttgatcaaggtagacctggggaagttttcagatgctcctcatagatatatagatgtcctacagggtctagggcaaaccttcagtctcacttggagagatgtcatgctattgttagatcaaacgtttgcctttaatgaaaagaatgtggctttagctgcagcccgagagtttggagatagctggtatcttagtccagtaaatgatagaatgacagccaaagaaagggacaaattccataccagtcagcaagccatccccagagtacaaaaaccgaatggtcagtggagacaagtgcaagatcttagactcatcagtgatgcagtaattcctctatatccagctgtatccaacccctataccttgctctctcaaatactggaggaagcagaatggttcactgttctggacctcaaggatgccttcttctgcattcccctgcgctctgactcccagtttctccttgcctttgaggatcccacagaccacacatcccaacttacgtggacggtctttactcaagggtttatggatacccctcatctgtttggtcagtcactggcccaagatctaggccacttctcaagtccaggcactctggtccttcagtatgtggatgatttacttttggctaaacagcaggctactctagatctcttgaactttctagctaatcaagggtacaagttgtctaaattgaaggcccagctctgtgagttgctggtattctcgtcgtgtgcccgcatgcacagctaa

SEQ ID NO: 5303 - DNA, 1035 bp, Homo sapiens
  SIMILAR (328)..(639): 441254mologous to Homo sapiens Gag-Pro-Pol-Env protein,accession number AF164611,Smith-Waterman Score=255.
atgggacaagtgtgggctctggttcgttccaccttggaactttttcacactgatgatgaggaggaaggagagtatgacgaagtaacagaagaggttacagagcaggtttatttgccagctaaagctaaagtggcacaggaggaagaggttcatccctacccttctgcaccccctcattattattttgaagaaaaagagtggccagaccctccagatctttcttttctggaggacactgggcgaaaagtagttgccccagtgactgagcagcacctcgagcgactgctgtcagttctattcaggcaggagttcagcaggctagacgagagggatgatgccgtagagcagcttagaggagtgtgcattagagcttgggaaaaaatcacttcaggtggagaacaatacccttcctttagtgctgtaaaacagggaccaaaagaactgtatgcagattttatagcttggaatctcttaagacaggagtctcttaaaaaggtgatttcagattcagctgctcaggatatagtgttgcagttattagcttttggcaatgttaatctcgattgccaggctgctttgcgacctattagagggaaagcacatttagttgattatatcaaggcctgtgacggtatcggagctaagcaagacagtgaacggtttgcatttacaattcctgtggtaaacaatctgcagcctgctaagcattttcattatttcacagatgggtctagcaatggtaaagcttcttattctggatcaaaaggccaaaaccagcagccaatttggatactatcaagacacctaaaaccttatcatgagccagatgccaaggaagagattccaggaggatcccgaggaccccctggttgcagccatgtcgagactgatgctgaggaggaccctaactgtcacgagcaacacccgttgaacacagccacccacctggggacagatcaagaagctgtcacagatggtggaagaaaacctgaggaaagcgggacaactggtcacaatgactgtttactggaatga

SEQ ID NO: 5304 - DNA, 1767 bp, Homo sapiens; identical to SEQ ID NO: 599
  SIMILAR (728)..(684): 661254mologous to Homo sapiens Human secreted protein sequence SEQ ID NO:103,accession number Y87064,Smith-Waterman Score =57.

SEQ ID NO: 5305 - DNA, 3429 bp, Homo sapiens
  SIMILAR (694)..(1590): 751254mologous to multiple sclerosis associated retrovirus polyprotein,accession number AF009668,Smith-Waterman Score=1186.
atgacagctgaagaaagggacaaattccctaccagtcagcaagctgtccccagtatggatgcccactgggacctcgactcagatcatggggactggagtcgtaaacatctgttgacctgtgttctagaaggactaaggagaattaggaaaaagcccatgaattattcaatgatgtccaccataactcagggaaaggaagaaaatccttctgccttccttgagcagctacaggaggccttaagaaaatatactcctctgtcacccaactcactagtgggtcaattgatcctaaaagataagtttattacccaatcaaccacagatatcagaagaaagctccaaaatagggaccaagaggaacaggcccaaaaggaaaagcgagatcagagaaaggccatagccttagtcatggccctcagacaaaccttggtggttcaaagaggacagaaaatggagcaggccaatcacctggtggggcttgttaccagtgtggtttgcaaggacaccttaaaaaagattgtccaacgagaaacaagccgccccatcgtccatgtccactatacggaggcaatcactggaagtcacactacccagagggcaaagcttctctgggccagaagcccccaaccagatgatccaatgacaggactgaggatgactgcggcaagcacccgttcatgtcatcaccccctcactgagccctgggtatgtttaatcattgagggccaggaaattgacttcctcctggacactggcacgaccttctcagtgttaatcccctgtcttggacgactgtcctcaaggtccgttaccatccaaggaatcctgggacagcctgtaaccaggtatttctcccacctcctcagttgtaattgggagactttgctcttttcacatgcctttcttgttatgcctgaaagtcccacacccttattagggagggatatattagccaaagctggagctattatctccatgaagacagggaacaagttacccatttgttgtcccctacttgagggaatcaaccctgaagtctgggcattggaaggacaatttggaagggcaaaaaatgcccatccactccaaatcaggctaaaagaccccatcagttttccttatcaaaggcaatatcccttaaggcctgaagctcataaaggattacaggatattgttaaacatttaaaagctcaagactcagtaagaaaatgcagcagtccctgcaacaccccaattctaggagtacaaaaactgaacagtcagtggagactagtgcaagatcttagactcatcaatgaggcagtaattcctctatatccagttgtacgcaacccctatacccttctctctcaagtaccagaggaagcagaatggttcactgttctggacctcaaggatgccttcttctgtattcccctgcactctgactcccagtttctttttgcctttgaggatcccacagaccacacatcccaacttatgtggatggtcttgccccaaaggtttagagatagccctcatctgtttggtcaggcacaggcccaagatctaggccacttctcaagtccaggcactctggtccttcaatacagcgagatagccaagaccctctatactctaatcaaggagatggagagggcaaatactcacctagtagaatgggaaccagaggcagaaacagccttcgaaaccttaaagcaggccctagtacaagctccagctttaagccttcccacaggacaaaacttcgctttatatgtcatagagagagcagggatagctcttggagtccttactcagactcacaggacaaccccacaaccagtggcatacctaagtaaggaaattgatgtagtagcaaaaggctggcctcactgtttaaggacagttgtggcagtggctgtcttagtgtcagaggctatcaaaataatacaaggaaaggatttcactgtctggactactcatgatgtgaatggcatactaggtgccaaaggcggtttatggccatcagacaactgcctacttagataccaggcactactccttgaggaaccagtgcttcaaatacatatgtgcatagccatcaaccctgccacttttctcccagaagatggggaaccaatcaagcatgactgccagcaaattatagtccagacttatgccacccaagatgatctcttagaagtccccttagctaatcctgactttaacctatataacagtggaagttcatttgtagagaatgggatacaaagggcaggttatgccatagttagtgatgtaactgtacttggaagtaagcctctttccccagggactagcacccagttagcagaactagtggcacttacccgagccttagaactgggaaaaggaaaaagaataaatgtgtatacagatagcaagtatgcttatctaatcctacatgcccatgctgcaatatggaaagaaagggagttcctaacctctgggggcacccccattaaataccacaaggaaattatggagttattgcacacagtgcaaaaacccaaagaggtggcagtcttacactgccaaagccatcagaaggggagtgcaaggaggatcttctgtctcaccagaattcccgggaccagagtatgcaaaaacccccatgtctccctgagtggcatctctgagtggccactgagagaccacacacctctgtgcttcagacccaaggccctgctggcatgggttcatgaggagatctgctccatgggttgcaaagatccaggttggaacagtttgaaggtctcagaagaagataggaagatgcaggaaagtttggaaacttctagagacttgctgaatggttttgaccaaaatgttgataatgatatggacagtaaagtccaggctgagggagcctcagatggagatgaggaacttattgggaaatggcgtaaaggattgtcaatgctatggaagatactctctatagagaatatgatgaatgtctggaaggatggcaccataaaagatgccatcattgttatagaaaaagcagtgaaagccatcaagcctgaaacaataaattcctgccagagaaatctgtgtccagatgttgtacatgacttcacaaggtttacaacagagccaataaaggacataaaagagattggagatttggcaataaaattgggaatttttgagtcctctaatagcacccaattccttaatcagtttgtacctgatgatcggttatccccccataataaattactgaagttttacaaaccggaattttattcatcatacccccttgtttcctgccttgaccattatgtggatcaagttggagccagaatcagcatgagtttctgtgtgacaacagtgacagaggcctctggcagcggcagctggacatgtggtgtgagccagcttaagctgtcctatgccgactaa

SEQ ID NO: 5306 - DNA, 1779 bp, Homo sapiens
  SIMILAR (778)..(1236): 751254mologous to Homo sapiens gag,accession number AF156961,Smith-Waterman Score=620.
atgattgcagattcggctgctcaggttatagtgttgcagttattagcttttgacaatgctaatgccgattgccaggctgctctgcaacctgtcagagggaaagcacatttagttgattacatcaaggcctgtgatggtatcagaggtaatctgcataaagctactttgttggcacaggaaatggcaggactgagagtggataaaggaaatactccatttcctggagcttgttttaactatgggaagcatggtcatactaaaaaagaatgtagaaaaaaatcagtgagtcaggcagccagatggggaaaaaggaaaactgctgatcctgaaatatgtccaaaatgtaaaaaagggaaatattgggctaatcagtgtcactctaagtttgacaaagatgggaccctgatttcgggaaatgccatgagggctgagcaagactgtgaatggtttacatttacaattcctgcagtaaacaacctgcagcctgctaagcattttcatcgtttcacagatgtgtctagtaatggtaaagcttcttattctggatcaaaaggaggacaggcaagggtccagctttttgagaatgcatcagtaagggccactaactctgaccttcctcagtcctccttgtggtgtaggaggaaaactagtgtttctgttgctgtgttggtgagtgcaactattccgatcagcagggtccagggaccatcacaggttcttgggcagggggagaaacaaacaaaccaaaacgggtctagggcaaaccttcgatctcattggagagatgtcatgctattgttagatcaaaccctggcctttactgaaaagaatgtggctttagctgcagcccaagagtttggagatacctggtatcttagtcaagtaaatgatagactgacagccaaagaaagggacaaattccctactggtcagcaagccatccccagtatggatccccactgggaccttgactcagatcatggggactggagtcataaacatctgttgacctgtgttctagaaggactaaggataattaggaaaaagcccatgaattattcaatgatgtccaccatgactcagggaaaggaagaaaatccttctgccttcctcgattggctacgggaggccttaagaaaatatacttccctgtcacctgactcactagagggtcaattgattctaaaagataagcttattacccaatcagctgcagaaatcagaagaaagctccaaaagcgagccctgggccctgaacaaaatctggaggcattattaaacctggcaacttcagtgttctataataggggccaagaagaacaggcccaaaaggaaaagcaatcactggaaggcacactgccccagagtacgatggttctctgggccagaagctcccaaccagatgatccaacaacagaacttatggtgcccaggtttctctttgcctttgaggatctcacagaccacacatcccaacttacgtggaccatcttgccccaagggtttagggatagccctcatctctttggtcaggcactggctcaagatctaggccacttctcaagtccaggcactctggtccttcagtatgtggatgatttacttttggctaccagttcagaagcctcatgccagcaggctactctagatttcttgagctttctagcaaatcaagggtacgaggcatctaggtcgaaggcccagctttgcctacagcaggatcgaggctatcaagctacagatgatcttacaaatggaaccccaaatgagctcaactaa

SEQ ID NO: 5307 - DNA, 936 bp, Homo sapiens
  SIMILAR (328)..(540): 401254mologous to Homo sapiens Gag-Pro-Pol-Env protein,accession number AF164611,Smith-Waterman Score=152.
atgggacaagtgtgggctctggttcgttccaccttggaactttttcacactgatgatgaggaggaaggagagtatgacgaagtaacagaagaggttacagagcaggtttatttgccagctaaagctaaagtggcacaggaggaagaggttcatccctacccttctgcaccccctcattattattttgaagaaaaagagtggccagaccctccagatctttcttttctggaggacactgggcgaaaagtagttgccccagtgactgagcagcacctcgagcgactgctgtcagttctattcaggcaggagttcagcaggctagacgagaggggaccaaaagaactgtatgcagattttatagcttggaatctcttaagacaggagtctcttaaaaaggtgatttcagattcagctgctcaggatatagtgttgcagttattagcttttggcaatgttaatctcgattgccaggctgctttgcgacctattagagggaaagcacatttagttgattatatcaaggcctgtgacggtatcggagctaagcaagacagtgaacggtttgcatttacaattcctgtggtaaacaatctgcagcctgctaagcattttcattatttcacagatgggtctagcaatggtaaagcttcttattctggatcaaaaggccaaaaccagcagccaatttggatactatcaagacacctaaaaccttatcatgagccagatgccaaggaagagattccaggaggatcccgaggaccccctggttgcagccatgtcaagactgatgctgaggaggaccctaactgtcacgagcaacacccgttgaacacagccacccacctggggacagatcaagaagctgtcacagatggtggaagaaaacctgaggaaagcgggacaactggtcacaatgactgtttactggaatga

SEQ ID NO: 5308 - DNA, 1929 bp, Homo sapiens
  SIMILAR (160)..(1107): 421254mologous to Homo sapiens Gag-Pro-Pol protein,accession number AF164609,Smith-Waterman Score=741.
  misc_feature (1)...(1929): n = a,t,c or g
atgggaaaagtgtgggctgtggttcgttccaccttggaactttttcacactgatgatgaggaggaaggagagtataacgaagtaacagaagagattacagagcaggtttatttgccagctaaagctaaagcggtaaaggagagagaacaacggggaaatattacagctacatttgagccttttccttttaaattgctcaaagaatttaaacaagctataaatcagtatggaccaggttctcattttgtaatgggactgttaaagaatgttgctgtttccagtcagatgattcctactgactgggatgctcttactcaggcttgtctaactcctgctcagttcttacaatttaaaacttggtgggcccatgaagcttccattcaggctgcttgcaacgcccaggcccagcctcaaattaatataactacaggccaacttttgggggttggcggctgggctggtttagatgcacaagtggtcatgcaggatgatgccatagaacagcttagaggagtgtgcattagagcttgggaaaaaatccctttatgtggagaacaatacgcttcctttagtgctataaaacagggaccaaaagaaccatatgtggattttatagcttggttacaggagtctcttaaaaaggtgattgcagattcggctgctcaggatatagtgctgcagttatcagctttcgacaatgctaatcccgattgccaggctgctctgtgacctatcagagggaacgcacacttagttgattatatcaaggcctgtgacggtatcagaggtaatatgcataaagctactttgttggtacaggcaatggcaggactgagagtggataaaggaaatcctttgttgcctggagcttgttttaactgtgggaagcatggtcatactaaacaagaacgtagaaaaaaatcagtgagtcaggcagccagatggggaaaaaggaaaactgctgatcctgaaatatgtccaaaatgtaaaaaagggaaatattgggctaatcagtgtcactctaagtttgacaaagatgggaccctgatttcgggaaatgccatgagggctgagcaagactgtgaatggtttacatttacaattcctgcagtaaacaacctgcagcctgctaagcattttcatcgtttcacagatgtgtctagtaatggtaaagcttcttattctggatcaaaaggaggacaggcaagggtccagctttttgagaatgcatcagtaagggccactaactctgaccttcctcagtcctccttgtggtgtaggaggaaaactagtgtttctgttgctgtgttggtgagtgcaactattccgatcagcagggtccagggaccatcacaggttcttgggcagggggagaaacaaacaaaccaaaacgttgtacccaacccctataccctgctctctcaaataccagaggaagcaaaatggttcactgctctggacctcaaggatgccttcttctgtattcccctgcactctgactcccagtttctctttgcctttgaggatctcacagaccacacatcccaacttacgtggaccatcttgccccaagggtttagggatagccctcatctctttggtcaggcactggctcaagatctaggccacttctcaagtccaggcactctggtccttcagtatgtggatgatttacttttggctaccagttcagaagcctcatgccagcaggctactctagatttcttgagctttctagcaaatcangggatcgaggctatcaagctacagatgatcttacaaatggaaccccaaatgagctcaactaacaactaccaaggacccctggaccaacccgctggccctttcaatggcctaaagagttcccctctggaggacactacaactgcagggtcctttctttgcccctatccagcaggaagtagctag

SEQ ID NO: 5309 - DNA, 1433 bp, Homo sapiens
  SIMILAR (172)..(726): 751254mologous to multiple sclerosis associated retrovirus polyprotein,accession number AF009668,Smith-Waterman Score=715.
atgtttcggaaggatgaagaactgacttcctcacagagggatttagctgtaaggaactgggcatggagcctagcccgtggtgagcgctcagcaaacatgcacgcagtacacacctcgcttctagtggaaaggacaatactgaccacgaccaaggaaagagggtctaccttgcaatatcccttaagacctggagctcataaaggattgcaagatattgttaaacgtttcaaagctcaagccttaataaggaaatgcagcagtccctgcaacaccccaattctaggagtacaaaaaccgaatggtcagtggagactagtgcaagatcttagacttatcaatgaggcagtaattcctctatatccagttgtacccaacccctataacctgctctctcaaataccagaggaagcagaatggttcactgttctggacctcaaggatgccttcttctgtattcccctgcactctgactcccagtttctctttgcctttgaggatcccacagaccacacgtcccaacttacgtggacggtcttgcccccagggtttagggatagccctcccctgtttggtcaggcactggcccaagatctaggccacttctcaagtccaggcactctggtccttcagtatgtggatgatttacttttggccaccagttcagaagcctcttgccagcaggctactctagatctcttgaactttctagctaatcaagggtgcaagagagtgggaatagctcttggagtccttactcagactcatgggacaaccccacaaccagtggcatacctaagtaaggaaactgatgtagcagcaaaaggtcccctgacagccatcttgctattactcgcctttgggccctgtatttttaacctccttgtcaaacttgtttcctccaggattgatgccatcaagttacaaatggtcttacaaatggaaccccaaatgagctcaactaacaacttctaccgaggacccctggaccaacctgctggccctttgactggcctaaagagttcccctccggaggacactacaactgcagggcccctacttcgcccctatccagcaggaagtagctagagtggtcatcagccaaattcccaacagcagttggggtgtcctttttagaggggggattgagaggagcttgctacaagtgctggaaatctggccactgggccaaggaatgcccacagcccagaattcctcctcatccacgtcccatctgtgtgggaccccactgaaaatcagacttttcaactcaccaggcagccactcccagagcccctggaactctggcccaaggctctctgactccttcccagatcttcttggcttagcggctgaagacggacgctgcccagtctcctcagaagcccccgagactatcacgaatgccgatcttctggtaacactcacaatggagg

SEQ ID NO: 5310 - DNA, 3105 bp, Homo sapiens
  SIMILAR (2359)..(3105): 731254mologous to multiple sclerosis associated retrovirus polyprotein,accession number AF009668,Smith-Waterman Score=965.
atggaggccactggcaaatttctcagagcatcagatcaatctacagcctcccaagttgggaaaaccaaagcagaccatgtgtcctataacaccaaggtagaatctccaaggcttcctatgagacagttggaggtcatgcagcttttcctatgctgcattctcttggtcaaagatgcggaaaaggccttcaataaaattcaacatcccttcatgttaaaacctctccataaactaggtattgaaggaacatatctcaaaataaaagccatttatgacaaactcacagacaacatcacactgaacgggaaaaagctagaagcattccccttgaaaaccagcagaagacaaggatgccctctctcaccactcctattcaacatagtattggaagttctggccagggaaatcaagcaagagaaagaaataaaggaaagtttaaaaacagacaaagctggtctaaggtgtcaaaacaaacttgtccaacccaagggccatgggtcgcatgtggcccaggatggctttgaatgcggcccaacacaaattgttacaattggcactccatgggcttcagtcagccagaagtcgaatgcagtttcctatcagtgtgaggtgtggataccagaacaatttttccagaggtcctgccctcagacttcaacaagccccactgtggctgtcactcaactgtgcggctggtgccatccctctgagcagacgctgaaagagaaaacttctgagatagcacttgtgagcgaaaagcacaccaactggctcaaagagctgtggttgggcagatctggtgtaaatacaaagttccttcccgacatttcccagagtttcttgaagatcacctggcctctagaagatgacaaggagacagcaagtcctacaagcaaaaaggagcattcagcaaacattccaagcacagcttatgccctggaagagtatgttccacgggagagaagtgaagccagtgggtccggacctggaactggacgaatgccaagaggtctcttagataagacagtatggcccctaacttgggatctcactgaaagaggcagcaggtgtatggcagggcagtcaaggtatccaacccaacagatcaggactctgcagctcctagcccaggccctctggcagcccagaaggagctcgtcccagacaaccaagaggaaaagaggggaagcgagaaagagacggagaccctccatcatggccaatgaccctgcaaagagggaacggtggtccaggcatgggacccagactctgatcaatcccagcagtcgtcggccagacgcaccaagtgtggggcctgccaagcctgcgcccacccggaacccacggtggcctgacaccccaactgctgttgggaatttggctgatgaccgctctagctacttcctgctggatagatgggactgtctagttgcaggaaaacaagctcagggctcccacggattctacattatgaaggaaacaagcaaagaaatctccaaaggaccacaaaaacccccaggctatcagttatgtcccttgcaagctgtagggggaggggaatttggcccaacctggatacatgtccccttctccctctctgatttaaagcagatcaaggcagacctggggaagttttcagatgatcctgataggtacaaagatgtcctacagggtctagggcaaacattcgatctcgcttggagagatgtcatgctattgttagatcaaatcctagcctttattgaaaagaatgcagctttagctgcagcccgagagtttggagatacctggtatcttagtcaagtaaatgatagaatgacagccaaagaaagggacaaattccttactggtcagcaagccatccccactatggatccccactgggactttgactcagatcatggggactggagtcataaacatctgttgacctgtgttcttgaaggactaaagggaattaggaaaaagcccatgaattattcaatgatgtccactataactcagggacaagaagaaaagccttctgccttcctcgagcggctaagagaggccttaagaaaatatactcccctgtcacccgaatcactcgagggtcaattgattctaaaagataagtttattacccagtcagctgcagatatcaggagacagctccaaaagcaagccctgggccctgaacaaaatctgcaggaattattaaacctggcaaccttggtgttctataacagggaccaagaggaacaggcccaaaaggaaaagcgagatcagagaaaggctgcagccttagtcagggccctcagacaaacaaaccttggtggttcagagaggacagaatatggagcaggccaatcacccaggagggatatattagccaaagctggagctattatctacatgaatatggggaacaagttacccatttgttgtcccctacttgaggagggaatcaaccctgaagtgtgggcattggaaagacaatttggaagggcaaaaaatgcccgcccagtccaaatcaggctaaaagaccccaccacttttccttatcaaaggcaatatcccttaaggcttgaagctcataaagcattacaggatattgtaaaacatttaaaacctcaaggcttagtaaggaaatgcagcagtccctgcaacaccccagttctaggagtacaaaaaccaaatggtcagtggagattagtgcaagatcttagactcatcaatgaggcagtaattcctgtatatctagttgtagcaaacccctataccctgctctctcaaataccagaggaagcagaatggtttatggttctggacctcaaggatgccttcttctgtattcccctgcactctggctcccagtttctctttgcctttgaggatcccacagaccacatgtcccaacttatgtggatggtcttgccccaagggtttagggatagccctcatctgtttggtgaggcactggcccaagatctaggccacttctcaagtccaggcactctggtccttcagtatatggatgatttacttttggctaccagttgggaagcctcatgccagcaggctactctagatctcttgaactttctagctaatcaagggtacaag

SEQ ID NO: 5311 - DNA, 5175 bp, Homo sapiens; identical to SEQ ID NO: 3982
  SIMILAR (1)..(3096): 971254mologous to Homo sapiens unknown,accession number AF149422,Smith-Waterman Score=5241.

SEQ ID NO: 5312 - DNA, 371 bp, Homo sapiens
  SIMILAR (128)..(3): 801254mologous to multiple sclerosis associated retrovirus element gag polyprotein,accession number AF123881,Smith-Waterman Score=173.
ctatcaggatcatctgaaaacttccccaggtctgccttgatctgctttaaatcagagagggagaaggggacatgcacctgggttgggccaagttctctgccccctacagcttgaaggggacataaccgattgcctggggggcgggttgtggtcctctggagatttctttgcttatttccttcctcggctgagcccagaagtacaggaaaagcagaagcttgttctaggcaaaccaacgctcccaactccgaagagctgggggttgttagagagcccatttccagaaagcctgacacccgtgtctttagtccggtggccacactagtcgcttttagctggccgacaggtgcccgatatttaacccccgaatt

SEQ ID NO: 5313 - DNA, 317 bp, Homo sapiens
  SIMILAR (218)..(3): 611254mologous to multiple sclerosis associated retrovirus element gag polyprotein,accession number AF123881,Smith-Waterman Score=201.
ctatcaggatcatctgaaagctttcccaggtctgcattgatctgctttaaatcagagagggagaaagggacatgtacccgggttgggccaaattcccctccccctacagcttgaaggggacataaccgatagcccagggggttttgtggtcctttggagatttcttttattgtttccttcaacgctcccaactccgaagagttggaggttgttcgagagccctttcccagaaagcctgacacccgtgtctttagtctggtggccgtgctagtcacttttaactggccgacagatgcctggtatttagcccctgaatt

SEQ ID NO: 5314 - DNA, 384 bp, Homo sapiens
  SIMILAR (97)..(384): 771254mologous to Homo sapiens protease,accession number AF156962,Smith-Waterman Score=379.
ctatgccaaggcaatcactggaaggcacactgccccagaggacaaagcttctctgggacagaagcccccaaccagatgatccaacaacaggactgagggtgcctggggcaagtgtcagctcatgtcatcactctcactgagccccaggtaactttaaccattgacagccaggaaattgacttcctcctggacactggtgcggctttctcagtgttaatttcctgtcctgaacagctgtcctccaggtccgttaccatctgaggaatcctgggacagcctgtaaccaggtatttctcccacctcctcagttgtaattgggagactttgctcttttcacatgcctttcttgttatgcctgaaagtcccacacccttattagggagg

SEQ ID NO: 5315 - DNA, 424 bp, Homo sapiens
  SIMILAR (72)..(179): 751254mologous to multiple sclerosis associated retrovirus polyprotein,accession number AF009668,Smith-Waterman Score=159.
gctctcagggcgtgtggggactaggtgagtgggagaagcggatcacgctgactccactagatccagtaggagtagccaaagctggagttattatctacatgaatatggggaacgagttacccatttgttgtcccctacttgaggagggaatcaaccctgaagtctgggcattggaaggaacaaactcaagctccagccttaagccttcccacaggatgaaacttttctttatgcatcacagagagagcaaggatggctcttggagtccttactcagactcatggggcaaccccacaaccagtggcatacctaagtaaggaaattgatgtagtagcgaaaggctggcctcactctttaagggtagttgtggcggtggccatcttagtgtcagaggctatcaaaataatacaaggaaaggatctct

SEQ ID NO: 5316 - DNA, 614 bp, Homo sapiens
  SIMILAR (116)..(598): 531254mologous to Homo sapiens gag,accession number AF156961,Smith-Waterman Score=418.
gagggaaactagtgcttctgctgctgcgttggtgagtgcaactattccaatctgcagggtccagggaccattgcgggttcttgggcaagaggtgtttctgctgctgcttcgccttcctacagctccccttcctattaatgataagcctcctctaatctcccctgcccagaaggaaacaagcaaagaaatctccaaaggaccacaaaaacccctgggctatcggttatgtccccttcaagcagtagggggaggggaatttggcctaacccgggtacatgtccccttctccctctatgatttaaagcagatcaaggcagacttggggaagttttcagatgatcctgataggtacatagatgtcctacagggtctagggcaaactttctatctcacttggagagatgtcatgctattgttagatcaaaccctggcctttaatgaaaagaacgcagctttagctgcagcccgagagtttggagatatctgggaccaaggggaacagtccaaaaaggaaaagcaagatcagagaaagaccgtagccttagtcatggccctcagacaaataaaccttggtggttcagagaggacagaaaatggagcaggtcaatcagccg

SEQ ID NO: 5317 - DNA, 852 bp, Homo sapiens; identical to SEQ ID NO: 5302
  SIMILAR (361)..(810): 721254mologous to multiple sclerosis associated retrovirus polyprotein,accession number AF009668,Smith-Waterman Score=563.

SEQ ID NO: 5318 - DNA, 912 bp, Homo sapiens
  SIMILAR (259)..(552): 721254mologous to Homo sapiens gag,accession number AF156961,Smith-Waterman Score=374.
atgggtcaggaagtttggctcacacctgtaatcccagtgctttgggaagccaagtctaagaggaaaggcagtgtttccactgctgcttcagtgagtgcaactattccaaacagcagggtccagggaccattgcagattcttgggcaggggagaaaaaacatcaacaaccaaaacagtgggcagctttttctttcagaaggaaacaagcaaagaaatctccaagggaccacaaaagcccctgggctgtcagttatgtcccttcaagctgtagggggaggggaatttggcccaacccggatacatgtccccttctcccgctctgatttaaagcagatcaaggtagatatggggaagttttcagatgatcctgataggtatatagatatcctacagggtgtagggcaaaactttgacctcacttggagagatctcatgctattgttagatcaaaccctggcctttaataaaaagaatgcagctttagctgcagctggagagtttggagataccttgtatctgagtcaagtaaatcatacaatgaccgacgaagagatggacaaattccctgctgaggttgggaaaccaattgagcatgactgccaacaaattgtagcccagacttatgctacccgagaggatcttttagaagtccccttagctaatcctgaccttaacctatatactgatggaagttcatttgtggtgaatgggatacaaagggcaggttatgccatagttagtgatgtaacagcacttgaaagtcccatgacaaccatcatgctattactcacctgtgagccctgtatttttaacctccttgtcaattttgtttcctccaggattgaggccatcaagctacagatggccttacaaatggaaccccaaataagctcaactcacaacttctactga

SEQ ID NO: 5319 - DNA, 600 bp, Homo sapiens
  SIMILAR (325)..(597): 511254mologous to Homo sapiens p40,accession number U93571,Smith-Waterman Score=222.
atgcgtcggtcaaggccactaaatccgatttttctcagtcctctttgtggtctaggaggacagacaagggtgcaggttttcgagaatgtgttggtaagggccactaaatccaaccttcctcagtcccccttgtggtctgggaggaaaactagtgtttctgctgctgcgtcgaaggaaataagccaagaaatctccaaaggaccacaaaaacccccaggctatcggttatgtccccttcaagctgtagggggaggggaatttggcccaacccaggtacatgtccccttctccctctctgatttaaagcagatcaaggcagacctggaggatcacaactccttgccagcaagggaacaaaactggacagagaatgaatttgacgaattgacaggagcaggcttcagaaggtgggtaataacaaactcctctgagctaaaggagcatgttgtaacccaatgcaaggaagctaagaaccttgaaaaaaggttacaggaactgctaactagaataaccagtttaaagaagaacatgaaagacctgatggagctgaaaaacacagcacgagaacttcatgaagcatacaaaagtaacaatagctga

SEQ ID NO: 5320 - DNA, 1635 bp, Homo sapiens
  SIMILAR (910)..(1626): 741254mologous to multiple sclerosis associated retrovirus polyprotein,accession number AF009668,Smith-Waterman Score=939.
atggtgtgtccagagtttgttccttctgatgtacggatgtgtccagagtttcttccttctgttgggttcgtggtctcgctgacttcaggagtgaagctgcagaccttcacgctagacacaaaagttctccatgtccccttctccctctctgatttaaagcagatcaaggcagacctggggaagttttcagatgatcctgataggtacaaagatgtcctacagggtctagggcaaacattcgatctcgcttggagagatgtcatgctattgttagatcaaatcctagcctttattgaaaagaatgcagctttagctgcagcccgagagtttggagatacctggtatcttagtcaagtaaatgatagaatgacagccaaagaaagggacaaattccttactggtcagcaagccatccccactatggatccccactgggactttgactcagatcatggggactggagtcataaacatctgttgacctgtgttcttgaaggactaaagggaattaggaaaaagcccatgaattattcaatgatgtccactataactcagggacaagaagaaaagccttctgccttcctcgagcggctaagagaggccttaagaaaatatactcccctgtcacccgaatcactcgagggtcaattgattctaaaagataagtttattacccagtcagctgcagatatcaggagacagctccaaaagcaagccctgggccctgaacaaaatctgcaggaattattaaacctggcaaccttggtgttctataacagggaccaagaggaacaggcccaaaaggaaaagcgagatcagagaaaggctgcagccttagtcagggccctcagacaaacaaaccttggtggttcagagaggacagaatatggagcaggccaatcacccaggagggatatattagccaaagctggagctattatctacatgaatatggggaacaagttacccatttgttgtcccctacttgaggagggaatcaaccctgaagtgtgggcattggaaagacaatttggaagggcaaaaaatgcccgcccagtccaaatcaggctaaaagaccccaccacttttccttatcaaaggcaatatcccttaaggcttgaagctcataaagcattacaggatattgtaaaacatttaaaacctcaaggcttagtaaggaaatgcagcagtccctgcaacaccccagttctaggagtacaaaaaccaaatggtcagtggagattagtgcaagatcttagactcatcaatgaggcagtaattcctgtatatctagttgtagcaaacccctataccctgctctctcaaataccagaggaagcagaatggtttatggttctggacctcaaggatgccttcttctgtattcccctgcactctggctcccagtttctctttgcctttgaggatcccacagaccacatgtcccaacttatgtggatggtcttgccccaagggtttagggatagccctcatctgtttggtgaggcactggcccaagatctaggccacttctcaagtccaggcactctggtccttcagtatatggatgatttacttttggctaccagttgggaagcctcatgccagcaggctactcttgaactttctagctaa

SEQ ID NO: 5321 - DNA, 675 bp, Homo sapiens
  SIMILAR (211)..(393): 621254mologous to multiple sclerosis associated retrovirus element gag polyprotein,accession number AF123881,Smith-Waterman Score=193.
atggaaactcttgcagaagtatatctgactaagtccatccgggacatagcatccatcaagaatcactgggatctacacacagaagaaagtagcaaggacaccccaactgctgttgggaatttggctgatgaccactctagctacttcctgctggatagatgggactgtctagttgcaggaaaacaagctcagggctcccacggattctacattatgaaggaaacaagcaaagaaatctccaaaggaccacaaaaacccccaggctatcagttatgtcccttgcaagctgtagggggaggggaatttggcccaacctggatacatgtccccttctccctctctgatttaaagcagatcaaggcagacctggggaagttttcagatgatcctgatagaagcagccaattgcagacaagaaatgccaattgctgtagcagaatgccagttccaattgtggcagcagtgacagctcctactcaggccacttgtcatctggagcagcttagcagtgagtgtgaacccacaggtgtcagccccaagtggtggcagatgtcacctcaggtagactacatccctatggaagaaagttcttcaaaatcagagctgaaggaaccaggaaaatgggatatggacaatattgttgagtatcaccaaaatgacttggtgcagcagtag

SEQ ID NO: 5322 - DNA, 1047 bp, Homo sapiens
  SIMILAR (634)..(1041): 711254mologous to multiple sclerosis associated retrovirus polyprotein,accession number AF009668,Smith-Waterman Score=520.
cctactgagcatgtcacacttagagccttcagcgggggagctgaacctgatgaaccagtaaggtacagatttggacttaaaacataagattgttttattagacactcccgccatgtaaattctttcattacgtttgggctgtaaggtgcccaagctagtaccaatcaccaagaggcaaactgcagcaggccaggtatctttcactcaggaggaactaactctggacacatcctgggggcttgtctgggattttgccacatggtgagtaccatcggaccactttcactgctattctgtcctatttttccttagaattcaggggctaaacacgctgtagggggaggagaatttggcccaactcgggtacatgtccccttctccctctctgatttaaagcagatcaaggtagacatggggaagttttcagatgatcctgataggtatttagatgtcctacagggtctagggcaaaccttaaaaaagactgtccaacaagaaacaagccacatcctcgtccatgtccgctatgacaaggcaatcactggaaggtgcactgccccagagaacaaaggttctctgagccagaagcccccaaccagatgatccaacaacaggacggacaaccccacatcagtggcatatctaagtaaggaaactgatgtagtagcaaaaggctggcctcactgtttatgggtagttgtggcagtggccatcttagtattagaggctatcaaaataatacaaggaaaggatttcactgtctggacttctcatgatgtaaatggcatactaggtgccaaaggaaattcatggctatcagacaaacgcctgcttagataccaggcactactccttgagggaccagtgcttcaaatacacacgtgtgtggccctcaaccctgctatttttctcccagaggatggagagccaatcaagcatgactaccaacaaattgtagcccagacttatgtcacctgagaggatctcttagaagtccccttagctaatcctgaccttaacctatataccaatggaagttcatttgtg

SEQ ID NO: 5323 - DNA, 1002 bp, Homo sapiens
  SIMILAR (397)..(903): 691254mologous to Homo sapiens gag,accession number AF156961,Smith-Waterman Score=630.
atgaaaacaggttataataccacaaaaagatgtaaagataacttcaggttcctgcagctagacaaaatacttgatgtcgtttctaaaggaggacaggcaaaggtgcaggttttcaagaaagcatcagtaagggccactaaatccgaccttcctcggtcctccctgtggtgtaggaggaaaactagtgtttctgctgctgcgtcagtgagcacaactattctgatcaacagggtccagggaccgttgtgggttcttgagcaagaagggtttctgctgctgcgtcgggaaaaatggccacctgagggaggtataaataacaatactatcctgcagcttgacctttgctgtaagagggaaggcaaacggagtgaaataccttatgtccaagctttcttttcattgaagaaggaaataagcaaagaaatctccaagagaccaaaaaaacccccgggctatcagttatgtccccttcaagctgtagggggaggggaatttggcccaacccaggtacatgtccccttctccctctctgatttaaagcagatcaaggtagacctggggaagttttcagatgatcctgataggtacatagatgtcctacagggtctagggcaaacctttgatctcacttggaaagatgtcatgctattgttagatcaaaccctggcctttaatgaaaagaatgctttagctgcagtccgagagtttggagatacctggtatcttagtcaagtaaatgacagaatgacagctgaagaaagggacaaattccctactggtcagcaagccatccccagtatggatccccactgggaccttgactcagatcatggggactggagttgcaaacatttgttgacctgtgttctagaaggactaaggagaattaggaaaaatgaattatgcaatgatgtccaccataactcagggaaaggaagaaaatcctgccttcctcaagtggctatgggaggccttaagaaaatacactcccctgtcacctga

SEQ ID NO: 5324 - DNA, 2309 bp, Homo sapiens
  SIMILAR (753)..(1331): 751254mologous to multiple sclerosis associated retrovirus polyprotein,accession number AF009668,Smith-Waterman Score=736.
ggctctctaacaacccccgactctttggagttgggagcgttggtgtgcctcgaaccagcttccacttttcttgtacttctgggctgagcctagggttgacagagaggaaagccatgcagctccggggtcccgacaacaagttggttgaccctgcggccatgagtggaactctcaaaggcatgttgcccaagcaagactcgcccatctctcctatctatcctgacccttgccccctgggtcctaatgcctgccagacaaacttcctcttgcctctcttctccaagaaggaaataagcaaagaaatctccaaaggaccacaaagacccccaggttatcggttatgtccccttcaagctgcaggaggaggggaatttggcccaacccgggtacatgtccccttctccctctctgatttaaagcaggtcaaggcagacatggggaagttttcagatgatcctgataggcacatagatgtcctacagggtctagggcaaacctttgacctcgcttggagagatgtcatgctactgttagatcaaaccctggccttttatgaaaagaatgtggctttagctgcagcccgagagtttggagatacctggtatcttagtcaagtatgtttaactattgagggccaggaaattgacttcctcctggacagtggcacggccttctcagtgttaatctcctgtcctggacaactgtcctcaaggtctgttaccatccgaggaatcctgggacagcctgtaaccaggcctgaagctcataaaggattacagaatactgttaaacatttgaaagctcaaggcttagtaaggaaatgcagcagtcccggcaacaccccaattctgggagtacaaaaacccaatcgtcagtgcagactagtgcaagatcttagactcatcaatgaggcagtgattccactatatccagttgtacccaacccctataccctgctctctcaaataccagaggaagcagaatggttcatggttctggacctcaaggatgccttcttctgtattcccctgcactctgattcccagttcctctttgcttttgaggatcccacagaccacacgtcccaacttatgtggatggtcttgccccaggggtttagggatagccctcatctgtttggtcaggcactggcccgagatctaggccacttctcaagtctaggcactctggtccttcaatatgtggatgatttacttttggctaccagttcggaagccttgtgccagcaggctactctagatctcttgaactttctagctaatcaagggtacaaggtgtctaggtcgaaggcccagctttgcctacagcaggatggggaaccaatcgagcatgactgccaacaaattatagtccagacttatgccacccgagatgatctcttagatgtccccttaactattcctgaccttaacctatataccgatggaagttcagttgtggagaatgggatacaaaggacaggttacaccatagttagtgatgtaaccatacttgaaagtcccgtggcagccatcttgctgttacttgcctttggggcctgtatttttaaccttcttgtcaaatttgtttcctctagaatcgaggccttcgagctacagatggtcttacaaatggaaccccaaatgagttcaactaacaacttctaccgaggacccatggaccgacccgctggcacttcccctggcctagagagttcccctctgaaggacactacaactgcaggagctgtaacactcaccacggaggtctgcagcttcactcctgagccagcgagaccacgaacccaccagaaggaagaaactccgaacacatctgaacatcagaaggaacaaactccagacacgctgcctttaagaactgtaacactcaccgcaagcgtccacggcttcattcttgaagtcaatggttcaggaaaaactggaaaggcaactatagtgtggcaagatgccacgcagaactggcagcacaaaatccaggaacgttttaaaactacgcaacaggcggagttagaagaggtatcagctcttgaaggcttacttctcaatactggctgcgagagcaagatgcccacgacgaccttgggaactacaagtccgccatacagcgggagcgcccggagtagggacgaccgacaccagcccgtacccaccctcgtgcgcgacggccccttccgccggtcaacccggaagagttcgcggtggccgcggcagacggaagccgaacgagttcttcggcggctgcaggatggggactccaaagtgaaagtggcggtcggatacgacccatga

SEQ ID NO: 5325 - DNA, 1159 bp, Homo sapiens
  SIMILAR (22)..(432): 601254mologous to Homo sapiens gag,accession number AF156961,Smith-Waterman Score=425.
atggggaaaaatggccacctgaagggaagtacaaattacaatactatcctgcagtttgaccttttctgtaagagggaaggcaaatggagtgaaataccttatgtccaagctttcttttcattgacagagaatacacaacaatgcaaagcttacaatttacatcccacaggaggaccgctcaacttacccccatatcatagcctccctatagctccccttcccattaatgataatcctcctctaatctcccctgcccagaaggaaataagtaaagaaatctccaagggagcacaacctctcccccacccctgctatcggttatgtccttttcaagctgtatggggaggggaatttggcccaacccgggtacatgtccccttctccttctctgatttaaagcagatcaaggtagacctgggtaagttttcagatatatcctgataggtatatagatgtcccacagggtccagggcaaaccttcaatctcacctggagagatgtcatgctattgctagatcacaccctggcctttaatgaaaagaatgcggctttagctgcagcccgagagtttggagatacctggtatcttagtcaggtaaatgatagaatgacagccaaagaaagggaaaaattccctacaggtcagcaagccatccccagtatggatccctgctgggacctcgactcagatcatggggactggagatgcaaacatctgttgacctgtgttctagaaggactaaggagaattaggaaaaagcccatgaattattcattgatgtccaccataactcagggaaaggaagaaaatccttctgccttccctgagcagctacaggaggccttaagaaaatatactcccttgtcacctgactccctcaaaggtcaattgatcctaaaagataagtttattacccaatcagccacagccgcagatatcaggagaaagctccaaaagcaagccctgggccctgaagaaaatttggaggcattattaaacctggcaacctcagtgttctataatagggaccaagaggaacaggcccaaaaaggaaaagcgagatcagagaaaggccacagccttagtcacggccctcaggcaaacaaaccttggtggttcagagaggacagaaaacagagcaggccaatcacccggtag

SEQ ID NO: 5326 - DNA, 611 bp, Homo sapiens
  SIMILAR (249)..(1): 981254mologous to Escherichia coli ribosomal protein L2 (rplB) (aa 1-273),accession number X02613,Smith-Waterman Score=435.
gtactcaagacgttcatcaactgccgggataccgtctttgttgcgtttgaagtcaacaatacggtaagcctgcttgtggccaccaccgatatgacgagtggtgatacggccattgttgttacgaccaccggatttgctgtttttttccagcaacggagcaaaaggtttgcccttgtgcagctcagggttaaccactttaactacgtggcgacgacccggagatgtcggtttacatttaacaactgccattgtattactcctccgacttactcagcgccgccaacgaagtccagattctggccttctttcagggtgacgtaagcttttttccagtcgctacgacgaccgatacgctgtccgtgacgtttaactttccctttaactaccagggtgttaacgacttcgacttcgacttcaaacagtttctgcacagcagctttgatttctgctttggtcgcgtctttagcaactttgagtaaagtcacacactggggcatgttagggggtgggaggcgacggtggctcccatcccccggcctggtccgcatcccgtcctcggactcatcctcggagccgctgctgctgtagcccaccaggggcgccgcgctcat

SEQ ID NO: 5327 - DNA, 1296 bp, Homo sapiens
  SIMILAR (817)..(1293): 981254mologous to Escherichia coli dedD protein (gtg start codon),accession number M68935,Smith-Waterman Score=805.
atgggcacaccgcagctggcgcgaattctgcacccgtttgtcggcgtggttatgtttgcctcgttcatcatcatgtttttccgttactggcatcacaacctaatcaatcgggatgatatcttttgggcgaagaatattcgtaagatcgtcgtcaacgaggaagtaggtgacaccgggcgttataacttcggtctgcaccaatcggtcggtaatggcgcaatgagcaatgctattaacgaaattgataataccgatttagtgttcgttttcgggtacaacccggcggattcccacccaatcgtggcgaatcacgtaattaacgctaaacgtaacggggcgaaaattatcgtctgcgatccgcgcaaaattgaaaccgcgcgcattgctgacatgcacattgcactgaaaaacggctcgaacatcgcgctgttgaatgcgatgggccatgtcattattgaagaaaatctgtacgacaaagcgttcgtcgcttcacgtacagaaggctttgaagagtatcgtaaaatcgttgaaggctacaaccgcccggagctccggttgaagatatcacccggcccgtcagcgccaagcctcgcgatgctgaccgtaactcaaccgggtgttacctggtttgattgcagcatcaacgccagactgaatctggtcgccagctttcaggcctttaggggccaggatgtaacggcgttcaccgtctttgtacagaaccagcgcgatgttcgcggaacggttcggatcgtactcaagacgttcaacaactgccgggataccgtctttgttgcgtttgaagtcaacaatacggcgttccgatcgcagccgccggaaggcgcagcggaagaggtgcgggcaggtgatgccgcagcaccgtcgctcgatccggccactattgcagccaataacaccgagtttgaaccggaacctgcaccggtcgccccaccgaagccgaaaccggtggagccgcctaaaccgaaggttgaagcaccacctgcgccgaagccagaaccgaagccggtcgtggaagaaaaagctgcaccgacgggtaaagcctatgttgtgcaactgggtgcgctgaaaaatgccgataaagtgaatgagattgtcggtaagctgcgcggtgccggttatcgggtttatacgtcgccatccacgccagtgcagggtaaaattacccgtattctggttgggccggatgcctcgaaagataagctgaaaggttcgctgggtgagttgaagcaactttctggcttaagtggcgtggtaatgggctatacgccgaattaa

SEQ ID NO: 5328 - DNA, 1593 bp, Homo sapiens
  SIMILAR (877)..(1590): 1001254mologous to Escherichia coli O157:H7 ATP-dependent DNA helicase,accession number AE005613,Smith-Waterman Score=1230.
atgaggtgcttgtggtttcgtggcggtaccatcgcttccacgtactgtctacgggacctggtgcttttattgcaattccgagcaacagtgtttttgatcctgtcctttgggcctccgggaaacaaggtccggggacttggctacacaggggaggtaagggcggcaaagaatgcgcttcggagccgcgccttatgctacgccggggtgtggttttgccgccttacggcaggcaccatttcgcctcctatggcgtacaaaaagaatgaaatgcccgcgtgccggaactgcccgcggatgactgatggacttaccgggccacaggcaattaaacctgcgggccctcccgttacaccggccccccaagcggccactgccaccaacgcccgaatacggccaccttcaaccaccgcgcacacggctaaacataggggctttgccgcaatggcgttgcttaccctggtgagcacgcgtatacaagagggggaagggagggagggagggggcgtaattgcaaccaccaggacctgcaacgcgggattcacctacccgagtggacctgatactaccctgctctgcgcggcatgtgcgcccgcggacccaccctgccccctagtaccggcaacagacccatactacgcccgattgctgacgtacccattgcatgcccgcaaacccccgaatgcgcacggcccaaccgattaccgtgaaacactgccttgccgcccggcgccggccaccacctgcccgctgagcgcattgacccagaacccacacacatttcatggttatgtgatgactgggggtcagccgtacgcaacacggcgcaaagaatggcacggggctacccggaccttgaatgccggggcccgacccgatggcgcgtttgccgaagcgcaaacttgccgtcgtctggtattgctgaactattttggcgaagggcgtcaggagccgtgcgggaactgcgatatctgcctcgatccgccgaaacagtacgacggttcaaccgatgctcagattgccctttccaccattggtcgtgtgaatcagcggtttgggatgggttatgtggtggaagtgattcgtggtgctaataaccagcgtatccgcgactatggtcatgacaaactgaaagtctatggcatgggccgtgataaaagccatgaacattgggtgagcgtgatccgccagctgattcacctcggcctggtgacgcaaaatattgcccagcattctgccctacaactgacagaggccgcgcgcccggtgctgcgcggcgaatcctctttgcaacttgccgtgccgcgtatcgtggcgctcaaaccgaaagcgatgcagaaatcgttcggcggcaactatgatcgcaaactgttcgccaaattacgcaaactgcgtaaatcgatagccgatgaaagtaatgtcccgccgtacgtggtgtttaacgacgcaaccttgattgagatggctgaacagatgccgatcaccgccagcgaaatgctcagcgttaacggcgttgggatgcgcaagctggaacgctttggcaaaccgtttatggcgctgattcgtgcgcatgttgatggcgatgacgaagagtag

SEQ ID NO: 5329 - DNA, 863 bp, Homo sapiens
  SIMILAR (134)..(688): 861254mologous to Escherichia coli recQ,accession number M30198,Smith-Waterman Score=829.
aagaggcatggtgtttctccttctgatggatcagcgtcagcagcgtgtcgacgactggcgcaggctgccgtcattgttgagcgtatggcaatcctgtggagatagcgggcggcgcgcgccaggcgggcgttaatttcactggcgttttcaggccacggttttccaggcgctggcggaggatctccggcgaaacctgcaaattgtggtggcgacggtggcgttcggcatgggcatcaataaaccaaacgttcgcttcgtggtccactttgatattccgcgcaatatcgaatcctattatcaggaaaccggacgcgccgggcgtgatggcctgcccgcggaagcgatgctgttttacgatccggctgatatggcgtggctgcgccgttgtctggaagagaagccgcaggggcagttgcaggatatcgagcgccacaaactcaatgcgatgggcgcgtttgccgaagcgcaaacttgccgtcgtctggtattgctgaactattttggcgaagggcgtcaggagccgtgcgggaactgcgatatctgcctcgatccgccgaaacagtacgacggttcaaccgatgctcagattgccctttccaccattggtcgtgtgaatcagcggtttgggatgggttatgtggtggaagtgattcgtgttgcggcgtttctcgagccagattattcgcatcgcccgtgaatttgccgataacgggtgaaatccctgaaagagggttccatccgttttgcggcagaacaacagaaaacggtaaaaaccacccgcgcaacctgttcatctggcgttctaactgctcggttcttccggtaaaggtcatgagtttatgctcaagtaccccatgccccat

SEQ ID NO: 5330 - DNA, 654 bp, Homo sapiens
  SIMILAR (439)..(477): 1001254mologous to Escherichia coli ribosomal protein L2 (rplB) (aa 1-273),accession number X02613,Smith-Waterman Score=74.
  misc_feature (1)...(654): n = a,t,c or g
tcacacgaccaatggtggaaaggcaatctgagcatcggttgaaccgtcgtactgtttcggcggatcgaggcgatatcgcagttcccgcacggctcctgacgcccttcgccaaaatagttcgcaataccagacgacggcaagtttgcgcttcggcaaacgcgccccatcgattgacgttggtggcgtgtcagcgtaaagaagaggaaacagcattgagctgtcggcttgttttgcgaaagctgacagaaacagaaccggtgattattttcgaaggtatcgaagcgccggcaacgctgggtttaaaagccagtcggtcaccctgaaagaaggccagaatctgacttcgttggcggcgctgagtaagtcggaggagtaatacaatggcagttttaaatgtaaaccgacatctccgggtcgtcgccacgtagttaaagtggtaaccctgagctgcacaagggcaaaccttttgctccgttgcgtattgttgacttcaaacgcaaaaagacggtatcccggcagttgttgaacgtcttgagtacgatccgaaccttccgcgaacatcgcgctggttcngtaacgatttctcggttcctgttttgcaactattaggttccccatgatgtgtgcttcgggtacggcctgtttcgttcccat

SEQ ID NO: 5331 - DNA, 639 bp, Homo sapiens
  SIMILAR (554)..(45): 971254mologous to Homo sapiens S2P,accession number AF019612,Smith-Waterman Score=840.
acttgtttccctgaaaggtggttatcccatggccagtttcatggtacaacgccattaatgagaactgccgtgaagaaataggtcagttgattgaggggtaaatttataccaggagccacaacttgtaacacctgttcattgtgaagcgaggaagaggaagaagatgaagaagaggaagaggaagaagaggaggaagaggaagaagaggaggaagaataagaagagggagagtcagccatcatttgtgccaaagtctgcatcagcgtttttccaaggagaaaaaatgagctaaacatggcaattacgccaaacaccattccaaaattgaaccactggtaaagcatccatgctttccgccgtccccaactgtaaaaggcacgattgaaaacagcagtttgccatcttatgtggaaaggggagatgctcagtccgttgttttccagccagtcttcataagaatgtttaaaatagacagatgacttcagcaccaagtcggtcaggtagacgacagtccagccacccaccaccaccaccaccagcgacaccggaatcatggcggcagcggcggcagaggagggaaggcgagccccggcgtcctcctccctgcaccgccaacagctgaccgcgcgcgccacgaaa

SEQ ID NO: 5332 - DNA, 657 bp, Homo sapiens
  SIMILAR (332)..(111): 531254mologous to Homo sapiens dJ492J12.1 (novel protein similar to zinc finger protein human immunodeficiency virus type I enhancer-binding protein 1 (HIVEP1)),accession number AL121919,Smith-Waterman Score=170.
tacttttgacggaagcgtgttcccatttggggacttgtgagggctatcaggccagttcaaccgtcccacatcccagttaggtgggtctatttgttgaagcttttaccccaagctgaacgactgaccagggcccgagggtgactactggggacacccatcaaggtcagccccaagctgtagcccaactgagccaggtagagtctggggctcagaggcttcctcctaaggcaggcttccacagggtctggccctctatcctgccgtgtcctggcacttttgatgaaggatagtgagttgctcctggtgacaggcatgcattccatggtggtggatcaggtctcagccctgagctcactctccctcagactcagtgctgtgctcaggcaactgtgcagggcctggaggggaccagaagctggtcccagagtgggacaagtagcctgagtccatggtctcacacttccttagcctgccctcaaaaagaagagggagaagaagaagaggaagaggaagaggaagaagaagaagaagaggaagaggaagaagaagaagaagaggaagaggaagaggaagaagaagaagaagaagaagaggaggaagcaaaaacacaatagaaaagtggacaaaagatataaacagacagcccacagaaaaaga

SEQ ID NO: 5333 - DNA, 683 bp, Homo sapiens
  SIMILAR (36)..(680): 911254mologous to Homo sapiens Human secreted protein sequence encoded by gene 40 SEQ ID NO:106,accession number Y91385,Smith-Waterman Score=1029.
ctctcgccccggaattaccgggtcgacgatttcgtatggggaccccgggcatggtgctgggcctcctggtgcagatctgggccctgcaagaagccttaagcctgagcgtgcagcaggggcccaacttgctgcaggtgaggcaaggcagtcaggcgaccctggtctgccaggtggaccaggccacagcctgggaacggctccgtgttaagtggacaaaggatggggccatcctgtgtcaaccgtacatcaccaacggcagcctcagcctgggggtctgcgggccccagggacggctctcctggcaggcacccagccatctcaccctgcagctggaccctgggagcctcaaccacagcggggcgtacgtgtgctgggcggccgaagagattcctgagttggaggaggctgagggcaacataacaaggctctttggggacccagatgaccccacacagaacagaaaccggatcgcaagctttccaggattcctcttcgagctgctgggggtgaaaagcgtgggtgtggctgtgatcgtgcggggtgcctggttctggggccgcctcagctgccagctcagggactcatgtagcagcccaggaaatgcattctacagtaacgtactataccgtccccggcgcgccccaaagaacagtgaggactgctctcgtgagcggaaggaccct

SEQ ID NO: 5334 - DNA, 628 bp, Homo sapiens
  SIMILAR (206)..(550): 411254mologous to Pseudomonas phage D3 Orf53,accession number AF165214,Smith-Waterman Score=222.
agtctctctcatagggcgggtggaggaggtggggtgggggggggcgctgtgtgtctcttctcccccccgcggacaaaaagagagtccgcaccggagtcgccctcccgggttcttggtcactctccggttcccagctagggcgcgccctccaccagagggtcagtatcgcgcatcctgacttcaggaggtacccatgagcgaagtaacggccttacctgtcatcgaaatcaagccggaacaggccccagtgctttacgtagcgggcggccttgatgcttatctcgagcaaatccgccaggcagtaaacgaagtgccggacctgtccacgaagaaaggacgtgaccgtgtcgcctctctggcagcgcaggtatcacgcagtaagacggcaattgaaaagccgggccgagagtacctgaagcgcctgaaagaggctgtgcgacctgctgaggccgaaattaagcgtttcgttgatgcatgtgacgagcttcgcgacgcaacccgccgcccactcaccgaatgggaagccgagcaggaacgcattaaggctgaagaagccatgaacgcgctgcacgccgaagcgctggaaatgaacatcaagttcgatcaggagttggcggccaagttctaa

SEQ ID NO: 5335 - DNA, 516 bp, Homo sapiens
  SIMILAR (3)..(242): 861254mologous to Homo sapiens ribosmal protein small subunit,accession number L13802,Smith-Waterman Score=356.
tgcagaatgatgaagttgcatttagaaaattaaagctgattattgaagatgttcagggcaaaagctacctgacgaacttccatggcatgaatcttacccatgacaaaatgtgttccatggtcaaaaaatggcagacagtgatcgaagctcatgttgatgtcaagactaccaatggttacttgctttgtctgttctgtgttggttttactaaaaaatgcaacaatcaaatatggaagacttctttgttttgacaacaggcatcatttcccacctccatgagcctttcttggtggtaacagactatgaccagtaataggtttccatttctgcacccagttgggggtgatattaaaattacttaataatctgtacacctgaacatgaacaactgtattgttactcacagctttcattaccccttgtagctcccttgacccgggcaacacagtgccctcatcaaaccttccgctaggttgtgtcatatgaagagtgtgatgtttgatgcacgatgttgat

SEQ ID NO: 5336 - DNA, 764 bp, Homo sapiens
  SIMILAR (54)..(488): 571254mologous to Homo sapiens ribosmal protein small subunit,accession number L13802,Smith-Waterman Score=297.
acccacgcgtccgctctgaccagttttatggcggttttttttgaacaagctttcttacgacaggcggcaaaaagggatctcaagaagaaagtggttgatccattttctaagaaagattgttgtaatatgtaaagcaccgtgctatgttcaatataagaaatattggaaaagacgttgggtcccccaggacccaaggaaccaaaattgcatcctgatggtctcaagggtccgtgtgtttgaaagtgagtcttgctgatttgcagaatgatgaagttgcatttagaaaattcaagctgattacttgaagatgttcagggtaaaaaactgccctgactaacttccatggcatggatcttaccccgtgacaaaaatgttgttccatggtcaaaaaaatgggcagacaatgatttgaagctcaccgttgatggtcaagactacccgatgggttacttgcttccgtctgttcctgtgttggttttactaaaaaaccgcaacaatcagatacggaagacctcttatgctcagcaccaacaggtccgccaaatccggaagaagatgatggaaatcatgacccgagaggtgcagacaaatgacttgaaagaagtggtcaataaattgattccagacagcattggaaaagacatagaaaaggcttgccaatctatttatcctctccatgatgtcttcgttagaaaagtaaaaatgctgaagaagcccaagtttgaattgggaaagctcatggagcttcatggtgaaggcagtag

SEQ ID NO: 5337 - DNA, 501 bp, Homo sapiens
  SIMILAR (419)..(499): 1001254mologous to Homo sapiens 40-kDa keratin protein,accession number J03607,Smith-Waterman Score=135.
tgtcctccgcccgctttgtgtcttcgtcctcctcggggggctacggcggcggctacgggggcgtcctgaccgcgtccgacgggctgctggcgggcaacgagaagctaaccatgcagaacctcaacgaccgcctggcctcctacctggacaaggtgcgcgccctggaggcggccaagatcctgagtgacatgcgaagccaatatgaggtcatggccgagcagaaccggaaggatgctgaagcctggttcaccagccggactgaagaattgaaccgggaggtcgctggccacacggagcagctccagatgagcaggtccgaggttactgacctgcggcgcacccttcagggtcttgagattgagctgcagtcacagctgagcatgaaagctgccttggaagacacactggcagaaacggaggcgatgtgcgagctgatagtgagcggcagaatcaggagtaccagcggctcatggacatcaagtcgcggctggagcaggagat

SEQ ID NO: 5338 - DNA, 757 bp, Homo sapiens
  SIMILAR (32)..(628): 911254mologous to Homo sapiens 40-kDa keratin protein,accession number J03607,Smith-Waterman Score=879.
gcgcagctaaaagttaagttctggtactggccagaagcaggggctgggggcctccgccgcttcaagcactatctacacgccattcaaggactgtcgggacaagattcttggggccaccattaagaactccaggattgtcttgcagatcgacaacgccggtttggctgcagatgacttccgaaccaagtttgagacggaacaggctctgcgcatgagcgtgtaggccgacatcaccggcctgcgcagggtgctggatgagctgaccctggccaggaccgacctggagatgcagatcgaaggcctgaaggaagagctggcctacctgaagaagaaccatgaggaggaaatcagtacgctgaggggccaagtgggaggccaggtcagtgtggaggtggattccgctccgggcaccgatctcgccaagatcctgagtgacatgcgaagccaatatgaggtcatggccgagcagaaccggaaggatgctgaagcctggttcaccagccggactgaagaattgacccgggaggtcgctggccacacggagcagctccagatgagcaggtccgaggttactgacctgcggcgcacccttcagggtcttgagattgagctgcagtcacagctgagcaggctctggggcttctgctgtcctttggagggtgtcttctgggtagagggatgggaaggaagggacccttacccccggcttttttcctgacctgccaataaaaatttatggtccaagggaaaaaaaaaa

SEQ ID NO: 5339 - DNA, 833 bp, Homo sapiens
  SIMILAR (324)..(698): 791254mologous to Homo sapiens keratin, type I,accession number Y16794,Smith-Waterman Score=440.
aagacaccctccaaaggacagcagaagccccagagcctgctgcctcagaggaccttggaggcagacaaattgttgtagtgatcttcctgtccctcgagcaggctgcgctgggcttcaataccgctgatcagcgcctggatatgcgccagctgggctccaaagcgcgcctccgtttctgccagtgtgtcttccaaggcagctttctgaggatagggagagggggttgtgactcagcagagcctggttcccggagagggcatggcacagccaccggccaggctgccctaggctgcaagggtataagtgtgaattgcacagggaagcggcggcggctggagagtgagcgctccctgcgccagctggtggaggcagacaagtgtgggacacagaagctcctggatgatgcaaccctgccaatggccgacctggaggcccagcaggagtccctgaaggaggagcagctctccctcaagagcaaccacgagcaggaagtaaagattctgaggagtcagctgggggagaagctccggattgagctggacattgagcccaccattgacctgaacagggtgctgggggagatgcgggctcagtatgaggccatattgccctctttcccccagtgggccattcaagcaagtttcctccaagttgagcctagcagaggagacagactcgtgtccatgagcaaagcagaaggctctgttcataatctggaggagaggaaagctgagtcatattttggagccattctgaagcccaagtttcagaaacaacaacagcagcagcagcagcagcaacaacaacatatgggtagctttgctttgctctaa

SEQ ID NO: 5340 - DNA, 1067 bp, Homo sapiens
  SIMILAR (636)..(1064): 971254mologous to Cloning vector pBACe3.6 levansucrase,accession number U80929,Smith-Waterman Score=728.
gatggctggcattggcatcagggaaggaaatcagtacgctgaggggccaagtgggaggccaggtcagtgtggaggtggattccgctccgggcaccgatctcgccaagatcctgagtgacatgcgaagccaatatgaggtcatggccgagcagaaccggaaggatgctgaagcctggttcaccagccggactgaagaattgaaccgggaggtcgctggccacacggagcagctccagatgagcaggtccgagaaaactggccttggagaaacactggcagaaacggagcgcgctttggagcccactggcgcatatccagcgctgatccacggtattgaacccactggccgattgcgaactgatatgacggcagataaggattccaacgcttatggccttaattccggctggaacaggaatggccactcgccgcaaggccatgcccttaaggccacttttactgggggaaaaggcctttcagacttgacagccctgcttgtcgactctaaagatccccccccttctgcctgtgaaaatgcaatgttccctccctctgcaccaacaaggcaccatcttggaaggagagagcagctcttgccagacaccaaacctgctagtgacttgatcttggacttcccaatccccccttcaaacacggtaactgatgaaatcgagcgcgcgaatgttttcaaaatgaacggcaaatggtacttgttcactgattcacgcggttcaaaaatgacgatcgatggtattaactcaaacgatatttacatgcttggttatgtatcaaactctttaaccggcccttacaagccgctgaacaaaacagggcttgtgctgcaaatgggtcttgatccaaacgatgtgacattcacttactctcacttcgcagtgccgcaagccaaaggcaacaatgtggttatcacaagctacatgacaaacagaggcttcttcgaggataaaaaggcaacatttgcgccaagcttcttaatgaacatcaaaggcaataaaacatccgttgtcaaaaacagcatcctggagcaaggacagctgacagtcaactaa

SEQ ID NO: 5341 - DNA, 1654 bp, Homo sapiens
  SIMILAR (382)..(1125): 421254mologous to Homo sapiens Keratin 19 (AA 1 - 399),accession number Y00503,Smith-Waterman Score=288.
  misc_feature (1)...(1654): n = a,t,c or g
cgggggttgctccgtccgtgctccgcctcgccatgacttcctacagctatcgccagtcgtcggccacgtcgtccttcggaggcctgggcggcggctccgtgcgttttgggccgggggtcgcttttcgcgcgcccagcattcacgggggctccggcggccgcggcgtatccgtgtcctccgcccgctttgtgtcctcgtcctcctcgggggcctacggcggcggctacggcggcgtcctgaccgcgtccgacgggctgctggcgggcaacgagaagctaaccatgcagaacctcaacgaccgcctggcctcctacctggacaaggtgcgcgccctggaggcggccaacggcgagctagaggtgaagatccgcgactggtaccagaagcaggggcctgggccctcccgcgactacagccactactacacgaccatccaaggaactgcgggacaagattcttggtgccaccattgagaactccaggattgtcctgcagatcgacaatgcccgtctggctgcagatgacttccgaaccaagtttgagacggaacaggctctgcgcatgagcgtggaggccgacatcaacggcctncgccagggtgctggaatgaagctgaaccctggcccaggaaccgaacctggaagatgccagaatcgaaggcctgaaggaagaagctggcctacctgaagaagaaccatgaggaggaaatcagtacgcttaaggggcccaagtgcgaggcccaggtccagtgtggaggtggatttccgcttccgggcacccgatcttcgccaaagatcctgagtgacatgcgaagcccaatatgaggtcatggccgagcaagaaccggaaggattgctgaagccctggttcacccagccggaactgaaagaattgaaacccgggaggtcgcttggccacaccggagcagcttccagatgagccaggctccgaggttacttgaccttgcggcggcgacccctcaggggtcttaagatttgagctgccagtcacagcttgagccattgaaagctgcccttggaaagacaccactggcagaaaaccggaaggcgccgctttggaaacccccagctggcgccatatccccaggcgcttgattcagcggttatttgaaagccccagctgggcgnattgttgcgaagcttgatagttnaaccggcagaattcaggagtaccagccggctcattggacatcaagttcgccngcttggagcaggagattgcccaccctaaccgcagccttgcttcgagggacaggaagatcactacaacaattttgtttgcctccaaggtcctctgaggcagcaggctctggggcttctgctgtccctttggagggtgttttttgggtaaagggatgggaaggaagggaccccttacccccggctttttttcctgacctgccaataaaaatttatggtccaagggnnnnnnnnnnnnnnnnnnnnnnggggggggccgttttaaagaatccaattttacgtccccgggcgggcaaggtaaaattttttttatggggcccccaaaattaaatccccgggccggggtttaacaacggggggaggggaaaaacccgggggttcccaaattaaatggcttggaagaaaatccccttttcgccagggggggaaaaaaa

SEQ ID NO: 5342 - DNA, 282 bp, Homo sapiens; identical to SEQ ID NO: 2959
  SIMILAR (116)..(232): 841254mologous to Homo sapiens Human secreted protein HCHPF68, SEQ ID NO:163,accession number Y86248,Smith-Waterman Score =168.

SEQ ID NO: 5343 - DNA, 510 bp, Homo sapiens
  SIMILAR (4)..(354): 511254mologous to Homo sapiens Human thyrotropin GPR N- terminal sequence,accession number W03626,Smith-Waterman Score=336.
atggaaaagaatgagaaggagcaggaggaggaggaaaagaaggagaagaacagcaagaagaaagaagaagaggaggaggaagaaggaggaggagaagaagaagaagaagaaggagaaggaggagaagaagaagaagaagaagaagaagaagaagaagaagaagaagaagaagaagaagaagaagaagaagaagaagaagaagaagaagaaaagaagaagaagaagaagaagaagaagaagaagaagaagaagaagaagaagaagaagaagaagaagaagaagaagaagaggaagaagaagaagaaagaagaagaagaaaaagtagtggaggaggaggatgaattcatttggtttttgggaaactctctctatttcccttctttttctcattttgcctggtcacagattccaagtagagaagatgaaggggaaaggagacttcgtgtgaactcgatgatcatggatttcacttcaaatacaaaccatgtccagctaattgtggccaggtga

SEQ ID NO: 5344 - DNA, 259 bp, Homo sapiens; identical to SEQ ID NO: 4378
  SIMILAR (9)..(218): 711254mologous to Homo sapiens Human follicle stimulating hormone GPR N-terminal sequence,accession number W03627,Smith- Waterman Score=238.

SEQ ID NO: 5345 - DNA, 390 bp, Homo sapiens
  SIMILAR (121)..(330): 841254mologous to Homo sapiens Human thyrotropin GPR N- terminal sequence,accession number W03626,Smith-Waterman Score=279.
atgaggttagataaagcagcaacgggaatggattcaaacagagcagtcatagctggaggaggagaaggaggaggagaaggaggaggagaaggaggaggagaaggaggaggaggaggaggagaaggaggagaagaaggagaagaaggagaaggaggagaaggagaagagggagaagagggagaagaagaggaagaagaagaagaggaagaagaagaggaagaagaagaggaagaagaagaagaagaagaagaggaagaagaagaagaagaagaagaagaagaagaagaagaagaagaagaagaagaagaagaagaagaagaagaaatgattgttttaaaaataattgtagcaaaacagttatttgaatattcatctatcagtggcatttga

SEQ ID NO: 5346 - DNA, 1446 bp, Homo sapiens
  SIMILAR (732)..(1409): 291254mologous to Gallus gallus avena,accession number AB017437,Smith-Waterman Score=146.
atgcatgtggcgtggagttgcccgactgctcaatcttcacaggccaccgtggactctgggaaaacactggcagaaactgaatcacctattggactctcgagcaaggttggtggaaagaatataagagctggggaatgggatgaattgaagtatgacaggttccccggccagaagccaaagaagaagaagaggaagaggaaagaagaagaagaggaagaggaagaagaagaagaagaagaagaagaagaagaagaagaagaagaagaagaagaagaagaagaagaaaagaagaagaagaagaagaggaagaagaagaatgcagcaatcccacccaaacccaacctcagccatcctggctccttgggcctgagctgctgccgcgtgactttgggggacaaaggaggctcttcctggcaaaccttctcccagactgcctgcctggggcctgcatccccagtcagctccaaacaaggctgttgctgctgctgctgccgcagccgcagctgtgacgtgtggaggcctttcctcggagggcaggcagccgcgtgggcaacagatgtctcagctccctgccgcctgcagccgtcagccgccgccactgagcctgtcagcggcctcacgcccaggcctcggatacacaggggatctgggtcccgggcggaccgcgagaacccggtctcagacatgggaccgccctgccgccacgcagccgccagactcacccgtgagatggtgaggggcgcgctgaagtcccggccgcccaccaggcggaagccccagggcgaaggcccgcgcagggtcacggaatggggcatcgcgggctggagccgcagccggagcctgagccggactctgaggaggagccgccgccgccgcagccgccgccgccgcctggacgccgcgccccgcccccggcccgcccgcccctgtccccactcggcccagcccccgcccccgctccctgtgcgcctggattggccccgcggccagcccgaccctcccacttcggggggctctgaggacccgccctcagccccggctgccggcaacccggcacccccactcagctctcagagatccccgcgttcggacggccccgacggcctggatcctgctcgggccttggatctgcaggccgcggacccaaacccagctgtcgacaccggccctttgaagtcgcttttaggggcggtgctccagcccgaggagggatggagggcccacttgggggatggggctgccccagctcagatacctcctcatgggcccgactggcacacctgcggcccatcctgccgtgtgaggagccctctgaaccaagaaccctatgaaccaggggcttgcgcagcactgggccggggacgcagacccaaaacgacagcaggcagcgccgagcgtgggagtggacacagaaaggtcctcagactagtttgtggaggccagtaa

SEQ ID NO: 5347 - DNA, 246 bp, Homo sapiens; identical to SEQ ID NO: 3956
  SIMILAR (3)..(116): 941254mologous to Homo sapiens dJ1022E24.3 (KIAA0835, similar to myelin transcription factor 1 (MYT1)),accession number AL121581,Smith-Waterman Score=183.

SEQ ID NO: 5348 - DNA, 435 bp, Homo sapiens; identical to SEQ ID NO: 2964
  SIMILAR (315)..(166): 501254mologous to Plasmodium falciparum serine repeat antigen,accession number AB021826,Smith-Waterman Score=87.

SEQ ID NO: 5349 - DNA, 1269 bp, Homo sapiens
  SIMILAR (5)..(127): 701254mologous to Homo sapiens Human secreted protein HCHPF68, SEQ ID NO:163,accession number Y86248,Smith-Waterman Score =164.
atgaagaagaaggaggaagaagaaggaggaagaacaagaaaagaagaagaggaagaggaagagaaagaagaagaagaagaagaagaagaagaagaagaagaagaagaagaagaagaagaagaagaagagccaaatagcttcatcccatactgctcaccttttctagatttttggttttgcttcattaccaacatccaaaaaaattctttctgtaaggagaacaaagacaaaaaagtcacagaatcctcaagtcagagagataaaaaactggagcaagacacaaccacagacagcattgtttcaaagcctattggtgaggaaataagtatttccttagaaacaattgataaatacctaaattcagtactgcagtgcaagcataagcaaaggagctcaaaaggcttagacagcatgcagcagcagccagtgctggtcgcctctccccaccctgggaatttgtctctaaaacattatagtgatggcagtgatggcccatctggagcagctgctgccatgatgccagctgcagtaaggaaagcacagctggggcggcatgctccatggagccagcagaagccagggataggcaaaagccctacccacttcccagttggcaggatgggagccttgtgctccccaggcacagctgcagctgaccagctgctactctggaccctggcatccctgttctcttgggggctgggagcaggagggagccctgccctctcagtgccagccatggaaggtgcttgcagtgtgtctggtccagctgcagctttgcaggagccagcgcttggagatacccaccctgctgcagctgacatgcctggccgtgtgcagtggctggagcccatgcttgctccctcacacagccctctgtgcctggctcacccatggcagaaacttcatccacgctctttgaaccattttctcaattcccagtggatcaagcttacctatctttatggtgtgaccttctggtttctggtgttcaggctttcatcaccaggcttcttggtggctttgtcattttctgccctgaattggtgggttcttggtctcactgacttcaagaatgaagccgtggaccctcgtgggaggcagctgaggcccggcaagaattcaagcctagcgccagcactgctgagggactccacagctgctggccctggtgctaagtccctcactgcacagggcggaggtgccggccagctggcagcttcgagggtggggcctatggagcccacggccacccagaactcccgctag

SEQ ID NO: 5350 - DNA, 279 bp, Homo sapiens
  SIMILAR (13)..(240): 651254mologous to Homo sapiens Human follicle stimulating hormone GPR N-terminal sequence,accession number W03627,Smith- Waterman Score=239.
acctcatctcttaaaaaagaagaagaagaagaagaagaagaagaagaggaagaggaagaggaagaggaggaggaagaagaagaagaagaagaagaagaagaagaagaagaagaagaagaagaagaagaagaagaagaagaagaagaagaagaaaggtcagttgctcatgtggaacccagaacaggctacttgttcaatagtcaacagacactgaacacctatcatgtgagaggcacagatccaggtacttgggataaatcagtacacagaatagcaaag

SEQ ID NO: 5351 - DNA, 708 bp, Homo sapiens
  SIMILAR (1)..(315): 781254mologous to Homo sapiens Human follicle stimulating hormone GPR N-terminal sequence,accession number W03627,Smith- Waterman Score=384.
gaggaaggagaagtagaagaagagggggaggaggaggaagaagaagaggaaggggaaggggaggaagaggaagaggaagaaggagaaggagaaggggaaggggaaggggaaggagaagaagaagaagaagaagaagaagaagaagaggaagaagaagaagaagaagaagaagaagaagaagaggaagaggaagaggaagaagaagaagaagaagaagaagaagaagaacaagaagaagaagaagaagaagaagaagaagaagaagaagaagaagaaagaagaagcggcagcagcggcagcagccagcagggacagccacacctccctggagcttacctactggcctccatgtcctgctctgagagacactctggtctccaactgctcactctcctctctctgtacctctggagacagtttccactggtgagagaccaccatcccagcaatgtcttcctgctcccatcagcacagcctccaccagttaggaattatccccaggcagattttaatgagaatggcttcattgatgaggaggatctgcagaggatcatcctgcgactgctgaacagtgatgacatgtctgaggacctcctgatggacctcacgaaccacgtcctgagtgagtcggatctggacaatgacaacatgctgtccttctcagagtttgaacatgcaatggccaagtctccagatttcatgaagtaa

SEQ ID NO: 5352 - DNA, 508 bp, Homo sapiens
  SIMILAR (5)..(196): 901254mologous to Homo sapiens Human thyrotropin GPR N- terminal sequence,accession number W03626,Smith-Waterman Score=294.
aaagcatatccagaaaaaagaagaagaagaagaagaagaagaagcagaagaagaagaagaagaagaagaagaagaagaagaagaagaagaagaagaagaagaagaagaagaagaagaagaggaagaggaagaagaagaagaagaagaagaagaagaagaagaagaagaagaagaagaagaagaagaagaagaaaagtgctcactgaagcacactgaagctccctgtgtaaaaggaatagaaactattttctggaataaacttatatacataaagctggacttaagacagttccctgatgaacctgatagacatgcacaggctttccaacatttaaatcagctgtttcctcttatgtgcagaaatgcagtgcaacttttaagccacatttcaactactgcggaaaaacaggcagcagtacagacagcaaaggaatttgaagatgaacaactgacatcctatagtcagtcaaaaaataaacagaagcgaaagatgaaaatggatgagtaa

SEQ ID NO: 5353 - DNA, 483 bp, Homo sapiens
  SIMILAR (13)..(261): 751254mologous to Homo sapiens Human thyrotropin GPR N- terminal sequence,accession number W03626,Smith-Waterman Score=313.
atgacagcaaagtgtgtgtgtggttggggggtgggggagagagagcgagagaaagagagagaagaagaagaagaagaagaagaagaagaagaagaagaagaagaagaagaagaagaagaagaagaagaagaagaagaagaagaagaagaagaagaagaagaagaagaagaagaagaagaagaagaagaagaagaagaagaagaagaagaagaagaagaagaagaagaaaaatttaaagaatctatgaagcaccagagaaaactgctgttgcttctgcatcccccagctcaaaccaaccactggtatcctctgggaaatctgggctcccatgactgccctaaccaaagcctggaagcctctgcagtcatctgtgccttaattttccttcgactgaccacccccacaatcctgctccatggtcataaatccccacttgttcttactgaagtcagagttgagtttgatctctctcccttgcagtga

SEQ ID NO: 5354 - DNA, 495 bp, Homo sapiens; identical to SEQ ID NO: 2966
  SIMILAR (124)..(303): 911254mologous to Arabidopsis thaliana putative protein,accession number AL162506,Smith-Waterman Score=279.

SEQ ID NO: 5355 - DNA, 873 bp, Homo sapiens; identical to SEQ ID NO: 5048
  SIMILAR (37)..(153): 971254mologous to Arabidopsis thaliana putative protein,accession number AL162506,Smith-Waterman Score=193.

SEQ ID NO: 5356 - DNA, 498 bp, Homo sapiens
  SIMILAR (9)..(341): 601254mologous to Homo sapiens Human thyrotropin GPR N- terminal sequence,accession number W03626,Smith-Waterman Score=327.
atggcagatgttggaggaagaaagaagggagaagaagggagaaggagaaggagaagaagaagaaagaagaagagaggggaagaaggggacgaaggggaagaagcggatgaaggggaagaaggggaagaaggagaagaaggggaagaagaaggggaagaaaagaagaagaagaagaggaagaggaagaagaagaagaggaagaagaagaggaagaagaagaggaagaagaagaggaagaagaggaagaagaagaggaagaagaggaagaagaagaagaagaagaagaagaagaagaagaagaagaagaagaagaagaagaagaagaggaagaggaagaagacagaatttcccatatacagcttggcacagaatatgggagtccgtcatccaacattttgttcaaataaattggagcacttcgccccaccccacccaccaaattcctttctcatggagaagatgcagcagttggaacgggacaatatacaaaggaactaa

SEQ ID NO: 5357 - DNA, 654 bp, Homo sapiens
  SIMILAR (109)..(384): 711254mologous to Homo sapiens Human follicle stimulating hormone GPR N-terminal sequence,accession number W03627,Smith- Waterman Score=336.
atgcaggtccgtgacttcattcttgaagtcagcgagaccaagaacccaccggaaggaaccagttacggacacattaagagaatgattctttctataatgatctctaggcaacacaaagaagaagaagaagaagaagaaagaagaagaagaaaggagaagaaaggagaagaaaggagaagaaaggagaagaaaggagaagaagaagaagaagaagaagaagaagaagaagaagaagaagaagaagaagaggaagaggaagaggaagaggaagaggaagaggaagaagaagaagaagaagaagaagaagaagaagaagaagaagaagaagaagaagaagaagaagaagaagaaggactatcaatcaagtatatgacaagcacaaagaccctttcagacatcaacggatttgaaaaattacttccagtacaccctattttagcagtactagaggatgcgtttagcagttctggaaaacacgacaataaaggcaaagaagagaaacagaacaggaaacaagggattcaagatgatcgagagcaaaaggatgttccacagatgatgactatgcaggctgtgcagggggacaggactgtgggaaaatctcccaaagaaaaaaatataatagagcacttggaactgcgcttgaatctttga

SEQ ID NO: 5358 - DNA, 2427 bp, Homo sapiens
  SIMILAR (1723)..(2421): 931254mologous to Escherichia coli K12 orf, hypothetical protein,accession number AE000497,Smith-Waterman Score=1110.
atggaatactatgcatccataaaaaaggatgagttcatgtcctttgcagggacatggaagaagctggaaaccatcattctgagcaaactgtctcaagaactatcgcatgttctcactcacagagggagcctgtgcgatgaccctgtcgtgagaggggccagcccactttgggaagctgtgaggagctcggtgtcgctgcagctgggtacaagcttgccaaatgacagtcactgcaatagaggcacagttcctgtgctgtttaatgatctcagtatgtcagttacattgccttctttgaaagccataacaactgagccctgcattgcaaaggaatgctttgttattctcaccatattcatcgagtgcccactacatgccaggctcctctcagcttgttacaaaaccagatggttaccccagtgcattcaggaaggtgatggagatatattcagggcccagtgggaaaaaaaaaggcatcaacttggcgttcatcaaaaacataaaaaaaaatcaattaaaattatgagagtctcgaagagatccagaagaaggaagaagaagaaagaagaagaagaaaataagaagaaaagaagaagaagaagaaaagatgaagataagaagaaggaagacgaagaagaagaggaagaggaagagagaaggaagaagaagaagaagaagaagaagagaagaagaagaagaagaagaagaagaagaagaagaagaagaagaaggaagaagaagaagaagaagaagaagaagaagaagaagaacaagaagaagaagaagaagaagaagaagaagaagaagaagaagaagaagaagaagaagaagaagaagaacaagaagaacaagaagaaccaaaccagggtagatgaagacaaagttaaaaagaaagaaaaggctgaaactattgtgaaaaattatttccagatgctgcaagtgggagggaggaaggaaagtaaagagaaaaagaacgaaagagaaagaaagaaaaagaagaggaagaagaagaagaggaagaagaagaggaagaagaagaataataagaagaagaagaagaagaaggagacggaggaaacggaggaaaccgaggaaacggaggaggatgaagataaggaggggaagaggaaggataagaggatggataagatgaaggagatagatgacacccgcgatgaacagcgttatcaggggtattgcgatgcgatgatgctgcataatctttccccattacgcatgaatccacgcgccatctcatccattcatttaggaatgcagttaatgcgtgatgcccttagcgcaaacccggatttagacggtgtattttgcaccaatgacgatattgcgatggatttatcacggcaacacgctttaggttattttctcttcattacacgtattctctttgccggacgttgcctatactccaggcaggaaactggaggatatctcatgagtgaacccctgttaaatgcccgcacgccggacacagaactgtttttactgccgggaatggctaaccgtcatgggctgattaccggcgcaacggggacgggtaaaaccctggcacgactgttgaatctcaacgatgtgcaatctggcgtgctgaatatcatcttccgcattgctgacgatcaggggctgttactgctcgactttaaagatctgcgggcaattacccagtacatcggcgataacgccaaatccttccagaatcagtacgactggatgcgcaccgatgccaacggtaaaggcgttatcaatatcctcagcgccgagaaactttatcagatgccgaaactgtacgccgccagcctgctgtggatgctttcagagttgtatgaacaattgccggaagcgggcgatctggagaaaccaaaactggtgtttttcttcgacgaggcacatctgctgtttaacgatgccccgcaggtactgctggataagattgagcaggtgataaggcttattcgctcaaaaggcgtgggcgtctggttcgtttcgcaaaacccgtctgatattccggataatgtgctcgggcagctcggtaatcgcgttcaacatgctttgcgggcttttacgccaaaaggtcagaaagcagtgaaggcagcggcgcaaaccatgcgggccaatccggcgtttgataccgaaaaggcgattcaggaactgggcaccggcgaggcgttgatctcttttctggatgcgaaaggaagcccttctgtggtggagcgtgcgatggtgatcgcgccttgttcgcggatggggccggtgacggaagatgagcgtaatggcttgattaatcactctccggtgtatggcaaatatgaggatgaggtggaccgggaatccgcctatgagatgtgcaaaaaggctttcaggccagtaccgagcagcaaaataatcctcccgcgaaagggaaagaggtag

SEQ ID NO: 5359 - DNA, 966 bp, Homo sapiens
  SIMILAR (763)..(960): 781254mologous to Arabidopsis thaliana putative protein,accession number AL162506,Smith-Waterman Score=269.
caaatcactgcatgatcttgagccagccattcaacacacttccccatctgcaggagtaagtgatgggaaatggagtctttctccctcacacagaggttgaagaatggtagcaaatggctgattatggtctctgagtaacctcttttttttttttttttttttttcatttttttcggcccatcaataaggctttccagtacaacatggtaacttgcttttttctttttattcctttacatcattcatatattatactatgcctttaatgaatatggattttcttttttctttgttggttatttagttttaaccaagattgacaactacatcttcttagtcttcttagaatttgagttttcacctgatacactggtctttctctctcttttcccacagggtgtattctacccactggaaaacctcaccgacccccccttctcaccagttccttttgtgctcccagaacgcagcaactccatgctctacattggaatcgccgagtatactacattttccctgaaaagacaatccacgtaaaatcctaacagtgacataatgctaaccttgtgatctcccttcaccaactcacgcctcacaatctttatttctttctcggaatgtgggcagattgcagagatctacatcttgtcccagcccttcatggtgaggatcatggccacagagcctcccataatcaatctacaaccaggcaatttcaccctggacatcgtgagccgagatcacaccactgcactctagcctgggcgacaagagcaaaactccgtctcaaaaaaaaaggaagaagaagaagaagaagaagaagaagaagaagaggaagaagaagaggaagaagaagaggaagaagaagaggaagaagaagaggaagaagaagaggaagaagaagaagaagaagaagaagaagaagaagaagaagaagaagaagagaagaagaagaagaggaggagg

SEQ ID NO: 5360 - DNA, 1677 bp, Homo sapiens
  SIMILAR (973)..(1419): 391254mologous to Homo sapiens Gag-Pro-Pol-Env protein,accession number AF164611,Smith-Waterman Score=284.
atgcccagccccaaccatatatttctaagagtctcaggcatctttgccatcgagaaagtcatccttggccacccccacctttactcccactctggcctccacaggaaagtgctgaagcacaaagtccatgaaagcagaccagggataatgattctgcagcaaatagttgctggagggggcatactcactgagtaccacactctacaggtgaccataacattattcagtcagttctctgctgacggatttggaggctgttcccagtcttttgccacgagactgcacaccccagaatgcaacacgcgcctccgcgaagaagacctactcatagcaagtacttcacagcctacaattcccaagatgcaacgcgacctccttcccacagcaacgaaagactgcgactccccggactatcaggccgggagagtccacttccagctcacctcggagctccgggagcctttcagcacctgcttggatgcagccatcgtgggctacaaggacttgccttccatccaggccaccatccctgggaaaaccttcatcaacgtcaagccagctgaggttgatgtcctggttggcaaagactggtcaagtttttttgtgaatgaggtgacacttgggggccagaaatgttctgtgatctgggacctactgctgcaggatggggaactgacctatctttataccaagagcaccgatggagcccccaccttcaatgtcactgtcaccatgactgctaggatgctagtgttggcagtggaagaacattgtcctttgtttcctgaaaagggaacattagacgtggaactatgggatcgtgttggtgcaaaattccgggaactggtcccaacaggaaattatgttcccgtcactgtttggggtgactgggccttggctcagctcacaggctccaataattactctgacactactgcccaattaggctttgatgctctcaccgtggaacaagtaacaaagggtcacaatgaattatatcctgattttttagctaaattacaagatgctgttgaaaaatctgtctctgatgagcacgctcaaggtattcttcttcgaatgttagcttttgagaatgcgaaccatgagtgtaaaatggccatgcattccgtccaacaacaaaatttacctgatcgtgaggtgttgcctgagtatattaaatatgaaggcattggatcagacacaaagctattctgtgcccacaaagctattctgtgggcacgggccatgaaggacggcaatcaaactggctcgactgattcttttcttggagcctgctataattgtggtcaacttggtcatactcgaaaaaattgcacagttaaaaacttaaaggcagccaagccggctcaaaaaacacagccaaatgctcctgctactgtttgcccttgttgttgtaaagtttcccctcacattgatttacctgctacacaaaattattcttgctgggcttatgtgccttttcctccacttattcaacctctcacctggatggatgctcctgcggaaatctatactaatgatagtgtgtggatgcctggagctacagatgaccgttgccccactcaaccaggaaaagaaggcactgcatttaatgttcctacggttataaataccctcctctgtgcctcggacatgcaccttgttgtatccatctag

SEQ ID NO: 5361 - DNA, 378 bp, Homo sapiens
  SIMILAR (1)..(234): 1001254mologous to Escherichia coli UUP protein,accession number Y09439,Smith-Waterman Score=409.
ttattgattcttgacgaaccgaccaacgatcttgatgtcgaaacgctggaactgctggaagaactgatcgacagctatcagggcacggtattgctggttagccacgatcgtcagtttgtcgataacaccgttacagaatgttggatcttcgaaggcggcggtaaaattggtcgttatgtcggcggttatcatgatgcccgtggtcagcaagagcagtatgtggcgctcaaacagcgttctgctatgattcaccttaaatcgttccaggtattgaggaagcttggactgctctgtttcctcgatgtctaactgctccaccagtttttctgacccctggttgtcttcatcattttgggactgctcctcttgaagccccat

SEQ ID NO: 5362 - DNA, 431 bp, Homo sapiens
  SIMILAR (14)..(427): 331254mologous to Mus musculus PKC-regulated kinase PKK,accession number AF302127,Smith-Waterman Score=176.
ctcgaggatcatgctcatgctggttaaagctttagcagaccagagagccaagaatcaggatggaatgaacgccctccactttgccactcatagcaatcatgtgcgcatcgtggagtatcttattcaagatctgcacctcaaggacctgaaccagcctgatgagaaaggaagaaaaccatttcttttggcagctgataggggccatgttgaaacgatagaaaaacttaccttcctaaacctgcatacttcagaaaaggacaaggggggaaacactgccttgcacctcgctgcgaagcatggtcacagtcctgcagtgcaagtgctgctagcccagtggcaagacataaatgagatgaatgagctcaatatcagtagtttgcagatagcaaccaggaacggccatgcatcccttgtcaactttcttcttaggg

SEQ ID NO: 5363 - DNA, 588 bp, Homo sapiens
  SIMILAR (43)..(522): 301254mologous to Caenorhabditis elegans contains similarity to ankyrin repeats and protein kinases,accession number AF043701,Smith-Waterman Score=146.
atgctcatgctggttaaagctggagcagaccagagagccaagaatcaggatggaatgagcgccctccactttgccactcagagcaatcatgtgcgcatcgtggagtatcttattcaagatctgcacctcaaggacctgaaccagcctgatgagaaaggaagaaaaccatttcttttggcagctgagaggggccatgttgaaatgatagaaaaacttaccttcctaaacctgcatacttcagaaaaggacaagatacagtggtccacactctggaccgcagctttaaccaaaatgaaaacttccagaaactccattgcagcccttactattgaaggagcatgctctcctggcacaggggtttctacgtcgagtgtgtctctgttgcaggggggaaacactgccttgcacctcgctgcgaagcatggtcacagtcctgcagtgcaggtgctgctagcccagtggcaagacataaatgagatgaatgagcgtcagggtcttgctttgtcacccaggctggagtacagcggcatgggagatgcagcatttcttaaagaatgccccactgttgtttctaagattttcttctaa

SEQ ID NO: 5364 - DNA, 711 bp, Homo sapiens
  SIMILAR (345)..(265): 441254mologous to Homo sapiens Human secreted protein, SEQ ID NO: 5298,accession number G01217,Smith-Waterman Score=61.
atggccatccctgctatggagagctgtgatgacctgctctactatgaacccctagcatattactgctcccaaggacagcccccaaggacagtgtcgagtaacatagattcagagaccaatcaatttgttaagaattctcaggctattgaagttttctatgggactcttaaaggaagaactaagactactgggtggaagcttccaagaactttggcttccacaaatcacactgccaagatggtcaggctcgctgatctctcagtggccagcctcatcctccacaacagtgaccaccaggagctactggagcttctctttggaccagctggtggcatcccactcagtgccagctgttcacgttgcttccatcctcctgctcctccacaatccagcaaagaagatagttcaaattctcaggtatccaagctaagagagaaactccagctgatcagtgctcttacaaacaaacctgagagcaacaggcctccagagaccgccgatgaaggaggatggaagcaacgtgaacagctggcacttgagtggatgccaccagctggtccaaaaaaagctccagaactcctggtggtcattgttgtggaggataaggctgccactgaaaatcagcgagctaaagcaggggaagttttctgtagtgcttccacagcaagatggacgctgtttaaagtattgccaatggaagctacactctga

SEQ ID NO: 5365 - DNA, 596 bp, Homo sapiens
  SIMILAR (3)..(542): 571254mologous to Dictyostelium discoideum ModA,accession number U72236,Smith-Waterman Score=656.
gcacacaagccatgccccctcttttctctttgggataccaccagtgccgctggaactatgaagatgagcaggatgtaaaagcagtggatgcagggtttgatgagcatgacattccttatgatgccatgtggctggacatagagcacactgagggcaagaggtacttcacctgggacaaaaacagattcccaaaccccaagaggatgcaagagctgctcaggagcaaaaagcgtaagcttgtggtcatcagtgatccccacatcaagattgaacctgactactcagtatatgtgaaggccaaagatcagggcttctttgtgaagaatcaggaaggggaagactttgaaggggtgtgttggccaggtctctcctcttacctggatttcaccaatcccaagggatctacggacatcctcttcctttggaatgacatgaatgagccttctgtctttagagggccagagcaaaccatgcagaagaatgccattcatcatggcaattgggagcacagagagctccacaacatctacggtttttatcatgtaagacatccaaaaagaattaaactgggcttgtgtgacccaccttttggctga

SEQ ID NO: 5366 - DNA, 661 bp, Homo sapiens
  SIMILAR (344)..(634): 751254mologous to Homo sapiens dJ238O23.5 (novel protein similar to rat SAC (soluble adenylyl cyclase)),accession number AL133404,Smith-Waterman Score=379.
atcatgagggaggatgaagctgtgaaggtaggaggctagcttcctgtactgccattctgaaaaggccttcctagtacacagcgcaatgctctggtagtgttcacatattgcctggccaaaccaatgaccattggaactcaatttaggagggaggctgggaatattctcctatgaagatagatgaggtagaacagtgaggctgaggagataaaaggcaaacaagggcaatagaatcctcagcctttcttgtgtgggggcacagaattaaacagtttcctttctgtagttaagagatatgtggatcattgatccatttgattttgatgagcattttgacaagtgcctcaattatctaccacattaccgtacgagtgctgagttccacaggacagcgtggatgttgcatttgtgtcatcttatccaggaggctgccttatacatctccacagtcattgagaaagggggcggccagctgagtcggatctttatgtttgagaaagtaagtacaagggaacttgacccatcagcattaaagggctgcatgttcctctgtgttttcggccttcctggtgataagaagccagacgagtgtgcacatgccctggagagctccttcagcatcttcagcttctgctgggagaatcttgctaagaccaactga

SEQ ID NO: 5367 - DNA, 636 bp, Homo sapiens
  SIMILAR (1)..(495): 701254mologous to Homo sapiens putative p150,accession number U93574,Smith-Waterman Score=551.
atgattgtatatctagaaaaccccactgtctcagcccaaaatctccttaagctggtaagcaacttcagcaaagtctcaggatacaaaatcaatgtacaaacatcacaagcattcttatacaccaataacagacaaacagagagccaaatcatgagtgaactcccattcacaattgctacaaagagaataaaatacctaggaatccaacttacaagggacgtgaaggacctcttcaaggagaactacaaactactgctgaatgaaataaaagaggatacaatcaaatggaagaacattccatgctcatgtgtaggaagaatcaatatcgtgaaaatggccatactgcccaagctggcattgttcaaaacgcttgtgagggaaccgattggcttaggggacttccgaatcagccttatcatgcaggaacagagaaaccaagccaagatccgtcttcgcaatcaagttggaggagcccggagcccgccttcggagctacggcctaacggcggcggcgactgcagtctggaggccaaggcagaggcttcctcaggagaccatcccactgacacagagatggacgacgagcagaagagcaacacggcacggagccagtctcacgtggagacagaagcatag

SEQ ID NO: 5368 - DNA, 635 bp, Homo sapiens
  SIMILAR (297)..(557): 401254mologous to Gibbon ape leukemia virus pol polyprotein,accession number M26927,Smith-Waterman Score=156.
tgtgcaagttgcttggggacagtgctgctttaggctatgggttgggttcaggcctgttccacgtatctctcagtctggaccagcagcaaatcagcatgctcttctcccagatggcagaagtgcaggcagctaaaccaaaccatgcaagcacatttaaagcctctctttgcattgtttgtttacattccattgagagccagccgcagagtctctgccgtctccccgtgcgctcaagcacaagcccccaactaaaagccttgtctggaaaatctgcttggtgccataacagattatctggtgagccagggtacaaatatctcctggtgtttgtggatacttttactggacgggtcaagggtttccctacctgtacagaaaaagcagtagaagtctgtaaaccttcactaaaggaagtaatttctcaatttggactccccaagtcccctcagagtggtaacaggctctccttcatggttctaggaactggccttaggaaatctaactatgaaaccaaggttatggagtatcccacctcaggaaggaacactgaacaactgattgacagtcttcttgccgccagccagaccaccaagtggcccattaaccaagagaaccagcgcaaccagatacgctga

SEQ ID NO: 5369 - DNA, 597 bp, Homo sapiens
  SIMILAR (226)..(101): 401254mologous to Homo sapiens Human secreted protein, SEQ ID NO: 6691,accession number G02610,Smith-Waterman Score=71.
ttattaattatatttttttttgactgtcttgttggctccctgaagaggcttgcagagatgtttttattagcgaaacttgggaattgacatcatgagtaaggtatgcaggctgggctgggcaaagcacatgagaggtaggagatgcgggtccagcgtatctggttgccgcctggttcctccttggttaaatgggcccacttggtggtcctggctggcggcaagaagactgtcaatccagttgttcagtgttccttcctgaaggtgggatactcccataaccttggtttcatagttagatttcctaaggccagttcctagaactgccacatcaagggtgacctgaggctccgtgggtgtgatgacgatggagtgtgctgcagtcagagccaggggtgctgtcaggcggtgtgtatcaatctcatctgaaagcttggtgaggagtggcggctggccaggtcttctgccggctgtcctgttttaaggaggtcagggcagcctctcttccagtgacaccctccatcctgcagtaggcacattggctccatccaaggttggctgtcttcgattagttggtctcctgagaatcctagggtcacc

SEQ ID NO: 5370 - DNA, 528 bp, Homo sapiens
  SIMILAR (94)..(297): 911254mologous to Homo sapiens beta-fibrinogen precursor,accession number J00129,Smith-Waterman Score=318.
atggctgaccagaagcagctgcagctggagactcccaccaaggagaaagaaaaagggtgctctggtctgacctgtttggctccccccaggtggtgttgctgtccttctccaattggggtgttgtgtcctacaggatgtcagttgcaagaggctttgctacaacaggaaaggccaatcagaaatagtgttgatgagttaaataacaatgtggaagctgtttcccagacctcctcttcttcctttcagtacatgtatttgctgaaagacctgtggcaaaagaggcagaagcaagtaaaaggtagatatccttgtgctttccattcgattttcagctataaaattggaaccgttagactgccacgagaatgcatggttgtgagaagattaacatttctggtctgggaccacgatcccactcgtgttgtcggtctgattatcggtctgggaccacggtcccacttgtattgtcgatcagactatcagcgtgagactacgattccatcaatgcctgtcaagggcaagtattga

SEQ ID NO: 5371 - DNA, 504 bp, Homo sapiens
  SIMILAR (124)..(471): 831254mologous to Homo sapiens zinc finger protein ZNF226,accession number AF228418,Smith-Waterman Score=539.
atggtgacattcaaggatgtggctgtggtcttcaccagggaggagctggggttgctggaccttgcccagagaaagctgtaccaagatgtgatgctggagaacttcaggaacctgctgtcagtggaatgtgggaagagtttcggtcggagtgcacatcttcaagcccatcaaaaagtccacactggagataagccatacaaatgtgatgagtgtgggaagggcttcaagtggagcttgaaccttgacatgcatcagaggagtgtccacacaggagagaaaccatacaaatgtgatgtgtgtggtaaagtcttcagtcggtcttcacaactacagtctcatcagcgagttcacactggggagaaaccttataaatgtgagatatgtggtaagagcttcagttggcgatcaaatcttacagttcatcacagaatccatgttggtgataaatcctataaaagtaataggggtggtgctacagctggcttagtaaacctcaatgactga

SEQ ID NO: 5372 - DNA, 461 bp, Homo sapiens
  SIMILAR (118)..(423): 481254mologous to Mus musculus HepA-related protein HARP,accession number AF209773,Smith-Waterman Score=276.
cgtcccaaacctgtggcgggagttggagattctgcggcgaatacgccaggtgtgactggctggaagtggcgtggctggatcatcatgcctagggttcataacataaaaaagtctcttacacctcacatttcttgtgtgacaaatgaatctgataatctgctggattttttgcctgacagactaagagcaaagctacttccattccagaaagatggcatcatttttgccctcaaaagaaatggcaggtgtatggtggctgatgaaatgggtctaggaaagacaatccaggcaattggaattacttacttctataaagaggaatggcctctgttaatagtggtcccttcgtctctgaggtacccttggacagaagaaattgaaaaatggatcccagagctaagtccagaagaaatcaatgttattcagaataaaactgatgttaggagaatgtcgaccagtaa

SEQ ID NO: 5373 - DNA, 567 bp, Homo sapiens
  SIMILAR (445)..(567): 751254mologous to Homo sapiens Human secreted protein, SEQ ID NO: 7420,accession number G03339,Smith-Waterman Score=153.
tcaactactcccaatacttcctgttgtttgaggtagggataagttctctgccaagagacccaaaatgtgggaaagctggttgtccaccttgatttcactttttccagtgtagaaatcatgagacatggggaagccttctatgccatcattttgaaacgcaacacgtgaggttatatttattttaccatctttcagccttaggcccattgcagccactatttcttctttaaagtactcatccatcttgtttcccaagagaaacttcttgccccaggagctcaggctttctgaaaacttttgaatgctttgctgcttagaaatttcttccaccagataccctaaatcatctctctcaagttcaaagttccacaaatctctagggcaggggcaaaatgctgccagtctctttgctaaaacataacgagagtcacctttgctccagttcccagcaagttcttcatctccatctgagaccacctcagcctggaccttattgttcatatcactatcagcatttttgacaaaggcattcaacaagtctctaggaggttccaaactttcccacat

SEQ ID NO: 5374 - DNA, 1362 bp, Homo sapiens
  SIMILAR (478)..(600): 801254mologous to Homo sapiens Human secreted protein, SEQ ID NO: 7420,accession number G03339,Smith-Waterman Score=160.
ctagtgttgagtgtctgcagcttttccaagcacatggtgaaagctgtcagtggatctaccattctggggtctggaggatggtggccctcttgtcaaagccccactaggcaatgccccagtaggaactctgtgtgggggcttcaaccccacattttccttccacattgcactagcagaggttctccatgagggccctgctcctgcagcaaacttctgtctgggcatccaggtgtttccatacatcttctgaaatctaggcagaggttcccaaacctcaattcttgacttctgtgcacccgcaggcttaataccatgtggaagctgccaagggttggggcttccacactctgaagccacagccagagctgtatattggcccctttcagccatggctggagtggctgggacacagggcaccaaatccctagactccagtctctttgctaaaacataacaagagtcacctttgctccggttcccaacaagttcctcatctccatctgagaccacctcagcctttatcttattgttcatatcactatcagaatttttgtcaaagccattcaacaaatctctaggaggttccaaactttcccacatttttgtgtcttcttctgagccctccaaactctcccagcctctgcacatgcctatccaggctcggatttcctcctttacttcaggccatacagatgattccactgtcctcttctctgttctcttgaaactgccactgcctgttccatcccaggctttctctcttaaacctggctccattgtgatgctgttaagttcctggtctgataatttcaatattccttccatatctgattctgatgcttgatctgtctcttcaaacttttgcttttttcttttagtaagtcttgtaagtttttcttgacagccaaacataatgtactggttttccaggcctactgtgcacaacagcattcctgtacctttaggctttcttatatctttcagctttctctccttactaagcaaataagatacatttagggaaggagggctaacaagaagacaggggcttccaatctgatttcctttctttggggtttcaaaccgtgtaacatccagactggagtgtctgacatagaggctttctggtatgttccatccattctgaggaccaacaacatgccaggttccaggctccaggctagggtatggagggggtgtgggctggtatactggtcctgtcccttgcttgagtcttccacgagccacttttcctctcctttgcattgatgtgctttgagtgtccatttcaatatctctaacattttcttttatgtgaatctgaattattttctttattcttaggaggttttctgcaggcat

SEQ ID NO: 5375 - DNA, 1116 bp, Homo sapiens
  SIMILAR (706)..(885): 601254mologous to Mus musculus HepA-related protein HARP,accession number AF209773,Smith-Waterman Score=213.
atgtgggaaagtttggaacctcctagagatttgttgaatggctgtgacaaaattgctgatagttatatgaacaataagatccaggctgaggtggtctcagatggagatgaggaacttgttgggaattggagcaaaggtgactcttgttatgttttagcgaagagactgacggcactttgcccctgccctagagatttgtggaactttgaacttgagagagatgagttagggtatctggcggaagaaatttctaagcagaaaaggattcaagaggtgacttgggtactgttaaaggcattccgttttaaaagggaaacagagcataaaagtttggaaaatttgcagcctgatgatgcagtagaaaagaaaaatctatttcttgaggagaaattcaagctggctgcagaaatttgcataagtagcaaggagcctaatgttaatccaaaagaccatggagaaaatgtctccaggccatgtcagagaccttcacagcagcccctcccatcacaggcctggaggcccaggaggaaaaaatggttttgtgggccaggcccaaggacttggtgtcttgtgtcccagccactccagccatggctgaaaggggccactgtagagcttgggctatggcttcagagggtggaagccccaagccttggcagtgtccatttgttattgagcctgcaggtgcacagaaatcaagaattgaggtgtatggtggctgatgaaatgggtctaggaaagacaatccaggcaattggaattacttacttctataaagaggaatggcctctgttaatagtggtcccttcgtctctgaggtacccttggacagaagaaattgaaaaatggatcccagagctaagtccagaagaaatcaatgttattcagaataaaactgatgttagttggatctcagactgctgtgctagcaatgagcgaggctctgtgggcggaggaccctccgagccagttaacaggagtttagagccacacctttccaatcttcttgtccttttctgcctagtagatcacaaagcagctattacggttccagatttggcatcattgcgtgatgcaggaagaaaggaagaagacaaaacgacatgtgctaactga

SEQ ID NO: 5376 - DNA, 337 bp, Homo sapiens
  SIMILAR (1)..(201): 351254mologous to Ciona intestinalis myoplasmin-C1,accession number D42167,Smith-Waterman Score=104.
ctgaagaaagcccttgatgaagctaacttcagatcagtggaagtgtcccggaccaaccgagagctgcgacagaaacttgcagagctagaaaaaatactagaaagtaacaaggagaaaataaagaatcaaaagacccaaattaagctccacttgtcagctaaggcgaataatgctcagaatatagaaaggatgaaggttgtatgggaaacctcttctcacttcctggatacccttgtcacattccggctccctatctgtcccttccgtgttgattgtactggactttgctcttttgggatcagtgggctagatgggaaagaaagctcagcaggaactg

SEQ ID NO: 5377 - DNA, 682 bp, Homo sapiens
  SIMILAR (29)..(556): 271254mologous to Corynebacterium glutamicum RXN02543,accession number AX066127,Smith-Waterman Score=104.
tgtcacattccggctccctatctgtcccttccgtgttgattgtactggactttgctcttttgggatcagtgggctagatgggaaagaaagctcagcaggaactgaaagagatgcagatgtggctaagagccaatatgatgcctcagtgcggaataaacagcaagagctgcacctagaagcagagcggaaaataaggcaggagctagagaatcggtgccaggaattggaagaaactgtcagacacctgaagaaatgtaaagaggcaacagagaatacgctgaaagaagccagtgtggaatcagaacagataacagctaatctggaagaagctcatcgctggtttaagcacaggtttgatggtctacaacttgagctgacaaaaaaccggttgcagaggccttctggggaagacaggtggcaggaaaagcccaaattgtggcatttgtgttttggaaaggctggtggctgtgaggaagacagaccaggggcaggagacagggaggctgctgcccaagtcccagaaattgatcatgaacacctgatggaagcagcagctgtgagaatcccaaacactctagaagaagtgaaaagaaatccaatcatcataaagactcctcaatacaccatcttcgtttatctgccaacgatgctgaagatagccttcgcatgcacagtactgtga

SEQ ID NO: 5378 - DNA, 782 bp, Homo sapiens
  SIMILAR (652)..(449): 301254mologous to Ciona intestinalis myoplasmin-C1,accession number D42167,Smith-Waterman Score=97.
gatattgatccttaattagctccatttgcttcaattctttttctatttgctaaaagtaattggaaaataacataaaaagatgatcagtggaaaaactggcttgctctttttgcctataggatgacagaaagaatccaatatgagacccaaagttaccagttcctgctgagctttctttcccatctagcccactgatcccaaaagagcaaagtccagtacaatcaacacggaagggacagatagggagccggaatgtgacactggcagcaaatgagaaatcaaacatttacacagcagtgactccactgaaaaagtctccccaaagacaactggctataattcccagagaatacatggggctggtacggttctaaaacctgtcttccctagacaccattgactgactacatcctcacagggtatccaggaagtgagaagaggtttcccatacaaccttcatcctttctatattctgagcattattcgccttagctgaccagtggagcttaattggggtctttgaatttttaattttctccttgtcactttctagtattttttctagctctgcaagtttctgtcgcagctctcggttggtccgggacacttccactgatctgaagttagcttcatcaagggctttcttcagcttaaaacacaagggagaaaattgaaacatttttactttccattaagagaagcttacttagttttgtccttatattttatcatctttggatcttcttttaaaaaggagaggttctagatcgcgagcggccgct

SEQ ID NO: 5379 - DNA, 600 bp, Homo sapiens
  SIMILAR (35)..(106): 701254mologous to Homo sapiens Ran-GTP binding protein; RanBP6,accession number AF039023,Smith-Waterman Score=92.
atggcggtgaccacgtccacaggggtgctggcgaacttgtcagaaaagcaaagagttttatcagcttctgaagaacctgatcaatccaagctgtatgacacacaggatgtggagaatatgaatgatgatgatggctggcaacatgtaaatcttggagaccaacagcgttttggaattaaaacttcaggacttgaagcaaaagtaactgcttgccagatgttggtttactatgctaaggagttaagggaagggtttgtgaactatacagaacaagttgtgaagctgatggttcctttactgaaattttatttccaagacaatgttcgagtggcagcagcagagtccatgccttttctcctggaatgtgcaagaatttgtggcccagagtatcttgcacagatgtggcaattcatacgtaaccccttaatcaaggctattggtactgaaccagatacagatgtgctctcagaaataatgaattcttttgcaaagttcactgaagttatgggagatgattgccttaatgatgaatacttggaagaactgggagggacactgagagcaaaacttgaagggcactttaaaaacgaagaattgtga

SEQ ID NO: 5380 - DNA, 3319 bp, Homo sapiens
  SIMILAR (3)..(3317): 1001254mologous to Homo sapiens Ran-GTP binding protein; RanBP6,accession number AF039023,Smith-Waterman Score=5715.
gcatgccggcaaccgcgtctgcaggggtgccggcgaccgtgtcagaaaagcaagagttttaccagcttctgaagaacctgatcaatccaagctgtatggtgcggaggcaagcagaggaaatctatgaaaatatcccaggtctgtgtaagactaccttcctcttagatgccgtcagaaatagaagagcaggttatgaggtgagacaaatggctgccgcactgctacgacggcttttgtcctctgggtttgaggaggtttatccaaatctgcctgctgatgttcagagagatgtcaagattgaactgattctggctgttaagttagaaacacatgctagcatgaggaaaaaactttgtgatatttttgcagtgctggccaggaatttgatagatgaggatggcactaaccactggccggaaggtctgaagtttcttattgattcaatctactccaaaaatgtggttctatgggaagttgcacttcacgttttctggcactttcctgggatttttgggacccaagagcggcatgatttggatatcatcaaacggttgttggaccagtgtattcaagatcaagaacatccagcaatcaggacgttatccgctagagctgcagctgcatttgtacttgctaatgagaataatattgctcttttcaaagactttgcagacttgcttcctggaatcttacaggctgtgaatgactcatgctaccaggatgatgattcagtgctagaatcccttgttgagattgcagataccgtacctaagtacttgggtccttatttagaagatactctacagttgagtttgaagttatgtggagactctaggcttagtaatctgcagcgccagctggccctcgaagttatagtgaccttgtctgaaactgccactccgatgttgaaaaaacatacaaatattattgcacaggcagttcctcatatattagcaatgatggttgatctacaagatgatgaggactgggtaaatgctgatgaaatggaagaagatgattttgacagcaatgcagttgctgcggagagtgcactagacagactggcttgtgggcttggtggaaaagttgttttaccaatgaccaaggagcatatcatgcagatgcttcagagccctgactggaagtatcgacatgctggattaatggccttatctgccattggagaaggatgccatcaacaaatggaatcaattctagatgaaacagttaactccgttttgctttttcttcaggatcctcatccaagggtgagggctgcagcctgtactacacttggacagatggctacagattttgcacctaatttccaaaagaaatttcatgaaacagtgattgcagctctgttacgtaccatggaaaatcaaggtaatcagcgtgtgcaatcacatgcagcttctgctcttattatttttattgaagactgccctaaatcattgctagttctatatgtggatagtatggtgaaaaatctacattccgtcttggtgattaaacttcaagagttgattcggaatggaactaagttggctttggaacaacttgtgacaaccattgcatcagttgcagatacaatagaagaaaaatttgtcccatattatgatatattcatgccctcactaaagcacattgttgagcttgctgttcagaaggaactcaagcttctgagaggaaaaactatcgagtgcattagccatattggtcttgctgttgggaaggaaaaatttatgcaagatgcatcaaatgtgatgcagctgttgttgaagacacaatcagacttaaataatatggaagatgatgaccctcagacctcttacatggtttcagcatgggctagaatgtgtaaaattcttggaaaagattttcaacagtaccttccactggttatcgagcctcttattaagactgcttcagctaaacctgatgttgctctcttagacacacaggatgtggaaaatatgagtgacgatgatggctggcaatttgtaaatcttggagaccagcagagttttggaattaaaacttcaggacttgaagcaaaagcaactgcttgccaaatgttggtttactatgctaaggagttaagggaagggtttgtggaatatacagaacaagttgtgaagctgatggttcctttactgaaattttatttccatgacaatgttcgagtggcagcagcagagtccatgccttttctcctggaatgtgcaagaattcgtggcccagagtatcttgcacagatgtggcaattcatatgtgaccccttaatcaaggctattggtactgaaccagatacagatgtgctctcagaaataatgaattcttttgcaaagtccattgaagttatgggagatggttgccttaatgatgaacacttggaagaactgggaggaatactgaaagcaaaacttgaagggcactttaaaaaccaagaattgagacaggtgaaaagacaggaagaaaactatgatcaacaggttgagatgtctctgcaagatgaggatgaatgtgatgtttatattctgaccaaagtatcagatattttgcactcattatttagtacttataaggaaaagattttaccatggtttgaacaactacttccattaattgtaaatctaatttgttcaagtaggccatggccagacagacagtggggattgtgcatatttgatgacatcatagagcactgcagtccaacttcatttaaatatgtagaatattttcggtggccaatgctactaaatatgcgagataacaaccctgaagtcaggcaagctgctgcttatggcctgggtgtcatggcacagtttggtggagatgattatcgttctttatgttcagaagctgttccactgctggtaaaagttattaagtgtgcaaattccaaaaccaaaaaaaatgtcattgctacagagaactgtatctcagcaatagggaagattttgaagtttaagcctaactgtgtaaatgtagatgaagttcttccacactggttatcatggcttccactgcatgaagataaagaggaagctattcagactttgagttttctctgtgacctaattgaaagtaaccacccagttgtaattggtccaaataattccaatcttcccaaaataatcagtataattgcagaaggaaaaattaatgagactattaactatgaggatccttgtgccaaacgcctagctaatgtcgtgcgtcaggtacagacttctgaagatttatggttggaatgtgtatcacaacttgatgatgaacagcaggaagccttacaggagttgctaaattttgctag

SEQ ID NO: 5381 - DNA, 615 bp, Homo sapiens
  SIMILAR (16)..(276): 271254mologous to Homo sapiens cofactor E,accession number U61232,Smith-Waterman Score=93.
atggatcaacctagtggaagaagtttcatgcaagtattatgtgaaaaatatagtcctgaaaattttccttatcgccgtggcccggggatgggagtccatgtcccagccacacctcagggctctcctatgaaagatcgcctcaacctcccaagtgtactagtgttgaacagctgtggaataacctgtgcaggagatgaaaaagaaattgctgctttctgcgctcatgtgtcggaactagatctttctgacaacaaactcgaagactggcatgagatgtacttgcccatttatggaaggtatcatgaactgatcactaaatatgggaagttggagcctttggcagaagtggacctaagaccccagagcagtgcaaaagtagaagtccactttaacgatcaggtggaagaaatgagcattcgtctggaccaaacagtggcagaactaaagaaacagttaaaaactctagtacaattacccacaagcaacatgcttctctactattttgaccatgaagcaccctttggcccagaggaaatgaagtacagctctcgggcattgcattcctttggcattagggatggagataaaatttacgtggaatccaaaacaaaataa

SEQ ID NO: 5382 - DNA, 521 bp, Homo sapiens
  SIMILAR (467)..(267): 311254mologous to Bordetella bronchiseptica pertactin (P.68),accession number AJ250092,Smith-Waterman Score=80.
tcgcatattttcccatatataaatctgctcctataactactgtatatgcacaaatacaatggaaataattatatttccctcaaacgtaaatctgtaaatacaaccacagcacatttaggtaccattagacatagagcaatatttcctagacatcagtctgtcagttagagccaccagtgcctccaaacagagagttatagagggagttataaataatctctccagatgtgaacggatcagtataactagatgtaaacatgactccaagccgttcctcctcctccttcttcttctttgtaagatattcctgaagcaagcccagtcatataacaggggggagaggtgtctgggtactggtattttttcccccaaggaggggcggaggtcgctggactttggggaaactgtgcaggagtgggtaggggaccaatgcccgctcccaacacagcccaaaagccccttccgtctgtctcctggtggctgagagctcgggcaagtggagaggcctggagaaaatgagg

SEQ ID NO: 5383 - DNA, 666 bp, Homo sapiens
  SIMILAR (184)..(339): 711254mologous to Homo sapiens bA504H3.1 (SNX5 (sorting nexin 5)),accession number AL121585,Smith-Waterman Score=181.
atggccccaccgcgatgtccccgtccccccgccccgcccccctccccgccacgcctctccctcagcagccagtgccgcactgagccctcgccccacgctaatgcgatatggagagacccggtacagctgttgggagctgcctctcccgccctcaatctccctgtctgtggttccagagggaagaagagtggggaaaaaaggatgaagagaattgtttcagtgctgggggaggaggtagatgacttctttgagcaagagaagaacttccttattaactatgacaataggatcaaagattcttgtgtgaaagctgacaaaatgaccagatctcataaaagccggccccggaccccggcccaggaccggcctgccgcgcggccgcctgagctgcgagctgaggaggcccgttggctgttcccgcaaagagtggggggcgcattttctctcctgccagcccgctccatcctggtcgtttattcccggccttccctcaccccccacccccacagcctgctgtacgaatatcttacaaagaagaagaaggaggaggaggaacggcttggagtcatgtttacatctagttctactgatccgttcacatctggagagattatttataactccctctataactctctgtttggaggcactggtggctctaactga

SEQ ID NO: 5384 - DNA, 576 bp, Homo sapiens
  SIMILAR (19)..(417): 901254mologous to Homo sapiens ribosomal protein S24,accession number M31520,Smith-Waterman Score=620.
agaagatagatcgccatcatgaacgacaccgtagctattcgcactagaaagttcatgaccaaccgactacttgagaggaaacaaatggtcattgatgtccttcaccccgggaaggcgacagtgcctaagacagaaattctggaaaaactagcccaaatgtacaagaccacaccggatgtcatctttgtatttggattcagaactcattgtggtggtggcaagacaactggctttggcatgatttatgattccctggattatgcggagaaaaatgaacccaaacatagacttgcccgacatggcctgtatgagaagaaaaagacctcatgaaagcaacgacaggaacgcacgaacagaatgaagaaagtcagggggactgcgaaggccaatgttgttgctggctaaaagccgaatgagtaaaggtgctgcaatgatgttagctgtggccactgtggatttttcgcaagaacattaataaactaatgacttcaaaacaaaagaagaaggcggccggttaaagggactcccagggggcccaattttgccgggctgagaccaaagagttttcccttatgg

SEQ ID NO: 5385 - DNA, 483 bp, Homo sapiens
  SIMILAR (61)..(81): 1001254mologous to Mus musculus ribosomal protein S24,accession number X60289,Smith-Waterman Score=39.
  misc_feature (1)...(483): n = a,t,c or g
nnaaggccggccgnctgnnnnngggaaactttagnaacgacggnccaattnntnattnnnggnggnggcaagacaactgggctttggcatgatttatgaattgcctggattatgcaaagaaaaatgaacccaaacatagacgtgcaagacatggcctgtatgagaagaaaaagacctcaagaaagcaacgaaaggaacgcaagaacagaatgaagaaagtcagggggactgcaaaggccaatgttggtgctggcaaaaagtgagctggagattggatcacagccgaaggagtaaaggtgctgcaatgatgttagctgtggccactgtggatttttcgcaagaacattaataaactaaaaacttcnnnnnnnnnnnnnnnnnnnnnnnnnnnnnnnnnnnngggggggccctttaatttaaagggcccctttaaaccccgggaaaaaccctgggggggttttttatttggcccccttttttgtg

SEQ ID NO: 5386 - DNA, 669 bp, Homo sapiens
  SIMILAR (91)..(516): 371254mologous to Xenopus laevis ribsomal protein S19,accession number V01443,Smith-Waterman Score=103.
gactcccgggtcgactactactactaaatttccgacagcgtcgacgtctgaagatagatcgcccatcatgaacgactaccgtaactatcccgcactaagaaaagttcatgacccaaccgacttacttcaggggaaaccaaatggtcatttgatgtcctttcaccccccgggaagggcgaccagtgccctaagcacagaaaattcgggaaaaaactagcccaaaatgtaccaagacccacaccggattgtcatctttgtattttggattcagaacttcatttttggtggtggcaagacaacttggcttttggcatgatttatggattccctgggatttatgcaaaagaaaaaatgaacccagaccatagactttgcaaggacatgggccttgtattgaggaaggaaaaaggaccttcaaggaaagccaacggaaagggaacggcaaggaaccggattggaaggaaagttccaggggggactggcaaagggcccaatgttgggtgctgggcaaaaagaagaaatgaagtgtctagcagttgagctggagattggttcacagcccgaaggagttaaaaggtgctgcaatgatgttagctgtggcccctgtggatttttcgcaagaacattaataaactaaaaacttcaaaaaaaaaaaaaaaaaaactcgga

SEQ ID NO: 5387 - DNA, 2197 bp, Homo sapiens
  SIMILAR (1556)..(2188): 841254mologous to Homo sapiens requiem homolog,accession number U94585,Smith-Waterman Score=957.
gcaaggggactgtccatggggcactgattccctcacacttccagtgtgcactcgcttgaatgccagccccgggacgcggcccgccaccgccgctgccgccagcccagacgcgccgcccgcatgcgcagcgaccatggagcgccccgaagcgggactcagggtagcaccgagaagcccggtgcaaccggggtgtacatcagtgctgcctgtagcgaagcgttttaatgcacgcattctgtggctcaaaaggccccagcgacagctctggtcactttggagagcacaagccactgtaagccttgggggcttccatgtgatgttaagcctgcaggtgcacagaataaatgcaagagtgaaggaggcatggcagcttccacctagatttcagatgatgtaccagaaagcctgggtgctcaggcagaagcctgctgcagcagtggagccctcacagagaaactctcctagggcaatgctggggggaaatgtgggattggagcccccacccagagtctccaccagggcactgcctagtggagctgtgggaagggggctgccaccttccagacccaagaatgatacagccactggcagcttacaccctgagcttggaaaagctgcagacattcaattccatcctgtgagagcagccacaggggcttcaccttgcaaatccatagggacagaactgcctaaggctttgggagcccatgtcttgctccagtgtgccctggatgtgggacatggagttgaaggagagctttggagctttaagacccggcaaccatccgatttctcaattttttccccacccttcccgcctttctattccacaaaaccgccattgtcatcatggcccatccccaatgagccgctgggcacacctcccagacggggtcgtggcggggcagaggggctcctcacttcccagtgtagccatattcttaatggactatgttttacaggaggaattaattccaatgagtgtgaaaatgtatcaagaaaaaagaaaatgtcagaggaatttgaagccaatactatggattctctggtagacatgccatttgctactgtagatattcaggatgactgtggaattttctttgacgtgtggaaattgcgagttaactgccaagaaattcttgctaatagacaccctggcagagcaatgaggaaagtagtgctaacaaaaacatcatgggaaggggaatccttggcagtaggaaaactccccttgaaacggttagtgtctctcgattgtcagctgcgttgccttcagtgcgaatgtggtatcttgattaggcagcatgtggtctggttggagagaacaacaggtcactggcacccaagaagttctcaaagttgcaggctcaatacaacaagcacagcgctagaacactgcaatgcctttatttacaacacagtctgttcccacaaactgaaggaccactcccatgacaatggaaaatcttcaggttttctgaatccggtggctgcccctcactcctgcattgtcatggggcacctaactttgctcatcaccacttcttattacactccactcaccaagccagacacagaccccaccctgaagaaggaggggctgatctctcaggacagcagcagtttagaggttctgttgcacactgaccccctggggaagcgaggtaccccagatccccgagttgatgatgacagcctgggcaagtttcctgtgacaaacagtcaagcacgaaagcggatcctagaaccagatgacttcctggatgacctcgatgatgagtactgtgaagatgctcccaagcatcggggaaaggggtgtggcagtgcccataaggagctggatgcttccaacctggaggaccaggataagccctatgcctgtgacatttgtggaaaacgttacaagaaccgaccaggcctcagttaccactatgcccactctcacttggctgaggagggcgaggacaaagaagactcccaaccacccactcctgtttcccagaggtctgaggaacagaaatccaaaaagggtcctgatggatttgccttgcccaacaactactgtaacttctgcctggggaactcaaagattaacaagaagatgggacaacctgaggaggtggtgtcctgtttcgactgtggctgctcagggcatccatcttgcctccatttcacccccatgatgatggggcagtga

SEQ ID NO: 5388 - DNA, 652 bp, Homo sapiens
  SIMILAR (7)..(318): 981254mologous to Homo sapiens FKSG65,accession number AF338193,Smith-Waterman Score=550.
ttttcgcccttaatccatttaatcctgagtggacacagcacatgtttcagagagcacagggttgggggtaaggtcacagatcaacaggatcccaaggcagaggaatttttcttagtgcagaacaaaatgaaaagtctcccatgtctacttctttctacacagacacggcaaccatccgatttctcaatcttttccccacctttcccgcctttctattccacaaagccgccattgtcatcctggcccgttctcaatgagctgttgggcacacctcccagacggggtggtggccgggcagaggggctcctcacttcccagtaggggcggccgggcagaggcgccccctcacctcccagaagaggcggctggccgggcggggggctgaccccccaacctccctcccggacagggcggctggccgggcggggtgctgatccccccacctccctcccggacggggcggctggccgggcggggggctgaccccaccacctccctcccggacggggcggctggcccggcagaggggctcctcacttcccagtaggggtggctgggcagaggcgcttgtttatctgctgaccttccctccactattgtcccatgaccctgccaaatccccctctgtgagaaacacccaagaattatcaat

SEQ ID NO: 5389 - DNA, 817 bp, Homo sapiens
  SIMILAR (221)..(592): 1001254mologous to Homo sapiens FKSG69,accession number AF338197,Smith-Waterman Score=673.
ttttttttttaattttaatttttaatttttaattttttatttttattgatcattcttgggtgtttctcgcacagggggatttggcagggtcataggacaatagtggagggaaggtcagcagataaacaagtgaacaaaggtctctggttttcctaggcagaggaccctgcggccttccgcaatgtttgtgtccctgggtacttaagattagggagtggtgatgactcttaacgagcatgctgccttcaagcatctgtttaacaaagcacatcttgcaccgcccttaatccatttaaccctgagtggacacagcacatgtttcagagagcacagggttggggataaggtcacagatcaacaggatcccaaggcagaagaatttttcttagtacagaacaaaatgaaaagtctcccatgtctacttctatccacacagaccccgcaaccatccgatttctcaattttttccccacccttcccgcctttctattccacaaaaccgccattgtcatcatggcccatccccaatgagccgctgggcacacctcccagacggggtcgtggccgggcagaggggctcctcacttcccagaaactttcaatcatggcagaaggtggaagggaagcaggcatgtcttcacatggcctgagcaggagagagaatggggaagcgctacacacttttaaacaacaagatcttgtgagaactcactcactatcacgagaacagcaaggggaaatccgctcccatgatccaatcacctcccaccaggcccctcctccaacactggagattaaaattcgacttgagatttgg

SEQ ID NO: 5390 - DNA, 657 bp, Homo sapiens
  SIMILAR (412)..(624): 971254mologous to Xenopus laevis bicaudal-C,accession number AF224746,Smith-Waterman Score=360.
atgatgagtaatcggaggtgcaaggaaaatagagacctgaaggtgcagcgcctgtttcaacaggaccggggcaaccggggctctggacagatgtgttctggtgactgccagtctgggagcacgacactaacgccgggagaggaatgtaactggcaagaggaggcgacgacactcagtgtgtcgttgccagacgaactccaagacctcagcatcgcactcgcggtgatcgcccaccgtcaccgcgtggagtatactctaacataccacgcatactgggctaccagatccggaacgggagtgcgacggcactgtgggaacttccgcaagatttcgctaatgaacgacccgcaactgccgcattacaccttacgtcattcatatgacgcgcgtacagaccggcgggcactctcgagcaatcaagtcacactgaagatggatgtttcacatacagaacattcacatgtaatcggcaaaggtggcaacaatattaaaaaagtgatggaagaaaccggatgccatatccactttccagattccaacaggaataaccaagcagaaaaaagcaaccaggtatctatagcgggacaaccagcaggagtagaatctgcccgagttagaattcgggtaactatttattactttaacattgtaaattga

SEQ ID NO: 5391 - DNA, 429 bp, Homo sapiens
  SIMILAR (117)..(28): 531254mologous to Homo sapiens Human secreted protein, SEQ ID NO: 7077,accession number G02996,Smith-Waterman Score=81.
atgaggtttaaggaaagaagttgtctacacaacatagaagtacaaagtgaagcaggaagtagtgatggagaagctgcagcaagtgatctagaagctctagctaaaatcattgatgaaggctatacagctggtggctccaaaaaagacccactcactccatttaaggagagaagaaggaagaataaagaggactctgggatcttggataccagctcagccacagcaggacatcaaagaacatctactagcatcaacaccatcctggaaaacatgacctcaccaaatgaaatagataaggcaccagggaccaattctggagaaacagagatatgtgacttttcagacagagaattcaaaatggctgtgctgaggaaagtcaaagaaattcaagataacacagagaaggaattcagaatcctatctgattag

SEQ ID NO: 5392 - DNA, 842 bp, Homo sapiens
  SIMILAR (337)..(441): 571254mologous to Homo sapiens FIC1,accession number AF038007,Smith-Waterman Score=113.
atgttcgctggagtgctgtcagctggtaatgatgaatttagagtgatgctaaatatgctggcctgtacaactttctccagcaaagctgagctatttgagtacagacatggagaagcctcagcctatacccccaactgcccaagaaagtatgcccaaccagtaccaccaggagtgggactgcccctaaagtcaaactgtgtccattgtgggagaattacccatcccaagaaagcgttgcgagatcggcatctgggatgcccagaaaagatccctcgactcactggtccctgggccacgatcagtgtgcctactataagcaaaaaggccactggcaatcacagcatcctaaccatccccgggccagataccaaattaatgcagaatagtggaaagtccacttttaaacgaacacagatagaccatctcatgaatgtccttgtactctggtggtccacagaacgttggaccaactacggcataaaagctctacatcggggggcaagactcatggttgacactggggtctttatcaaaatctccctggattaaatggtcctagtttactaatgtccagtctgaggagagtcaggagggacagaagtacttttctgaagtagagagctgtctttgacttggcaagaccccacagggtataacaaggcaagcattaaatgcaatagtttgaggtgaaattgacttggctatgttaataactagatggtcagcaatagcgcgaggaacgaaagatgagtaatagaatagatgaaaagagatttttcgtatctttagtttggcaggggtttcctctgggactgtggcccatgactctggagggggtggcc

SEQ ID NO: 5393 - DNA, 462 bp, Homo sapiens
  SIMILAR (49)..(300): 641254mologous to Homo sapiens dJ756G23.3 (novel protein similar to drosophila transcriptional repressor),accession number AL035681,Smith-Waterman Score=271.
atggggaagtttgtcttagttttaaaaagggggggcagcctggccaaggatgttccaaatcacggatttcgtgtaggaatgaaattagaagcagtagatctcatggagccacgtttaatatgtgtagccacagtaactcgaattattcatcgtctcttgaggatacattttgatggatgggaagaagagtatgatcagtgggtagactgtggggtgcggaggagcttctctggtgacgaagagttgactcctcctccatatcgaacccttccagcacagacagccccggaggccttcccacctcccagcactagccgagagttcagtcccagcctcaaaacagtgacaacactgcagctgaaggaggagttgctggatggagaggattataatttccttcaaggagcgtctgatcaggaaagcaatggctctgccaacttctacatcaaacaagagccatga

SEQ ID NO: 5394 - DNA, 478 bp, Homo sapiens; identical to SEQ ID NO: 3840
  SIMILAR (1)..(258): 951254mologous to Homo sapiens putative p150,accession number U93563,Smith-Waterman Score=429.
  misc_feature (1)...(478): n = a,t,c or g

SEQ ID NO: 5395 - DNA, 1251 bp, Homo sapiens
  SIMILAR (154)..(1245): 961254mologous to Homo sapiens putative p150,accession number U93563,Smith-Waterman Score=1846.
atgaagccacagaccctcgcagtgagtgttacagttcttgaagatggtgtgtccagactttgttccttcagatgttcagatgtgtcaggagttttttccttccagtgggttcgtggtctcgctgacttcacaagtgaagctgcagacctttgcatgttggaagttctggccagggcaattaggcaggagaaggaaataaagggtattcaattaggaaaagaggaagtcaaattgtccctgtttgcagatgacatgattgtatatctagaaaaccccattgtctcagcccaaaatctccttaagctgataagcaacttcagcaaagtctcaggatacaaaatcaatgtacaaaaatcacaagcattcttatacaccaacaacagacaaacagagagccaaatcatgagtgaactcccattcacaattgcttcaaagagaataaaatacctaggaatccaacttacaagggaggtgaaggacctcttcaaggagaactacaaaccactgctcaaggaaataaaagaggatacaaacaaatggaagaacattccatgttcatgggtaggaagaatcaatatcgtgaaaatggccatactgcccaagttcatttacagattcaatgccatccccatcaagctaccaatgactttcttcacagaattggaaaaaactactttaaagttcatatggaatcaaaaaagaccccgcattgccaagtcaatcctaagccaaaagaacaaagctggagcaatcacactacctgacttcaaactatactacaaggctacagtaaccaaaacagcatggtactggtaccaaaacagagatatagatcaatggaacagaatagagccctcagaaataacgctgcatacctacaactatctgatctttgaaaaacctgagaaaaacaagcaatggggaaaggattccctatttaataaatggtgctgggaaaactggctagccatatgtaggaagctgaaactggatcccttccttacaccttatacaaaaatcaattcaagatggattaaagatttaaacgttagacctaaaaccataaaaaccctagaagaaaacctaggcattaccattcaggacataggcatgggcaaggacttcatgtccaaaacaccaaaagcaatggcaacaaaagacaaaattgacaaatgggatctaattaaactaaagagcttctgcacagcaaaagaaactaccatcagagtgaacaggcaacctacaaaatga

SEQ ID NO: 5396 - DNA, 1260 bp, Homo sapiens
  SIMILAR (239)..(322): 751254mologous to Homo sapiens putative p150,accession number U93574,Smith-Waterman Score=105.
atgggcactgtctggctggatcagaagtgcagtggacaccctgctggatctggaggggtggaagtcagccgtgggtctgtgatggcagcaaacagcagtggtggatggtgggctgaaacgactgagtctactgaactgcagagatggcgactgcccttccccccaggaacctggtcccaactcaggcagattccagcctgctgccaccgactggctggaattccaagccaggagacggatgaagttgaaagccatcattctcagcaaactaacacaggaacagaaaaccaaacaccacatgttctcactcataagtgggagttgaaaaatgagaatacatggacacaaggaggggaacatcattcaccggggcctgtcgagggagtttccatgccaacagagagccaaatcatgagtgaactcccattcacaattgcttcaaagagaattaaatacttaggaatccaacttacaagggatgtgaaggacctcttcaaggagaactacaaaccactgctcaatgaaataaaagaggatacaaacaaatggaagaacattccatgctcatgggtaggaagaatcaatattgtgaaaatggccatactgcccaagggaatttatagattcaatgccatccccatcaagctaccaatgactttcttcacagaattggaaaaaactactttaaagttcatatggaaccaaaaaagagcccgcatcgccaagtcaatcctaagccaaaagaacaaagctggaggcatcacactacctaacttcaaactgtactacaaggctacagtaaccaaaacagcatggtactggtaccaaaacagagatatagatcaatggaaaagaacagagccctcagaaataatgccacatatctacaactatctgatctttgacaaacctgagaaagacaagcaatggggaaaggattccctatttaataaatggtgctgggaaaactggctagccatatgtagaaagctgaaactggatcccttccttacaccttatactaaaattaattcaagatggattaaagacttaaatgttaggtttaaaaccataaaaaccctagaagaaaacctaggcattaccatgcgggacataggcatgggcaaggacttcatgtctaaaacaccaaaagcaatggcaacaaaagccaaaattgacaaatgggatctaattaaactaaagtgcttctgtacagcaaaagaaactaccatcagagtgaacaggcaacctacaaaatga

SEQ ID NO: 5397 - DNA, 1659 bp, Homo sapiens
  SIMILAR (1589)..(1657): 911254mologous to Homo sapiens putative p150,accession number U93574,Smith-Waterman Score=102.
atgggagactttaacaccccactgtcaacattagacagatcaacgagacagaaagtcaacaaggatacccaggaattgaactcagctctgcaccaagcggacctaatagacatctacagaagtctccacgccaaatcaacagaatatacatttttttcagcaccacaccacacctattccaaaattgaccacatacttggaagtaaagctctcctcagcaaatgtaaaagaacagagattataacaaactatctctcagaccacagtgcaatcaaactagaactcagaattaagaatctcactcaaaaccgctcaactacatggaaactgaacaacctgctcctgaatgactactggatacatgacgaaatgaaggcagaaataaagatgttctttgaaaccaacgagaacaaagacacaacataccagaatctctgggatgcattcaaagcaaccgctagcaagactaataaagaaaaagagaagaatcaaatagacacaataaaaaatgataaaggggatatcaccaccgatcccacagaaatacaaactaccatcagagaatactacaaacacctctatgcaaataaactagaaaatctagaagaaatggataaattcctcgacacatacactctcccaagactaaaccaggaagaagttgaatctctgaatagaccaataacaggagctgaaattgtggcaataatcaatagtttaccaaccaaaaagagtccaggaccagatggattcacagccgaattctaccagaggtacaaggaggaactgcatataaacagagccaaagacaaaaaccacatgattatctcaatagatgcagaaaaggcctttgacaaaattcaacaacccttcatgctaaaaactctcaataaattaggtattgatgggacgtatttcaaaataataagagctatctatgacaaacccacagccaatatcatactaaatgggcaaaaactggaagcattccctttgaaaactggcacaagacagggatgccctctctcaccactcctattcaacatagtgttggaagttctggccagggcaattaggcaggagaaggaaataaagggtattcaattaggaaaagaggaagtcaaattgtccctgttcgcagacgacatgactgtatatctagaaaaccccattgtctcagcccaaaatctccttaagctgataagcaacttcagcaaagtctcaggatacaaaatcaacgtgcaaaaatcacaagcattcttatacaccaacaacagacaaacagagagccaaatcatgagtgaactcccattcacaattgcttcaaagagaataaaatacctaggaatccaacttacaagggatgtgaaggacctcttcaaggagaactacaaaccactgctcaaggaaataaaagaggatacaaacaaatggaagaacattccatgctcatgggtaggaagaatcaatatcatgaaaatggccatactgcccaaggtaatttacagattcaatgccatccccataaagctaccaatgactttcttcacagaattggaaaaaactactttaaagttcatatggaaccaaaaaaagagcccgcatcgccaaggcaatcctaagccaaaagaacgaagctggaggcatcacactacctga

SEQ ID NO: 5398 - DNA, 1719 bp, Homo sapiens
  SIMILAR (1523)..(1717): 961254mologous to Homo sapiens putative p150,accession number U93569,Smith-Waterman Score=317.
  misc_feature (1)...(1719): n = a,t,c or g
atgcacaatacagatggaaacagatttctgagccactggggctaccgtcaagctctctccatctccaagccagcaagtgcttctttgcaccccagctctaaaacaaagcccttggggacacaatcaaagacagtagttgccaagaggaatagggagcatggaaagaaggaacgcagttcctcaccagcaatggaacaaagctggatggagaatgattttgacgagctgagagaagaaggcttcagacgatcaaattactctgagctacgggaggacattcaaaccaaaggcaaagaagttgaaaactttgaaaaaaatttagaagaatgtataactagaataaccaatacagagaagtgcttaaaggagctgatggagctgaaaaccaaggctcgagaactacgtgaagaatgcagaagcctcaggagccgatgcgatcaactggaagaaaggagaaagcaggaaagatccaaaattgacaccctaacatcacaattaaaagaactagaaaagcaagagcaaacacattcaaaagctggcagaaggcaagaaataactaaaatcagagcagaactgaaggaaatagagacacaaaaaacccttcaaaaaatcaatgaatccaggagctggttttttgaaaggatcaacaaaattgatagaccgctagcaagactaataaagaaaaaaagagagaagaatcaaatagacacaataaaaaatgataaaggggatatcaccaccgatcccacagaaatacaaactaccatcagagaatactacaaacacctctacgcaaataaactagaaaatctagaagaaatggatacattcctcgacacatacactctcccaagactaaaccaggaagaagttgaatctctgaatagaccaataacaggctctgaaattgtggcaataatcaatagtttaccaaccaaaaagagtccaggaccagatggattcacagccgaattctaccagaggtacaaggaggaactgcatataaacagagccaaagacaaaaaccacatgattatctcaatagatgcagaaaaagcctttgacaaaattcaacaacccttcatgctaaaaactctcaataaattagtgttggaagttctggccagggcaatcaggcaggagaaggaaataaagggtattcaattaggaaaagaggaagtcaaattgtccctgtttgcagacgacatgatcgtttatctagaaaaccccatcgtctcagcccaaaatctccttaagctgttaagcaacttcagcaaagtctcaggatacaaaatcaatgtacaaaaatcacaagcattcttatacaccaacaacagacaaacagagagccaaatcatgagtgaactcccattcacaattgcttcaaagagaataaaatacctaggaatccaacttacaagggatgtgaagcacctcttcaaggagaactacaaaccactgctcaaggaaataaaagaggacacaaacaaatggaagaacattccatgctcatgggtagngaagaatcaatatcgtgaaaatggccatactgcccaaggtaatttacagattcaatgccgtccccatcaagctaccaatgactttcttcacagaattggaaaaaactactttaaagttcatatggaaccaaaaaagagcctgcatcgccaagtcaatcctaagccaaaagaacaaagctggaggcatcacactacctga

SEQ ID NO: 5399 - DNA, 1020 bp, Homo sapiens
  SIMILAR (993)..(1019): 1001254mologous to Homo sapiens putative p150,accession number U93563,Smith-Waterman Score=52.
atgaggaggaaaatggtacaaaataagattggagagctagacagaaagggggaggaggaggaggaggaggaagttggtgatggtgatgatgacgatgatgctgctgatgttattgcagtagacggggttttggacatgaatggagctgaaagcctttatcatcagccaattaatgcaggaacagaaaacccaacactgcatgttctcacttataagtgggagctgaatgatgagaacacatggacacatggttggggcaggcatataaacggaaccaaagacaaaaaccacatgattatctcaatcgatgcagaaaaggcctttgacaaaattcaacaacgcttcatgctaaaaactctcaataaatttggtattgatgggacgtatctcaaaataataagagatgacatgattgtatatctagaaaaccccatcgtctcagcccaaaatctccttaagctgataagcaacttcagcaaagtctcaggatacaaaatcaatgtacaaaaatcacaagcattcttatacacaaataacagacaaacagagagccaaatcatgagtgaactcccattcacaattgcttcaaagaggataaaatacctaggaatccaacttacaagggatgtgaaggacctcttcaaggagaactacaaaccacttctcaatgaaataaaagaggatacaaacaaatggaagaacattccatgctcatgggtaggaagaatcaatatcgtgaaaattgccatactgcccaaggtaatttatagattcaatgccatccccatcaagctaccaatgactttcttcacagaattggaaaaaacttctttaaagttcatatggaaccaaaaaagagccctcatcaccaagtcaatcctaagcctaaagaacaaagctggaggcatcatgctacctgacttcaaactatactacaaggctacagtaaccaaaacagcatggtactggtaccaaaacagagatatagatcatggaacagaacagagccctcagaaataa

SEQ ID NO: 5400 - DNA, 1665 bp, Homo sapiens
  SIMILAR (466)..(1335): 951254mologous to Homo sapiens putative p150,accession number U93572,Smith-Waterman Score=1501.
atggataaatttctcgacacatacactctcccaagactaaaccaggaagaagttgaatctctgaatagaccaataacaggagctgaaattgtggcaataatcaatagcttaccaaccaaaaagagtccaggaccagatggattcacagctgaattctaccagaggctgataagcaacttcagcaaagtctcaggatacaggatcaatgtacaagaatctacaagcattcttatacaccatcaacagacaaacagagagccaaatcatgagtgcactcccactcacaattgcttcaaagagaataaaatacctaggaatccaacttacaagggatgtgaaggacctcttcaaggagaactacaaaccactgctcaacgaaataaaagaggatacaaacaaatggaagaacattccatgctcatgggtaggaagaatcaatatcgtgaaaatggccatactgcccaagaattggaagaaactactttaaagttcatatggaaccaaaaaagagcccgcatcgccaagtcaatcctaagccaaaagaacaaagctggaggcatcacgctacctgacttcaaactatactacaaggctacagtaaccaaaacagcatggtactggtaccaaaacagagatagagaccaatggaacagaacagagccctcagaaataatgccacatatctacaactatctgatctttgacaagcctgagaaaaacaagcaatggggaaaggattccctatttaataaatggtgctgggaaaactggctagccatatgtagaaagctgaaactggatcccttccttacaccttacacaagaattaattcaagatggattaaagacttacatgttagacgtaaaaccataaaaaccctagaagaaaacctaggcaataccattcaagacataggcatgggcaaggacttcatgtctaaaacaccaaaagccatggcaacaaaagccaaaattgacaaatgggatctaattaaactcaagagcttctgcacagcaaaagaaactaccatcagagtgaacaggcaacctacaaaatgggagaaaatttttgcaacctactcatctgacaaagggctaatatccagaatctacaatgaactcaaacaaatttacaagaaaaaaacaaacaaccccatcaaaaagtgggcgaaggatatgaacagacacttctcaaaagaagacatttatgcagccaaaaaacacatgaaaaaatgctcatcatcactggccatcagagaaatgcaaatcaaaaccacaatgagataccatctcacaccagttagaatggcgatcattaaaaagtcaggaaacaacagtggcacctggaactccagagagacagaaccattcactctcctggaaagggagctgaagccaggagccaagtggtcttgctcagtggatcccacttccatggagcccagcaagctaagacccactggcttgaaattcttgctgccagcacagctgtctgaagtcgacctgggatgctcaggcttgtgcaaggaagctaagaaccttgataaaaggttacaggaactgccaactagaatagctagtttagagaaaaagaaaagtgacctgatggaactgaaaaacacagcacgagaacttcgtgaagcatacacaagtatcaatagctga

SEQ ID NO: 5401 - DNA, 987 bp, Homo sapiens; identical to SEQ ID NO: 1325
  SIMILAR (1)..(360): 891254mologous to Homo sapiens 08-APR-1996 ATM mutant G9170C coding sequence,accession number T68784_cd1,Smith-Waterman Score= 558.

SEQ ID NO: 5402 - DNA, 1566 bp, Homo sapiens
  SIMILAR (403)..(1218): 891254mologous to Homo sapiens putative p150,accession number U93569,Smith-Waterman Score=1216.
atgagtgaactcccattcacaattgcttcaaagagaataaaatacctaggaatccaacttacaagggatgtgaaggacctcttcaaggagaactacaaaccactgctcaatgaaattaaagaggatacaaacaaatggaagaacattccatgctcatgggtaggaagaatcaatatcgtgaaaatggccatactgcccaagatgcttcttcacaaatattctagctacagaaactgtgaatcaaatattctttctcctaataaaagtatccaatgcaatgccaaagaaaacttactgaatgaagataattactgtgcaaaaatggttttcattcttccctttgcatttgaaaatcggaagatccaagattactcagccaatgtgatgattcatttgagaccaccacatcacacttattccaaaattgaccacatagttgggagtaaagcactcctcagcaaatgtaaaagaacagaaattataacaaactgtctctcagaccacagtgcaatcaaactagaactcagaattaagaaactcactcaaaactgctcaactacattgaaactgaacaacctgctcctgaatgactactgggtacataataaaatgaaggcagaaataaagacgttctttgaaaccaatgagagcaaagacacaacacagcagaatgtctgggacacattcaaagcagtgtgtagagggaaatttatagcactaaatgcccataagagaaagcaggaaagatctaaaattgccaccctaacatcacaattaaaagaactagagaagcaagagcaaacacattctaaagctggaaggcaagaaataactaagatcagagcagaactgaaggagatagagacacgaaaaacccttcaaaaaatcaatgaatccaggagctggttttttgaaaagatcaacaaaatccatagactgctagcaagactaataaagaagaaaagagagaagaatcaaatagatgcaataaaaaatgataagggggatatcaccacagatcccacagaaatacaaactaccatcagaggatactataaacaccactacacaaataaactagaaaatctagaagaaatgcataaattcctggacatgtacaccctcccaagactaaaccaggaagaagttgaatctctgaatagaccaataataggttctgaaattgaggcaataattaatggcctaacaaccaaaaaaaagtccaggaccagacggattctcagcagaattctaccagagagaataaaatacctaggaatccaacttacaaaggatgtgaaggatctcttcaaggagaactacaaaccactgctcaatgaaataaaagaggacacaaacaaatggaagaacattccatgctcatggacaggaatcatcaatattgtgaaaatggccatagtgccgaagtctctcacaatgcttccattggtcatcggtagtctgggagcaagggagcccgaagttactgagtccatagaattcagtctctcaactcacagaatatgttcaaacagagaactgccagcacaaaatgcaaagcactaa

SEQ ID NO: 5403 - DNA, 1452 bp, Homo sapiens
  SIMILAR (262)..(1446): 941254mologous to Homo sapiens putative p150,accession number U93563,Smith-Waterman Score=1951.
atggagctgaaagacaaggctcgagaactacgtgaagaatgcagaagcctcaggagcagatgcgatcagctggaagaaaaggtatcagtgatggaagatgaaattaatgaaatgaaactaaatcaggaagaagttgaatctctgaatagaccaataacaggctctgaaattgtggcagtaatcaacagctcaccaaccaaaaagagtccaggaccagatggattcacagccaaattctaccagaggtacaaggaggaactgcatataaacagagccaaagacaaaaaccacatgattatctcaatagatgtagaaaaggcctttgacaaaattcaacaacccttcatgctaaaaactctcaataaattaggtattgatgggacatatctcaaaataataagaactatctatgacaaactcacagccaatatcatactgaatgggcaaaaactggaagcattccctttgaaaactggcacaagacagggatgccctctctcatcactcccattcaacatagtgttggaagttctggccagggcaattaggcaggagaaggaaataaagggtattcaattaggaaaagaggaagtcaaattgtccctgtttgtagacgacatgattgtatatctagaaaaccccattgtctcagcccaaaatctccttaagctgataagcaatttcagcaaagtctcaggacacaaaatcaatgtacaaaactcacaagcattcttatacaccaataacagacaaacagagagccaaatcatgagtgaactcccattcacaattgcttcaaagagaataaaatacctaggaatccaacttacaagggatgtgaaggacctcttcaaggagaactacaaaccactgctcaatgaaataaaagaggatataaacaactggaagaacattccatgctcatgggtaggaagaatcaatatcgtgaaaatggacatactgcccaaggtaatttatagacccaatgccatccccatcaagctaccaaggactttcttcacagaattggaaaaaactactttaaacttcatatggaaccaaaaaagagcctgcattgccaagtcaatcctaagccaaaagaacaaagctggaggcatcatgctacctgacttcaaactatactacaaggctacagtaaccaaaacagcatggtactggtaccaaaacagagatatagatcaatggaacagaacagagccctcagaagtaacgctgcatatctacaactatctgatctttgacaaacctgagaaaaacaagcaatggggaaaggactccctatttaataaatggtgctgggaaaactggctagccatatgtagaaagctgaaactggatcccttccttacaccttatacaaaaattaattcaaaatggattaaagacttaaacgttacacctaaaaccataaaaaccctagaagaaacctag

SEQ ID NO: 5404 - DNA, 1605 bp, Homo sapiens
  SIMILAR (1581)..(1604): 871254mologous to Homo sapiens putative p150,accession number U93574,Smith-Waterman Score=43.
atgatccacaatcgagagaaaaaaacagtcaatggagttaaattcccagataatccagttccttatgtggaagaaagggattttctgctgactacttatgtctacaaaaggacatccaggcttttctcacaaaagctcagaaacaatggagaactgggtagagacaagggcaaatattcaaaagtgggggagaagatcaggaacagatcaacagaggggccacagggactctgggcagcccacattaaatgtagagaagttcatgaaaaagatcatttaaaagttctgttcaaaaagcgacctcatcgccagagaggggatgaagtatttattcgcgataagctcatggagcggcgtaaccgtcgcacaggaaggacagagaaagcgcggatctgggaagtgacggacagaacggtcaggacctggattggggaggcggttgccgccgctgctgctgacggtgtgacgttctctgttccggtcacaccacatacgttccgccattcctatgcgatgcacatgctgtatgccggtataccgctgaaagttctgcaaagcctgatgggacataagtccatcagttcaacggaagtctacacgaaggtttttgcgctggatgtggctgcccggcaccggagaataaaatacctaggaatccaacttacaagggatgtgaaggacctcttcaagcagaactacaaaccacggctcaaggaaataaaagaggatacaaacaaatggaagaacattccatgctcatgggtagaaagaatctatatcgtgaaaatggccatactgcccaaggagctttatgaacatatgaatagttccttgggaggtgcttcattagaaggatcccaagtatatcttgtgttggaagttctggccagggcaattaggcaggagaaggaaataaagagtattcaattaggaaaagaggaagcgaaattgtccctgtttgcagacaaaatgattgtatatctagaaaaccccattgtctcagcccaaaatctccttaagctgataagcaacttcagcaaagtctcaggatacaaaatcaatgtacaaaaatcacaagcattcttatacaccaacaacagacaaacagagagccaaatcatgagtgaactcccattcacaattgcttcaaagagaataaaatacctaggaatccaacttacaagggatgtgaaggacctcttcaagcagaactacaaaccactgctcaaggaaataaaagaggatacaaacaaatggaagaatattccatgctcatgggtaggaagaatcaatatcgtgaaaatggccatactgcccaaggtaatttacagattcaatgccatccccatcaagctaccaatgcctttcttcacagaattggaaaaaactactttaaagttcatatggaaccaaaaaagagcccgcatcgccaagtcaatcctaagccaaaagaacaaagctggaggcatcacactacctgacttcaaactatactacaaggctacagtaaccaaaacagcatggtactggtaccaaaacagagatatagatcaatgggacagaacagagccctcagaaatatgccgcatatctacagctatctga

SEQ ID NO: 5405 - DNA, 1569 bp, Homo sapiens; identical to SEQ ID NO: 1377
  SIMILAR (739)..(1554): 961254mologous to Homo sapiens putative p150,accession number U93563,Smith-Waterman Score=1326.

SEQ ID NO: 5406 - DNA, 690 bp, Homo sapiens
  SIMILAR (611)..(676): 861254mologous to Homo sapiens putative p150,accession number U93572,Smith-Waterman Score=97.
atgagtgaactcccattcacaattgcttcaaagagaataaaatacctaggaatccaacttacaagggatgtgaaggacctcttcaaggagaactacaatccactgctcaatgaaataaaagaggatacaaacgaatggaagaacattccatgctcatgggtaggaagaatcaatatcgtgaaaatggccatactgcccaaggctacagtaaccaaaatagcatggtactggtaccaaaacagagatatagatcaatggaacagaacagagcgctcagaaataatgccgcatatctacaactacctgatctttaagaaacctgagaaaaacaagcaatggggaaaggattccctgtttgataaatggtgctcggaaaactggctagccatatgtagaaagctgaaactggatcccttccttacaccttatacaaaaattaattcaagatggattaaagacttaaacgttagacctaaaaccataaaaaccctagaagaaaacctaggcattactattcaggacataggcatcggcaaggacttcatgtctaaaacaccaaaagcaatggcaacaaaagccaaaattgacaaatgggatctaattaaactaaagcttctgcacagcaaaagaaactaccatcagagtgaacaggcaatctacaaaatgggaaattatatcttctttagatga

SEQ ID NO: 5407 - DNA, 1919 bp, Homo sapiens
  SIMILAR (163)..(1917): 951254mologous to Homo sapiens putative p150,accession number U93563,Smith-Waterman Score=2930.
atggataaattcctcgacacatacactctcccaagactaaaccaggaagaagttgaatctctgaatagaccaataacaggagctgaaattgtggcaataatcaatagcttaccaactaaaaagagtccaggaccagatggattcacagccaaattctaccagagtaaaatactggcaaaccaaatccagcagcacatcaaaaagcttacccaccaggatcaagtggacttcatccctgggatgcaaggctggttcaatatacgcaaatcaataaatgtaatccagcatataaacagaagcaaagacaaaaaccacatgattatctcaatagatgcagaaaaggcctttgacaaaattcaacaacacttcatgctaaaaactctcaataaattacgtattgatgggacgtatctcaaaataataagagctatctatgacaaacccacagccaatatcatactgaatgggcaaaaactggaagcattccctttgaaaactggcacaagacagggatgctctctctcaccactcctattcaacatagtgttggaagttctggccagggcaattaggcaggagaaggaaataaagggtattcaattaggaaaagaggaagtcaaattgtccctgtttgcagatgacatgattgtatatctagaaaaccccattgtctcagcccaaaatctccttaagctgataagcaacttcagcaaagtctcaggatacaaaatcaatgtacaaaaatcacaagcattcttatacaccaacaacagacaaacagagagccaaatcatgagtgaactcccattcacaattgcttcaaagagaataaaatacctaggaatccaacttacaagggatgtgaaggacctcttcaaggagaactacaaaccactgctcaaggaaataaaagaggatacaaacaaatggaagaacatcccatgctcatgggtaggaagaatcaatatcgtgaaaatggccatactgcccaagataatttacagattcaatgccatccccatcaaactaccaatgactttcttcacagaattggaaaaaactactttaaagttcatatggaaccaaaaaagagcccgcattgccaaggcaatcctaagccaaaagaacaaagctggaggcatcacgctacctgacttcaaactatactacaaggctacagtaaccaaaacagcatggtactggtaccaaaacagagatatagatcaatggaacagaacagagccctcagaaataacgctgcatatctacaactttctgatctttgacaaacctgagaaaaacgagcaatggggaaaggattccctatttaataaatggtgctgggaaaactggctagccatatgtagaaagctgaaactggatcccttccttacaccttatacaaaaatcaattcaagatggattaaagacttaaacgttagacctaaaaccataaaaaccctagaagaaaacctaggcattaccattcaggacataggcatgggcaaggacttcatgtctaaaacaccaaaagcaatggcaacaaaagccaaaattgacaaatgggatctaattaaactaaagaacttctgcacagcaaaagaaactaccatcagagtgaacaggcaacctacaaaatgggagaaaattttcacaacctactcatctgacaaagggctaatatccagaatctacaatgaactccaacaaatttacaagaaaaaaacaaacaaccccatcaaaaagtgggcaaaggacatgaacagacacttctcaaaagaagacatttatgcagccaaaaaacacatgaaaaaatgctcaccatcactggccatcagagaaatgcaaatcaaaaccacaatgagataccatgtcacaccagttagaatggcaaccattaaaaagtcaggaaacaacag

SEQ ID NO: 5408 - DNA, 1419 bp, Homo sapiens
  SIMILAR (697)..(1416): 951254mologous to Homo sapiens putative p150,accession number U93572,Smith-Waterman Score=1254.
atgattatcttaatagatgcagaaaaagcctttgacaaaattcaacaacccttcatgctaaaaactctcagtaaattaggtactgatgggacgtatctcaaaataataagagctatctatgacaaacccacagccaatatcatactgaatgggcaaaaactggaagcattccctttgaaaactggcacaagacagggatgccctctctcaccactcctattcaacatagggttggaagatctggccagggcaatcaggcaggagaaggaaataaagggtattcaattaggaaaagaggaagtcaaattgtccctgtttgcagacgacatgattgtttatctagaaaaccccatcgtctcagcccaaaatctccttaagctgataagcaacttcagcaaagtctcaggatacaaaatcaatgtacaaaaatcacaagcattcctatacaccaacaacagacaaacagagagccaaatcatgagtgaactcccattcacaattgcttcaaagagaataaaatacctaggaatccaacttacaagggatgtgaaggacctcttcaaggagaactacaaaccactgctcaaggaaatcaaagaggatacaaacaaatggaagaacattccatgctcatgggtaggaagaatcaatatcgtgaaaatggccatactgcccaagagatatagatcaatggaacgaacagagccctcagaaataatgccgcatacctacaactatctgatctttgacaaacctgagaaaaacaagcaatggggaaaggattccctatttcataaatggtgctgggaaaactggctagccgtatgtagaaagctgaaactggatcccttccttacaccttatacaaaaatcaattcaagatggattaaagatttaaacattagacctaaaaccataaaaactctagaagaaaacctaggcattaccattcaggacataggcgttggcaaggacttcatgtccaaagcaccaaaagcaatggcaacaaaagccaaaattgacaaatgggatctaattaaactaaagagcttctgcacagcaaaagaaactaccatcagagtgaacaggcaacctacaacatgggagaaaatttttgcaacctactcatctgacaaagggctaatatccggaatctacaatgaactcaaacaaatttacaagaaaaaaacaaacaaccccatcaaaaagtgggcgaaggacatgaacagacacttctcaaaagaagacattcatgcagccaaaaaacacatgaaaaaatgctcatcatcactggccatcagagaaatggacatcaaaaccactatgagatatcatctcacaccagttagaatggcaatcattaaaaagtcaggaaacaacaggtgctggagaggatgtggagaaataggaacactttga

SEQ ID NO: 5409 - DNA, 1055 bp, Homo sapiens; identical to SEQ ID NO: 3882
  SIMILAR (388)..(1053): 901254mologous to Homo sapiens putative p150,accession number U93563,Smith-Waterman Score=1020.

SEQ ID NO: 5410 - DNA, 1368 bp, Homo sapiens
  SIMILAR (52)..(1365): 971254mologous to Homo sapiens unknown,accession number AF148856,Smith-Waterman Score=2318.
atggtggataagctttttgatgtgctgctggattcggtttgccagtattttattgaggatttttgcatcaaagtctcaggatacaaaatcaatgtacaaaaatcacaagcattcttatacaccaacaagagacaaacagagagccaaatcatgggtgaactcccattcacaattgcttcaaagagaataaaatacctaggaatccaacttacaagggatgtgaaggacctcttcaaggagaactacaaaccactgctcaaggaaataaaagaggacacaaacaaatggaagaacattccatgctcatgggtaggaagaatcaatatcgtgaaaatggccatactgcccaaggtaatttacagattcaatgccatccccatcaagctaccaatgactttcttcacagaattggaaaaaactactttaaagttcatatggaaccaaaaaagagcccgcattgccaagtcaatcctaagccaaaagaacaaagctggaggcatcacactacctgacttcaaactatactacaaggctacagtaatcaaaacagcatggtactggtaccaaaacagagatatagatcaatggaacagaacagagccctcagaaataatgccgcatatctacaactatctgatctttgacaaacctgagaaaaacaagcaatggggaaaggattccctatttaataaatggtgctgggaaaactggctagccatatgtagaaagctgaaactggatcccttccttacaccttatacaaaaatcaattcaagatggattaaagatttaaacgttaaacctaaaaccataaaaaccctagaagaaaacctaggcattaccattcaggacataggcgtaggcaaggacttcatgtccaaaacaccaaaagcaatggcaacagaagacaaaattgacaaatgggatctaattaaactaaagagcttctgcacagcaaaagaaactaccatcagagtgaacaggcaacctacaacatgggagaaaattttcgcaacctactcatctgacaaagggctaatatccagaatctacaatgaactcaaacaaatttacaacaaaaaaacaaacaaccccatcaaaaagtgggcgaaggacatgaacagacacttctcaaaagaagacatttatgcagccaaaaaacacatgaaaaaatgctcatcatcactggccatcagagaaatgcaaatcaaaaccactatgagatatcatctcacaccagttagaatggcaatcattaaaaagtcaggaaacaacaggtgctggagaggatgcggagaaataggaacacttttacactgttggtgggactgtaaactagttcaaccattgtggaagtcagtgtggtga

SEQ ID NO: 5411 - DNA, 1701 bp, Homo sapiens
  SIMILAR (1532)..(1699): 551254mologous to Homo sapiens putative p150,accession number U93564,Smith-Waterman Score=150.
atggtggataagctttttgatgtgctgctggattcggtttgcttcatgcctgggatgcaaggctggttcaatatacgcaaatcaataaatgtaatccagcatataaacagaaccaaagacaaaaaccacatgattatctcaatagatgcagaaaagacctttgacaaaattcaacaacccttcatgctaaaaactcttaatcaattaggtattgatgggacgtatctcaaaataataagagctatctatgacaaacccacagccaatatcacactgaatgggcaaaaactggaagcattccctttgaaaactggcacaagacagggatgccctctctcaccactcctattcaacatagtgttggaagttctggccagggcaattaggcaggagaaggaaataaagggtattcaattaggaaaagaggaagtcaaattgtccctgtttgcagacgacatgattgtatatctagaaaaccccattgtctcagcccaaaatctccttaagctgataagcaacttcagcaaagtctcaggatacaaaatcaatgtacaaaaatcacaagcattcttatacaccaacaacagacaaacagagagccaaatcatgagtgaactcccattcacaactgcttcaaagagaataaaatacctaggaatccaacttacaagggatgtgaaggacctcttcaaggagaactacaaactactgctcaatgaaataaaagaggatacaaacaaatggaataacattccatgctcatgggtaggaagaatcaatatcgtgaaaatggccatactgcccaaggtaatttatagattcaatgccatccccatcaagctaccaatgactttcttcacagaattggaaaaaactactttaaagttcatatggaaccaaaaaggagcccgcatcgccaagtcaatcctaagccaaaagaacaaagctggaggcatcacgctacctgacttcaaactatattacaaggctacagtaaccaaaacagcatggtactggtaccaaaacagagatatagatcaatggaacagaacagagccctcagaaataatgccgcatatctacaactatctgatctttgacaaacctgagaaaaacaagcaatggggaaaggattccctacttaataaatggtgctgggaaaactggctagccatatggagaaagctgaaactggatcccttccttacaccttatacaaaaatcaattcaagatggattaaagacttaaacattagacctaaaaccataaaaaccctagaagaaaacctaggcattaccattcaggacataggcatgtgcaaggacttcatgtctaaaacaccaaaagcaatggcaacaaaagccaaaattcacaaatgggatctaattaaactaaagagcttctgcacagcaaaagaaactaccatcagagtgaacaggcaacccacaaaatgggagaacattttcccaacctactcatctgacaaagggctaatatccagaatctacaatgaactcaaacacatttacaagaaaaaaacaaacaaccccatcaaaaagtgggcgaaggacatgaacagacacttctcaaaagaagacattgatgcagccaaaaaaacacatgaaaaaatgctcaccatcaatggccatcagagaaatgcaaatcaaaaccacaatgagttatcatctcacaccagttag

SEQ ID NO: 5412 - DNA, 1398 bp, Homo sapiens
  SIMILAR (1)..(1056): 901254mologous to Homo sapiens putative p150,accession number U93563,Smith-Waterman Score=1630.
atgttctttgaagccaacgagaacaaagacacaacataccagaatctctgggacgcattcaaagcagtgtgtagagggaaatttatagcactacatgcccacaagagaaagcaggaaagatccaaaattgacaccctaacaccgcaattaaaagaactagagaaacaagagcaaacacattcaaaagctagcagaaggcaagaaataactaagatcagagcagaactgaaggagatagagacacaaagaactcttcaaaaaatcaatgaatccaggagctggttttttgaaaagagcaacaaaatagatagaccgctagcaggactaataaagaagaaaagagagaagaatcaaatagacgcaataaaaaatgacaaaggggatatcaccaccgatcccacagaaatacaaactaccatcagacaatattataaaaacctctatgcaaataaactagaaaaactagaagaaatggataaattcctggacacatccaccctcccaagactaaaccaggaagaagttgaatctctgaatagaccaataacaggctctgaaattaaggcaataatcaatagcttaccaaccaaaaaaagtccaggaccagatggattcacagccgaattctaccagaggtacaaagaggagctggtatcattccttctgaaactattccaatcagtagaagaaaagggaatcctccctaactccttttatgaggccagcataatcctgataccaaagcctggcagagacacaataaaaaaagagaattttagaccaatatccctgatgaaccttgatgcaaaaatcctcaataaaatactggcaaaccaaatccagcaacacatcaaaaagcttatccaacatgatcaagtgggctacatccctgggatgcaaggctggttcaacctatgcaaatcaataaatgtaatccagcatataaagagaaccaatgacaaaaaccacatgattatctcaaaagatgcagaaacggcctttgataaaattcaacaattcttcatcctaaaaattctcaataaattaggtattgatgagagacaaacagagagccaaatcgtgagtgaactcccattcacaactgcttcaaagagaataaaatacctaggaatccaacttacaagggatgtgaaggacctcttcaaggagaactacaaaccactgctcaatgaaataaaagaggatacaaacaaatggaagaacattccatgctcatgggaaggaagaatcaatatcgtgaaaatggccatactgcccaagataatttatagattcaatgccatccccatcaagctaccaatgactttcttcacacaattggaaaaaactactttaaacttcatatggaaccaaaaaagagcccgcattgccaaataa

SEQ ID NO: 5413 - DNA, 1646 bp, Homo sapiens
  SIMILAR (42)..(1511): 951254mologous to Homo sapiens putative p150,accession number U93572,Smith-Waterman Score=2459.
agaattttagaccaatatccttgatgaacattgatgcaaaaatcctcaataaaatactgggagccaaagacaaaaaccacatgattatctcaatagatgcagaaaaagcctttgacaaaattcaacaacccttcatgctaaaaactctcaataaattaggtattgatgggacgtatttcaaaataataagagctatctatgaccaacccacagccaatatcatactgaatgggcaaaaactggaagcattccctttgaaaactggcacaagacagggatgccctctctcaccactcctattcaacatagtgttggaagttctggccagggcaattaggcaggagaaggaaataaagagtattcaattaggaaaagaggaagcgaaattgtccctgtttgcagacaaaatgattgtatatctagaaaaccccattgtctcagcccaaaatctccttaagctgataagcaacttcagcaaagtctcaggatacaaaatcaatgtacaaaaatcacaagcattcttatacaccaacaacagacaaacagagagccaaatcatgagtgaactcccattcacaattgcttcaaagagaataaaatacctaggaatccaacttacaagggatgtgaaggacctcttcaagcagaactacaaaccactgctcaaggaaataaaagaggatacaaacaaatggaagaatattccatgctcatgggtaggaagaatcaatatcgtgaaaatggccatactgcccaaggtaatttacagattcaatgccatccccatcaagctaccaatgcctttcttcacagaattggaaaaaactactttaaagttcatatggaaccaaaaaagagcccgcatcgccaagtcaatcctaagccaaaagaacaaagctggaggcatcacactacctgacttcaaactatactacaaggctacagtaaccaaaacagcatggtactggtaccaaaacagagatatagatcaatggaacagaacagagccctcagaaataatgccgcatatctacagctatctgatctttgacaaacctgagaaaaacaagcaatggggaaaggattccctatttaataaatggtgctgggaaaactggctagccatatgtagaaagctgaaactggatcccttccttacaccttatacaaaaatcaattcaagatggattaaagacttaaacgttagacctaaaaccataaaaaccctagaagaaaacctaggcatcaccattcaggacctaggcatgggcaaggacttcatgtccaaaacaccaaaagcaatggcaacaaaagacacaattgacaaatgggatctaattaaactaaagagcttctgcacagcaaaagaaactaccatcagaatgaacaggcaacctacaaaatgggagaaaattttcacaagctactcatctgacaaagggctaatatccagaatctacaatgaactcaaacaaatttacaagaaaaaaacaaacaaccccatcaaaaaatgtcaacaggcctcacagctgaaggctttacccacccaatcctgctccccctcttctaacagctatgaaaccttcctagtttcaccccttcacccgttccagttttacataagttttcctcactacacagagatg

SEQ ID NO: 5414 - DNA, 762 bp, Homo sapiens
  SIMILAR (199)..(759): 981254mologous to Cloning vector pZC320 SopB,accession number U26464,Smith-Waterman Score=898.
atgagtgaactcccattcacaattgcttcaaagagaataaagtatctaggaatccaacttacaagggatgtgaaggacctcttcaaggagaactacaaaccactgctcaatgaaataaaagaggatacaaacaaatggaagaacattccatgctcatgggtaggaagaatcaatatcgtgaaaatggccatactgcccaagacaccggcgttcggtcgaagagtatctggtgtcatagaaattgccgatgggagtcgctgtcgtaaagctgctgcacttaccgaaagtgattatcgtgttctggttggcgagctggatgatgagcagatggctgcattatccagattgggtagcgattatcgcccaacaagtgcttatgaacgtggtcagcgttatgcaagccgattgcagaatgaatttgctggaaatatttctgcgctggctgatgcggaaaatatttcacgtaagattattacccgctgtatcaacaccgccaaattgcctaaatcagttgttgctcttttttctcaccccggtgaactatctgcccggtcaggtgatgcacttcaaaaagcctttacagataaagaggaattacttaagcagcaggcatctaaccttcatgagcagaaaaaagctggggtgatatttgaagctgaagaagttatcactcttttaacttctgtgcttaaaacgtcatctgcatcaagaactagtttaagctcacgacatcagtttgctcctggagcgacagtattgtaa

SEQ ID NO: 5415 - DNA, 5976 bp, Homo sapiens
  SIMILAR (1957)..(5781): 971254mologous to Homo sapiens putative p150,accession number U93563,Smith-Waterman Score=6519.
  misc_feature (1)...(5976): n = a,t,c or g
cctccggtctacagctcccagcgtgagcgacgcagaagacgggtgatttctgcatttccatctgaggtaccgggttcatctcactagggagtgccagacagtgggcgcaggccagtgggtgcgcgcaccgtgcggagccgaagcagggcgaggcattgcctcacctgggaagcgcaaggggtcagggagttccctttccgagtcaaagaaaggggtgacggacgcacctggaaaatcgggtcactcccacccgaatattgcgcttttcagaccggcttaaaaaacggcgcaccacgagactatatcccacacctggccttcggagggtcctacgcccacggaatctcgctgattgctagcacagcggtctgagatcaaactgcaaggccgcagcaaggctgggggaggggcgcccgccattgcccaggcttgcttaggtaaacaaagcagccggggaagctcgaactgggtgcagcccaccacagctcaaggaggcctgcctgcctctgtaggctccacctctgggggcagggcacagacaaacaaaaagacagcagtaacctctgcagacttaaatgtccctgtctgacagctttgaagagagcagtggttctcccagcacgcagctggagatctgagaacgggcagactgcctcctcaagtgggtccctgacccctgacccccgagcagcctaactgggaggcaccccccagcaggggcacactgacacctcacacggcagggtattccaacagacctgcagctgagggtcctgtctgttagaaggaaaactaacaaacagaaaggacatccacaccgaaaacgcatctgtacatcaccatcatcaaagaccaaaagtagataaaaccacaaagatggggaaaaaacagaacagaaaaactggaaactctaaaacgcagagcacctctcctcctccaaaggaacgcagttcctcaccagcaacggaccaaagctggatggagaatgattttgacgagctgagagaagaaggcttcagacgctcaaattactctgagctacgggaggacattcaaaccaaaggcaaagaagttgaaaactttgaaaaaaatttagaagaatgtataactagaataaccaatacagagaagtgcttaaaggagctgatggagctgaaaaccaaggctcgagaactacgtgaagaatgcagaagcctcaggagccaatgcgatcaactggaagaaagggtatcagcaatggaagatgaaatgaatgaaatgaagcaagaagggaagtttagagaaaaaagaataaaaagaaacgagcaaagcctccaagaaatatgggactatgtgaaaagaccaaatctacgtctgattggtgtacctgaaagtgatgcggagaatggaaccaagttggaaaacactctgcaggatattatccaggagactttccccaatctagcaaggcaggccaacgttcagattcaggaaatacagagaacgccacaaagatactcctcgagaagagcaactccaagacacataattgtcagattcaccaaagttgaaatgaaggaaaaaatgttaagggcagccagagagaaaggtcgagttaccctcaaagggaagcccatcagactaacagcggatctctcggcagaaaccctacaagccagaagagagtgggggccaatattgaacattcttaaagaaaagaattttcaacccagaatttcatatccagccaaactaagcttcataagtgaaggagaaataaaatactttacagacaagcaaatgctgaccgattttgtcaccagcaggcctgccctaaaagagctcctgaaggaagcgctaaacatggaaaggaacaaccggtaccagccactgcaaaatcatgccaaaatgtaaagaccatcgagactaggaagaaactgcatcaactaacgagcaaaatcaccagctaacatcataatgacaggatcaaattcacacataacaatattaactttaaatgtaaatggactaaattctccaattaaaagacacagactggcaagttggataaagagtcaagacccatcagtgtgctgtattcaggaaacccatctcatgtgcagagacacacataggctcaaaataaaaggatggaggaagatctaccaagcaaatggaaaacaaaaaaaggcaggggttgcaatcctagtctctgataaaacagactttaaaccaacaaagatcaaaagagacaaagaaggccattacatgatggtaaagggatcaattcaacaagaggagctaactatcctaaatatgtatgcacccaatacaggagcacccagattcataaagcaagtcctgagtgacctacaaagagacttagactcccacacattaataatgggagactttaacaccccactgtcaacattagacagatcaacgagacagaaagtcaacaaggatacccaggaattgaactcagctctgcaccaagcagacctaatagacatctacagaactctccaccccaaatcaacagaatatacatttttttcagcaccacaccacagctattccaaaattgaccacatacttggaagtgaagctctcctcagcaaatgtaaaagaacagaaattataacaaactatctctcagaccacagtgcaatcaaactagaactcaggattaagaatctcactcaaagccgctcaactacatggaaactgaacaacctgctcctgaatgactactgggtacataacgaaatgaaggcagaaataaagatgttctttgaaaccaacgagaacaaagacacaacataccagaatctctaggacgcattcaaagcagtgtgtagagggaaatttatagcactaaatgcccacaagagaaagcaggaaagatccaaaattgacaccctaacatcacaattaaaagaactagaaaagcaagagcaaacacattcaaaagctagcagaaggcaagaaataactaaaatcagagcagaactgaaggaaatagagacacaaaaaacccttcaaaaaatcaatgaatccaggagctggttttttgaaaggatcaacaaaattgatagaccgctagcaagactaataaagaaaaaaagagagaagaatcaaatagacacaataaaaaatgataaaggggatatcaccaccgatcccacagaaatacaaactaccatcagagaatactacaaacacctctacgcaaataaactagaaaatctagaagaaatggatacattccttgacacatacactctcccaagactaaaccaggaagaagttgaatctctgaatagaccaataacaggagctgaaattgtggcaataatcaatagtttatcaaccaaaaagagtccaggaccagatggattcacagccgaattctaccagaggtacaaggaggaactggtaccattctttctgaaactattccaatcaatagaaaaagagggaatcctccctaactcattttatgaggccagcatcattctgataccaaagccgggcagagacacaaccaaaaaagagaattttagaccaatatccttgatgaacattgatgcaaaaatcctcaataaaatactggcaaaccaaatccagcagcacatcaaaaagcttatccaccatgatcaagtgggcttcatccctgggatgcaaggctggttcaatatacgcaaatcaataaatgtaatccagcatataaacagagccaaagacaaaaaccacatgattgtctcaatagatgcagaaaaagcctttgacaaaattcaacaacccttcatgctaaaaactatcaataaaataggtattgatgggatgtatttcaaaataataagagctatctatgacaaaaccacagccaatatcatactgaatgggcaaaaactggaagcattccctttgaaaaccggcacaagacagggatgccctctctcaccgctcctattcaacatagtgttggaatttctggccagggcaatcaggcaggagaaggaaataaagggtattcaattaggaaaagaggaagtcaaattgtccctgtttgcagatgacatgattgttgatctagaaaaccccatcgtctcagcccaaaatctccttaagctgataagcaacttcagcaaantctcaggatacaaaatcaatgtacaaaaatcacaagcattcctatacaccaacaacagacaaacagagagccaaatcatgagtgaactcccattcacaattgcttcaaagagaataaaatacctaggaatccaacttacaagggatgtgaaggacctcttcaaggagaactacaaaccactgctcaaggaaataaaagaggatacaaaaaaatggaagaacantccatgctcatgggtaggaagaatcaatatcgtgaaaatggccatactgcccaaggtaatttacagattcaatgccatccccatcaagctaccaatgactttcttcacagaattggaaaaaactactttaaagttcatatggaaccaaaaaagagcccgcattgccaagtcaatcctaagccaaaagaacaaagctggaggcatcacactacctgacttcaaactatactacaaggctacagtaaccaaaacagcatggtactggtaccaaaacagagatatagatcaatggaacagaacagagccctcagaaataacgnngcttacctacaactatctgatctttgacaaacctgagaaaaacaagcaatggggaaaggattccctatttaataaatggtgctgggaaaactggctagccatatgtagaaagctgaaagtggatcccttccttacaccttatacaaaaatcaattcaagatggattaaagacttaaacgttagacctaaaaccataaaaaccctagaagaaaacctaggcattaccattcaggacataggcgtgggcaaggacttcatgtccaaaacaccaaaagcaatggcaacaaaagccaaaattgacaaatgggatctaattaaactaaagagcttctgcacagcaaaagaaactaccatcagagtgaacaggcaacctacaacatgggagacaattttcacaacctactcatctgacaaagggctaatatccagaatctacaatgaactcaaacaaatttacaagaaaaaaacaaacaaccccatcaaaaagtgggcgaaggacatgaacagacacttctcaaaagaagacatttatgcagccaaaaaacacatgaaaaaatgctcatcatcactggccatcagagaaatgcaaatcaaaaccactatgagatatcatctcacaccagttagaatggcaatcattaaaaagtcaggaaacaacaggtgctggagaggatgtggagaaataggaacacttttacactgttggtgggactgtaaactagttcaaccattgtggaagtcagtgtggcgattccttagggatctagaactagaaataccatttgacccagccatcccattactgggtatatacccaaatgactataaatcatgctgctataaagacacatgcacacgtatgtttattgcggcattattcacaatagcaaagacttggaaccaacccaaatgtccaacaatgatagactggattaagaaaatgtggcacatatacaccatggaatactatgcagccataaaaaatgatgagttcatgtcctttgtagggacatggatgaaattggaaaccatcattctcagtaaactatcgcaagaacaaaaaaccaaacaccgcatattctcactcataggtgggaattgaacaatgagatcacatggacacaggaaggggaatatcacactctggggactatggtggggaggggggaggggggagggatagcattgggagatatacctaatgctagatgacgagttagtggtgcagtgcaccagcatggcacatgtatacatatgtaactaacctgcacaatgtgcacatgtaccctaaaac

SEQ ID NO: 5416 - DNA, 2025 bp, Homo sapiens
  SIMILAR (550)..(2007): 941254mologous to Homo sapiens putative p150,accession number U93572,Smith-Waterman Score=2397.
atggggaaaagacagagcagaaaaactggaaactctaaaaagcagagcgcctctcctcctccaaaggaacacagttcctcattagcaatggaacaaagctggacagagaatgactttgacaagttgagagaagaaggcttcagacgatcaaactactccgagctacgggaggaaattcaaaccaaaggcaaagaagttaaaaactgtgaaaaacatttagacgaatgtataactagaataaccaatacagagaagtgcttaaaggagctgatggacctgaaagccaaggctcgagaactacaaatacaaactaccatcagagaatcctataaacacctctatgcaaataaactagaaaatctagaagaaatggataaattcctcgacacatacactctcccaagactaaaccaggaagaatttgaatctctgaatagaccaataacaggctctgaaattgtggcaataatcaatagcttaccaaccaaaaagagtccaggaccagatggattcacagccgaattcaaccagaggtacaaggaggagctgcatataaacagaaccaaagacaaaaaccacatgattatctcaatagatgcagaaaaggcctttgacaaaattcaacaacgcttcatgctaaaaactctcaataaattaggtattgatgggacgtatctcaaaataataagagctatctatgacaaacccacagccaatatcatactgaatgggcaaaaactggaagcattccctttgaaaacgggcacaagacagggatgccctctctcaccactcctattcaacatagtgttggaagttctggccagggcaattagtcaggagaaggaaataaagggtattcaattaggaaaagaggaagtcaaattgtccctgtttgcagatgacatgattgtagatctagaaaaccccattgtctcagcccaaaatctccttaagctgataagcaacttcagcaaagtctcaggatacaaaatcaatgtacaaaaatcacaagcattcttatacaccaataacagacagacagagagccaaatcatgagtgaactcccattgacaattgcttcaaagagaataaaatacctaggaatccaacttacaagggatgtgaaggacctcttcaaggagaactacaaaccactgctcaatgaaataaaagaggatacaaacaaatggaagaacattccatgctcatgggtaggaagaatcaatatcctgaaaatggccatactgcccaaggtaactgatagattcaatgccatccccatcaagctaccaatgactttcttcacagaattggaaaaaactactttaaagttcatatggaagcaaaaaagagcccgcatggccaagtcaatcctaagccaaaagaacaaagctggaggcatcacgctacctgacttcaaactatactacaaggctacagtaaccaaaacagcatggtactggtaccaaaacagagatatagatcaatggaacagaacagagccctcagaaataacgccacatatctacaactatctgatctttgacaaacctgagaaaaccaagcaatggggaaaggattccctatttaataaatggtgctgggaaaactggctagccatatgtagaaagctgaaactggatcccttccttacaccttataccaaaatcaattcaagatggattaaagacttacacgttagacctaaaaccataaaaaccctagaagaaaacctaggcattagcattcaggacataggcatgggcaaggacttcatgtctaaaacaccaaaagcaatgacaacaaaagccaaaattgacaaatgggatctaattcaactaaagagcttctgcacagcaaaagaaactaccatcagagtgaacaggcaacctacaaaatgggagaaaattttcacaacctactcatctgacaaagggctaatatccagaatctacaatgaactcaaacaaatttacaagaaaaaacaaacaaccccatcaaaaagtgggcaaaggacatga

SEQ ID NO: 5417 - DNA, 3666 bp, Homo sapiens; identical to SEQ ID NO: 2174
  SIMILAR (736)..(3006): 961254mologous to Homo sapiens putative p150,accession number U93563,Smith-Waterman Score=3773.

SEQ ID NO: 5418 - DNA, 2265 bp, Homo sapiens; identical to SEQ ID NO: 2285
  SIMILAR (946)..(2256): 951254mologous to Homo sapiens putative p150,accession number U93574,Smith-Waterman Score=2181.

SEQ ID NO: 5419 - DNA, 2244 bp, Homo sapiens
  SIMILAR (418)..(2238): 821254mologous to Homo sapiens putative p150,accession number U93569,Smith-Waterman Score=2508.
atggtggtgaaggtttggaaatactatgttttggataacattgactcagcaacactgaaagtgttggaagttctggccagggcaatcaggcaggagaaggaaataaagggtattcaattaggaaaagaggaagtcaaattgtccctgtttgcagatgacatgattgtatatctagaaaaccccattgtctcagcccaaaatctccttaagctgataagcaactttagcaaagtctcaggatacaaaatcaatgtacaaaaatcacaagcattcttatacaccaacaacagacaaacagagagccaaatcatgagtgaactcccattcacaattgcttcaaagagaataaaatacctaggaatccaacttacaagggatgtgaaggacctcttcaagcagaactacaaaccactgctcaatgaaataaaagaggatacaaacaaatggaagaacattccatgctcatgggtaggaagaatcaatatcgtgaaaatggccatactgcccaaggaacgcagctcctcaccagcaacggaacaaagctggatggagaatgactttgatgagttgagagaagaaggcttcagacgatcaaacttctccgagctaaaggagaaagttcgaacccatcacaaacaagataaaaaccttgaaaaaaggagctggttttttgaaaagatcaacaaaatcgatagacctctagcaagactaataaagaagaaaagagagaagagtcaaataaacgcaataaaaaacgataaaggggatatcactgccgatcccacagaaatacaaactaccatcacagaatactataaacacctctatgcaaataaactagaaaatctagaagcaatggataaattccttgacacatacaccctcccaagaataaaccaggaagaagttgaatctctgaataggccaataacaggctctgaaactgaggcaataattaatagcttaccaaccaaaaaaagtccaggaccagatggattaacagctgaattctaccagaggtacaaggaggagctggtaccattccttctgaaactattccaatcaatagaaaaagagcgaatcctcccgaactcattttatgagggcatcatcctcctgataccaaagcctggcagagacaacacaaaaaaagataattttaaaccaatatccctgatgaacatggatgcaaaaatcctcaataaaatactggcaaaccgaatccagcagcacatcaaaaagcttatccaccatgatcaagtgggcttcatccctgggatgcaaggctggttcaacatatgcaaatcaataaatgtaatccagcatataaacagaaccaaagacaaaaaccacatgattatctcaacagatgcaggaaaggcctttgacaaaattcaacagcccttcatgctaaaaactctcaataaattaggtattgatgggatgaatctcaaaataataagagctatttatgacaaacccacagccaatatcatactgaatagacaaaaactggaagcattccctttgaaaactggcacaagacagggatgccctctctcaccactcctattcaacatagtgttggaagttctggccagggcaatcaggcaggagaaggaaataaagggtattcaattaggaaaagaggaagtcaaattgtccctgtttgcagatgacatgattgtatatctagaaaaccccatcgtctcagcccaaaatctccttaagctgataagcaacttcagcaaagtctcaggatacaaaatcagtgtgcaaaaatcacaagcattcttatacaccaataacagacaaacagagagccaaatcatgagtgaaatcccattcccaattgcttcaaagagaataaaatacctaggaatccaacttacaagggatgtgaaggacctctttaaggagaactgcaaaccactgctcaaggaaataaaagagaacacaaacaaatggaagaacattccatgctcatggatagaaagaatcaatattgtgaaaatggccatactgcccaaggtaatttatagtttcaatgccatccccatcaagcacccaatgactttcttcacagaattggaaaaaacaactttaaagttcatatggaaccaaaaaagagcccgcatcaccaagtcaatcctaagacaaaagaacaaagctggaggcatcacgctacctgaattcaaactatactacaagactacagtaaccaaaatagcatggtacgggtaa

SEQ ID NO: 5420 - DNA, 2481 bp, Homo sapiens; identical to SEQ ID NO: 4454
  SIMILAR (784)..(2460): 861254mologous to Homo sapiens putative p150,accession number U93563,Smith-Waterman Score=2393.

SEQ ID NO: 5421 - DNA, 2070 bp, Homo sapiens
  SIMILAR (670)..(2067): 961254mologous to Homo sapiens putative p150,accession number U93563,Smith-Waterman Score=2362.
atggagctgaaaaccaaggctcgagaactacgtgaagaatgcagaagcctcaggagccgatgcgatcaactggaagaaagggtatcagcgatggaagatgaaatgaatgaaatgaagcgagaagggaagtttagagaaaaaagaataaaaagaaatgagcaaagcctccaagaaatatgggactatgtgaaaagaccaaatctacatctgattggtgtacctgaaactgatggggagaatggaaccaagttggaaaacactctgcaggatattatccaggagaacttccccaatctagcaaggcaggccaatgttcagattcaggaaatacagagaacgccacaaagatactcctcgagaagagcaactccaagacacataattgtcagattcaccaaagttgaaatgaaggaaaaaatgttaagggcagccagagagaaagaaatacaaactaccatcagagaatattacaaacaccttcacgcaaataaactagaaaatctagaagaaatggataaattcctcgacacatacactctcccaagactaaaccaggaaaaagtagaatctttgaatagaccaataacaggagctgaaattgtggcaataatcaatatttaccaaccaaaaagagtccaggaccagatggattcacagccgaattttaccagagagggaatcctccctaactcattttatgaggccagcatcattctgataccaaagctgggcagagacacagccaaaaaagagaattttagaccaatatccttgatgaacattgatgcaaaaatcctcaataaaatactggcaaaacgaatccagcagcacatcaaaaagcttatccaccatgatcaagtgggcttcatccctgggatgcaaggttggttcaatatacgcaaatcaataaatgtaatccagcatgtaaacagaaccaaagacaaaaaccacatgattatctcaatagatgaagaaaaggcctttgacaaaattcaacagcccttcatgctaaaaactctcaataaattaggtattgatgggatgtatttcataataataagagctatctatgacaaacccacagcccatatcatactgaatgggaaaaaactggaagcattccctttgaaaactggcatgagacagggatgccctctctcaccactcctattcaatatagtgttcaaagttctggccagagcaattaggcaggagaaggaaataaagggtattcaattaggaaaagaggaattcaaattgtccctgtttgcagacgacatgattgtatatctagaaaaccccattgtctcagcccaaaatctccttaagctgataagcaacttcagcaaagtctcaggatacaaaatcaatgtacaaaaatcacaaacattcttatacaccaacaacagacaaacagagagccaaatcatgagtgaactcccattcacaattgcttcaaagagaataaaatacctaggaatccaacttacaagggatgtgaaggacctcttcaaggagaactacaaaccactgctcaaggaaataaaagaggatacaaacaaatggaagaacattccatgctcatgggtaggaagaatcaatatcgtgaaaatggccatactgcccaaggtaatttacagattcaatgccatccccatcaaggtaccaatgactttcttcacagaattggaaaaaactactttaaagttcatatggaaccaaaaaagagcctgcatcgccaagtcaatcctgagccaaaagaacaaagctggaggcatcacactacctgacttcaaactatactacaaggctacagtaaccaaaacagcatggtactggtaccaaaacagagatatagatcaatggaacagaacagagccctcagaaataacgccacatatctacaactatctgatctttgacaaacctgagaaaaacaagcaatggggaaaggattccctatttaataaatggtgctgggaaaactggctagccatatgtagaaagctgaaactggatcccttccttacaccttatacaaaaatcaattcaagatggattaaagactga

SEQ ID NO: 5422 - DNA, 2991 bp, Homo sapiens; identical to SEQ ID NO: 2164
  SIMILAR (1618)..(2718): 951254mologous to Homo sapiens putative p150,accession number U93563,Smith-Waterman Score=1795.

SEQ ID NO: 5423 - DNA, 2061 bp, Homo sapiens
  SIMILAR (25)..(1092): 951254mologous to Homo sapiens putative p150,accession number U93569,Smith-Waterman Score=1723.
atgcagaagaattacctgtgtaggcattcaaaagctagcagaaggcaagaaataactaaaatcagagcagaactgaaggaaaaagagacacaaaaaacccttcaaaaaattaatgaacccaggagctggttttttgaaaggatcaacaaaattgatagaccgctagcaagactaataaagaaaaaaagagagaagaatcaaatagacgcaataaaaaatgataaaggggatatcaccacggatcccacagaaatacaaactatcatcagagaatactacaaacacctctacgcaaataaactagaaaatctagaagaaatggataaattccttgacacatacactctcccaagactaaaccaggaagaagttgaatctctgaatagaccaacaacaggatctgaaattgtggcaataatcaatagcttaccaaccaaaaagagtccaggaccagatggattgacagccgaattctaccagaggtacaaggaggaactggtaccattccttctgaaactattccaatcaatagaaaaagagggaatcctccctaactcattttatgaggccagcatcatcctgataccaaagccgggcaaagacacaaccaaaaaagagaattttagaccaatatccttgatgaacattgatgcaaaaatcctcaataaaatactggcaaaccgaatccagcagcacatcaaaaagcttatccaccatgatcaagtgggcttcatccctgggatacaaggctggttcaatatacgcaaatcaataaatgtaatccagcatataaacagaaccaaagacaaaaaccacatgattatctcaatagatgcagaaaaggcctttgacaaaattcaacagcccttcatgctaaaaactctcaataaattaggtattgatgggacgtatctcaaaataataagagctatctatgacaaacccacagccaatatcatacggaatgggcaaaaactggaagcattccctttgaaaactggcacaagacagggatgccctctctcaccactcccattcaacatagtgttggaagttctggccagggcaatcagacaaacagagagccaaatcatgagtgaactcccattcacaattgcttcaaagagaataaaatacctaggaatccaacttacaagggatgtgaaggacctcttcaaggagaactacaaaccacggctcaatgaaataaaagaggatacaaacaaatggaagaacattccatgctcatgggtaggaagaatcaatatcgtgaaaatggccatactgcccaaggtaatttacagattcaatgccatccccatcaagctaccaatgactttcttcacagaattggaaaaaactactttaaagttcatatggaaccaaaaaagagcccgcatcaccaagtcaatcctaagccaaaagaacaaagctggaggcatcacactacctgacttcaaactatactacaaggctacagtaaccaaaacagcatggtactggtaccaaaacagagatatagatcaatggaacagaacagagccctcagaaataacaccgcatatctacaactatctgatctttgacaaacctgagaaaaacaagcaatggggaaaggattccctatttaataaatggtactgggaaaactggctagccatatgtagaaagctgaaactggatcccttccttacaccttatacaaaaatcaattcaagatggattaaagacttaaacgttagacctaaaaccataaaaaccctagaagaaaacctaggcattaccattcaggacataggcatgggcaaggacttcatgtctaaaacaccaaaagcaatggcaacaaaagccaaaattgacaaatgggatctaattaaactcaagagcttctgcacagcaaaagaaactaccatcagagtgaacaggcaacctacaaaatgggagaaaattttcgcaacctactcatctgacaaagggctaatatccagaatctacaatgaacttaaacaaatttacaagaaaaaacaaacaaccccatcaaaaagtgggcgaaggacatga

SEQ ID NO: 5424 - DNA, 2141 bp, Homo sapiens
  SIMILAR (85)..(2139): 971254mologous to Homo sapiens putative p150,accession number U93563,Smith-Waterman Score=3480.
atgaaggcagaaataaagatgttctttgaaaccaacgagaacaaagacacaacaaaccagaatctctgggacgcattcaaagcagaagaagttgaatctctgaatagaccaataacaggagctgaaattggggcaataatcaatagtttaccaaccaaaaagagtccaggaccagatggattcacagccgaattctaccagaggtacaaggaggaactggtaccattccttctgaaactattccaatcaatagaaaaagaggaaatcctccctaactcattttatgaggccagcatcattctgataccaaagccgggcagagacacaaccaaaaaagagaattttagaccaatatccttgatgaacatcgatgcaaaaatcctcaataaaatactggcaaaccgaatccagcagcacatcaaaaagcttatccaccatgatcaagtgggcttcttccctgggatgcaaggctggttcaatatacgcaaatcaataaatgtaatccagcatataaacagagccaaagacaaaaaccacatgattatctcaatagatgcagaaaaagcctttgacaaaattcaacaacccttcatgctaaaaactctcaataaattaggtattgatgggacgtatttcaaaataataagagctatctatgacaaacccacagccaatatcatactgaatgggcaaaaactggaagcattccctttgaaaactggcacaagacagggatgccctctctcaccgctcctattcaacatattgttggaagttctggccagggcaatcaggcaggagaaggaaataaagggtattcaattaggaaaagaggaagtcaaattgtccctgtttgcagacgacatgattgtttatctagaaaaccccatcgtctcagcccaaaatctccttaagctgataagcaacttcagcaaagtctcaggatacaaaatcaatgtacaaaaatcacaagcattcttatacaccagcaacagacaaacagagagccaaatcatgagtgaactcccattcacaattgcttcaaagagaataaaatacctaggaatccaacttacaagggatgtgaaggacctcttcaaggagaactacaaaccactgctcaaggaaataaaagaggatacaaacaaatggaagaacattccatgctcatgggtaggaagaatcaatatcgtgaaaatggccatactgcccaaggtaatttacagattcaatgccatccccatcaagctaccaatgactttcttcacagaattggaaaaaactactttaaagttcatatggaaccaaaaaagagcccacatcaccaagtcaatcctaagccaaaagaacaaagctggaggcatcacactacctgacttcaaactatactacaaggctacagtaaccaaaacagcatggtactgctaccaaaacagagatatagatcaatggaacagaacagagccctcagaaataacaccgcatacctacaactatctgatctttgacaaacctgagaaaaacaagcaatggggaaaggattccctatttaataaatggtgctgggaaaactggctagccatatggagaaagctgaaactggatcccttccttacaccttatacaaaaatcaattcaagatggattaaagatttaaacgttagacctaaaaccataaaaaccctagaagaaaacctaggcattaccattcaggacataggcatgggcaaggacttcatgtccagaacaccaaaagcaatggcaaccaaagccaaaattgacaaatgggatctaattaaactaaagagcttctgcacagcaaaagaaactaccatcagagtgaacaggcaacctacaacatgggagaaaattttcgcaacctactcatctgacaaagggctaatatccagaatctacaatgaactcaaacaaatttacaagaaaaaaacaaacaaccccatcaaaaagtgggagaaggacatgaacagacacttctcaaaagaagacatttatgcagccaaaaaacacatgaaaaaatgctcatcatcactggccatcagagaaatgcaaatcaaaaccactatgagatatcatctcacaccagttagaatggcaatcattaaaaagtcaggaaacaacag

SEQ ID NO: 5425 - DNA, 400 bp, Homo sapiens
  SIMILAR (1)..(207): 951254mologous to Homo sapiens Human secreted protein, SEQ ID NO: 7284,accession number G03203,Smith-Waterman Score=349.
atgagtgaactcccattcacaattgcttcaaagagaataaaatacctaggaatccaacttacaagggatgtgaaggacctcttcaaggagaactacaaaccactgctcaatgaaattaaagaggatacaaacaaatggaagaacattccatgctcatgggtaggaagaatcaatatcgtgaaaatggccatactgcccaagatgcttcttcacaaatattctagctacagaaactgtgaatcaaatattctttctcctaataaaagtatccaatgcaatgccaaagaaaacttactgaatgaagataattactgtgcaaaaatggttttcattcttccctttgcatttgaaaatcggaagatccaagattactcagccaatgtgatgattcatttgagac

SEQ ID NO: 5426 - DNA, 2507 bp, Homo sapiens
  SIMILAR (14)..(2284): 961254mologous to Homo sapiens putative p150,accession number U93563,Smith-Waterman Score=3773.
gcagaaaccttcattctttgaaaccaacgagaacaaagacacaacataccagaatctctgggatgcattcaaagcagtgtgtagagggaaatttatagcactaaatgcccacaagagaaagcaggaaagatccaaaattgacaccctaacatcacaattaaaagaactagaaaagcaagagcaaacacattcaaaagctagcagaaggcaagaaataactaaaatcagagcagaactgaaggaaatagagacacaaaaaaccattcaaaaaattaatgaatccaggagctggttttttgaaaggatcaacaaaattgatagaccgctagcaagactaacaaagaaaaaaagagagaagattcaaatagacgcaataaaaaatgataaaggggatatcaccactgatcccacagaaatacaaactaccatcagagaatactacaaacacctctatgcaaataaactagaaaatctagaagaaatggataaattccttgacacatacactctcccaagactaaaccaggaagaagttgaatctctgaatagaccaataacaggatctgaaattgtggcaataatcaatagcttaccaaccaaaaagagtccaggaccagatggattcacagccgaattctaccagaggtacaaggaggagctggtaccattccttctgaaactattccaatcaacagaaaaagagggaatcctccctaactcattttatgaagccagcatcatcctgataccaaagccaggcagagacacaaccgaaaaagagaattttagaccaatatccttgatgaacattgatgcaaaaatcctcaataaaatactgccaaacagaatccagcagcacatcaaaaaccttttgcaccatgatcaagtgggcttcatccctgggatgcaaggctggttcaatatatgcaaattaataaatgtaatccagcatataaacagaaccaaagacaaaaaccacatgattatctcaatagatgcagaaaaggcctttgacaaaattcaacaacccttcatgctaaaaactctcaataaattaggtattgatggcacatatctcaaaataataagagctatctatgacaaacccacggccaatatcatatggaatgggcaaaaactggaagcattccctttgaaaactggcacaagacagggatgccctctctcaccactcctattcaacatagtgttggaagttctggccagggcaattaggcaggagaaggaaataaagggtattcaattaggaaaagaggaagtcaaattgtccctgtttgcagacgacatgattgtatatctagaaaaccccattgtctcagcccaaaatctccttaagctgataagcaacttcagcaaagtctcagcatacaaaatcaatgtacaaaaatcacaagcattcttatacaccaacaacagacaaacagagagccaaatcaggagtgaactcccattcacaattgcttcaaagagaataaaatacctaggaatccaacttacaagggatgtgaaggacctcttcaaggagaactacaaaccactgctcaatgaaataaaagaggatacaaacaaatggaagaacattccatgctcatgggtaggaagaatcaatatcgtgaaaatggccatactgcccaagataatttacagattcaatgccatccccatcaagctaccaatgactttcttcacagaattggaaaaaactactttcaagttcatatggaaccaaaaaagagcccgcatcgccaagtcaatcctcagccaaaagaataaagctggaggcatcacactacctgacttcaaactatactacaaggctacagtaaccaaaacagcatggtactggtaccaaaacagagatatagatcaatggaacagaacagagccctcagaaataacgccgcctatctacaactatctgatctttgacaaccctgagaaaaacaagcaatggggaaaggattccctatttaataaatggtgctgggaaaactggctagccatatgtagaaagctgaaactggatcccttccttacaccttatacaaaaatcaattcaagatggattaaagacttaaaggttagacctaaaaccataaaaacgctagaagaaagcctaggcattaccattcaggacataggcatgtgcaaggacttcatgtctaaaacaccaaaagcaatggcaacaaaagccaaaattgacaaatgggatctaattaaactaaagagcttctgcacagcaaaagaaactaccatcagactgggagtggagttacacaagcacccctgtggccaccaccactatgacaccactggatcagatctgaagccagcacagcactgggtctcacccaaagcttattataaccactcacaggctattgccaatgttcactcaaggccctgtgactttacaatcagcatgtggcagagccagtcaggcctgtgtccttcccttcaggatggcaaggtttcccatgccctag

SEQ ID NO: 5427 - DNA, 771 bp, Homo sapiens
  SIMILAR (109)..(567): 941254mologous to Homo sapiens putative p150,accession number U93563,Smith-Waterman Score=720.
atgaacattgatgcaaaaatcctcaataaaacactggcaaaccgaatccagcagcacatcaaaaagcttatccaccatgatcaagtgggcttcatccctgggacgcaagtgttggaagttctggccagggcaatcaggcaggagaaggaaataaagggcactcaattaggaaaagaggaagtgaaattgtccctgtttgcagatgacatgattgtatatctagaaaaccccatcgtctcagcccaaaatctccttaagctgataggcaacttcagcaaagtctcaggatacaaaatcaatgtacagaaatcacaagcattcttatgtactaataacagacaaacagagagccaaatcatgagtgaactcccattaacaattgcttcaaagagaataaaatacctaggaatccaacttacaagggatgtgaagcacctcttcaaggagaactacaaaccactgctcaatgaaataaaagaggatacaaacaaatggaagaatattccatgctcatgggtaggaagaatcaatatcgtgaaaatggccatactgcccaagatgttacattcagcagagaataaacaatggcttagccccaaacagagaggtggcagcatggagaacaggattgatgtttggaatattgttcttaaggggctaagcacatcatccaacactgtcctggattcgagccccatagtattagtgacagattccccaggccacatctacattgatctttgtggaacatataacaacagggaaaattag

SEQ ID NO: 5428 - DNA, 1530 bp, Homo sapiens; identical to SEQ ID NO: 4452
  SIMILAR (442)..(891): 961254mologous to Homo sapiens putative p150,accession number U93564,Smith-Waterman Score=733.

SEQ ID NO: 5429 - DNA, 1296 bp, Homo sapiens
  SIMILAR (325)..(1266): 981254mologous to Homo sapiens putative p150,accession number U93565,Smith-Waterman Score=1639.
atgcacacagccccgtttatttttccagtgaagcgcactgtccctgaccccggtgaatactgggatggtagtcctgtagccacgggaccggaaagtctgggagtctttatgaaactacatctcccagcaaccctggcgacctggggctccagtcccaccgcagactctggtgggacgtgggtggcgcaagcacatcttggccctgcgactcagcttgagggggcccaagctgtcccactgagcaagcgcccagcaggccgccgtgctgtgggtcctggtcctcctggcatttgttggggtgcggaggccaccgaggagtctgaggtgttggaagttctggccagggcaatcaggcaggagaaggaaataaagggtattcaattaggaaaagaggaagtcaaattgtccctgtttgcagacgacatgattgtttatctagaaaaccccatcgtctcagccgaaaatctccttaagctgataagcaacttcagcaaagtctcaggatacaaaatcaatgtacaaaaatcacaagcattcttatacaccaacaacagacaaacagagagccaaatcatgggtgaactcccattcacaattgcttcaaagagaataaaatacctaggaatccaacttacaagggatgtgaaggacctcttcaaggagaactacaaaccactgctcaaggaaataaaagaggacacaaacaaatggaagaacattccatgctcatgggtaggaagaatcaatatcgtgaaaatggccatactgcccaaggtaatttacagattcaatgccatccccatcaagctaccaatgactttcttcacagaattggaaaaaactactttaaagttcatatggaaccaaaaaagagcccgcattgccaagtcaatcctaagccaaaagaacaaagctggaggcatcacactacctgacttcaaactatactacaaggctacagtaaccaaaacagcatggtactggtaccaaaacagagatatagatcaatggaacagaacagagccctcagaaataatgccacatatctacaactatctgatctttggcaaacctgagaaaaacaagcaatggggaaaggattccctatttaataaatggtgctgggaaaactggctagccatatgtagaaagctgaaactggatcccttccttacaccttatacaaaaatcaattcaagatggattaaagatttaaacgttaaacctaaaaccataaaaaccctagaagaaaacctaggcattaccttttcaaaaaagattccttcatttaattag

SEQ ID NO: 5430 - DNA, 1041 bp, Homo sapiens
  SIMILAR (466)..(1038): 941254mologous to Homo sapiens putative p150,accession number U93574,Smith-Waterman Score=948.
gccccgagatcccactcgaggaggctcatcggaggaacagtgaggaacagtacactacaggtcaaagacaacagtgccatgggacgcagaaggacaatcgacccgttcaccaccggactcttcgacggtgtcgcaaatgaccggcactgtatcctagtgacaatccaccgcgcccgaccaaccgcgatcagtaggtccgaggggacaaccgttttccgccgtagtgttcaacggacgaacgtcaccgtaaatcgcagcagagtcctcaccatcaaacgagtgtttctggatgacgggacgttggagaatgatctaactacttctgacggcctggactcgcgtataaagacggaggggtggctcgggttgagggttcgtgtttggcgatgggacgggacatgggggtttaagggggtttacgaccttacggataacgagagggagggagacttttttgacggcgaagcccaaaatctccttaaggtgataagcaacttcagcaaagtctcaggatacaaaatcaatgtacaaaaatcacaggcattcttatacaccaacaacagacaaacagagagccaaatcatgagtgaactcccattcacaattgcttcaaagagaataaaatacctaggaatccaacttacaagggatgtgaagcacctcttcaaggagaactacaaaccactgctcaatgaaataaaagaggatacaaacaaatggaagaacattccatgctcatgggtaggaagaatcaatatcgtgaaaatggccatactgcccaaggtaatttacagattcaatgccatccccatcaagctaccaatgacttttcccgcggccatggaaaaaactactttaaagttcatatggaaccaaaaaagagcccgcattgccaagtcaatcctaagccaaaagaacaaagctggaggaatcacactacctgactttaaactatactacaaggctacagtaaccaaaatagcatggtactggtaccaaaacagagatatagatcaatggaacagatcagagccctcataa

SEQ ID NO: 5431 - DNA, 1575 bp, Homo sapiens
  SIMILAR (202)..(651): 971254mologous to Homo sapiens putative p150,accession number U93572,Smith-Waterman Score=732.
atggttgcatacctgtctgtggactctagaggatcccctttactagccaaagaggacattggctcatatttgcacgtccttggatgtggctgtgttgcccaagctattctcagtcgaggacgttttggaggggtcatcactatcaatgttggattttcaatggcagttgcaatggccatttatgtggctggcggtgtctctgtgttggaagttctggccagggcaatcatgcaggagaaggaaataaagggtattcaattaggaaaagaggaagtcaaattgtccctgtttgcagacgacatgattatttatctagaaaaccccatcgtctcagcccaaaatctccttgagctgataagcaacttcagcaaagtctcaggatacaaaatcaatgtacaaaaatcacaagcattcttatacaccaacaacagacaaacagagagccaaatcatgagtgaactcccattcacaattgcttcaaagagaataaaatacctaggaatccaacttacaagggatgtgaaggacctcttcaaggagaactacaaaccactgctcaaggaaataaaagaggatacaaacaaatggaagaacattccatgctcatgggtaggaagaatcaatatcgtgaaaatggccatactggccaagaagacagatggatcttggagaatgacagtggattatcgtaagcttaaccttgtggtgagtccagttgcagctgctgtaccagatgtggttgtactgcttgagcaaattaacacatctcctggtactcggtatgcagtcattgacttggcaaatgcctttttctccattcctggccataaggcccaccggaagcaatttgccttcagctggcaaagccagcaatatacctttactgtcctacctcatgggtatatcaactctctgccttggtgtcataatctttttctgagagaccttgatcgcttttcgcttccacaagatatcacactggtccatgacattgatgacattatgctgattggatccagtgagcaagaagtaacaagcacactggacttactcatgagatatttttgtgccagaggatgggaaataaatccaactaaaattcagggaacttctatgtcagtaaaatttctacgggtctggtgttctcccactggctatggttctgtgttatttttgagggatctgaactgcaaaagcgagttcccgcacagcttttctcagtcagtggccaccgcatgtgtggggagtgattgttggaaattttcaggaagttgccatgggtggatgaggatgcgcctctgtgactgcatgcagggaaaccaggaagtagtgaaggggcaaattttgttctataagataggtaccaacagttggcgtatttcctcagcacattctgaagtagaaagtgtggagtcttgccatttctggggcagaggctcaatcttacgtctgtcctgtccggaagttcttactcatatctccagaaccaagtcagctctcacatttgcagtcatgtctttccctgcttccctggcagttactcacacgttatctgtgttcctgcagcacttttag

SEQ ID NO: 5432 - DNA, 1293 bp, Homo sapiens
  SIMILAR (1)..(684): 981254mologous to Homo sapiens putative p150,accession number U93564,Smith-Waterman Score=1133.
atgattatctcaatagatgcagaaaaagcctttgacaaaattcaacaacccttcatgctaaaaactctcaataaattaggtattgatgggacgtatttcaaaataataagagctatctatgacaaacccacagccaatatcatactgaatgggcaaaaactggaagcattccctttgaaaactggcacaagacagggatgccctctctcaccgctcctattcaacatagtgttggaagttctggccagggcaatcaggcaggagaaggaaataaagggtattcaattaggaaaagaggaagtcaaattgtccctgtttgcagaccacatgattgtttatctagaaaaccccattgtctcagcccaaaatctccttaagctgataagcaacttcagcaaagtctcaggatacaaaatcaatgtacaaaaatcacaagcattcttatacaccaacaacagacaaacagagagccaaatcatgggtgaactcccattcacaattgcttcaaagagaataaaatacctaggaatccaacttacaagggatgtgaaggacctcttcaaggagaactacaaaccactgctcaaggaaataaaagaggacacaaacaaatggaagaacattccatgctcatgggtaggaagaatcaatatcgtgaaaatggccatactgcccaaggatattgcagcctctgccctgggagtgaactgggatgagggtgatcaggacccagtgtccttggcctgctgcacctggagtggagacttagcgggaggagctcccattttcttggctacccatggaggagcctctgtaacccagagctggggaaagtgtctcttgggcctacttgatcacacggtctcatctattaattgtgagtattctaagagttgggacgtgttcatcaatccaagtatccccacagtgcctgacacatatgtgcaaatccagttacagctccatgatttaccagaaagtgaagacacccgtgtatccaagggtgacgtagtgctgcaaagtgagcctccttttgagcagatccacacaaaatgtgcagataaacaagccttctacctcaggcctgcagcacgcctgctttctgacctgcttgagtgccagaaagaagaacctgctgactccaccactcgtctatatgtcttgactgtaggagagagagctttcctgatcccattcctatttgtggagtctgtgggagagcaagccatcttgccttcttgttatttctctccttcacccatgcatgacactgcaaagggtttgctggcttga

SEQ ID NO: 5433 - DNA, 987 bp, Homo sapiens
  SIMILAR (439)..(963): 1001254mologous to Cloning vector pSacBII SacB,accession number U09128,Smith-Waterman Score=937.
atgagtgaactcccattcagaattgcttcaaagagaataaaatacctaggaatccaacttacaagggacgtgaaggacctcttcaaggagaactacaaaccactgctcaatgaaataaaagaggatacaaacaaatggaagaacatttcatgctcatgggtaggaagaatcaatatcgtgaaaatggccatactgcccaagggaagcataggtttctgcctgcctgcagagtttaggcagaagtgggaccactgggctggaagcactagcaatgtgacccatctggccacaggaggtggaatgagtgaagtttcctgccctgccatctggtgcttccagtacaaaaggtggctgtgtaccttgacaaattcaggtagaagaaagactgctcagctggaagctctagcaagcataaacttcctggctaccagaggcagaggaggagcgactcaagccttcgcgaaagaaaataaccaaaaagcatacaaagaaacgtacggcgtctctcatattacacgccatgatatgctgcagatccctaaacagcagcaaaacgaaaaataccaagtgcctcaattcgatcaatcaacgattaaaaatattgagtctgcaaaaggacttgatgtgtgggacagctggccgctgcaaaacgctgacggaacagtagctgaatacaacggctatcacgttgtgtttgctcttgcgggaagcccgaaagacgctgatgacacatcaatctacatgttttatcaaaaggtcggcgacaactcaatcgacagctggaaaaacgcgggccgtgtctttaaagacagcgataagttcgacgccaacgatccgatcctgaaagatcagacgcaagaatggtccggttctgcaacctttacatctgacggaaaaatccgtttattctacactgactattccggtaaacattacggcaaacaaagcctgacaacagcgcaggggggtgctttagagtcgcactga

SEQ ID NO: 5434 - DNA, 1549 bp, Homo sapiens
  SIMILAR (215)..(1546): 931254mologous to Homo sapiens unknown protein,accession number M22334,Smith-Waterman Score=2230.
gtccaatatttccctgtattcagttgtttcattacggccacttcctgcagattatgtcccttcaatagtcatgcttcctggtacttgtcaaacccaagatgtagaagtatcagaagaaacagtagaaccaagtgatgaattgatagaatatgattcgccagaacagttgaatgagcaattggtgactctttcacttcttcctgaatcacgatggaaaaaccttcttaaccttgatgttattaagagggccctagaactacgatacaatatcaatgtgcaaaaatcacaagcattcctgtacaccaacaacagacaaacagagagccaaatcatgagtgaactcccattcacaatggcttcaaagagaataaaatacctaggaatccaacttacaagggatgtgaaggacctcttcaaggagaactacaaaccactgctgaaggaaataaaagaggatacaaacaaatggaagaacattccatgctcatgggtaggaagaatcaatatcgtgaaaatggccatactgcccaaggtaatttacaggttcagtgccatccccatcaagctaccaatgactttcttcacagaattggaaaaaactactttaaagttcatatggaaccaaaaaagagcccgcatcgtcaagtcaatcctaagccaaaagaacaaagctggaggcaccacactacctgacttcaaactatactacaaggctacagtaaccaaaatagcatggtactggtaccaaaacagagatatagatcaatggaacagaacagagccctcagaaataatgccgcatatctacaactatctgatctttgacaaacctgagaaaaacaagcaatggggaaaggattccttatttaataaatggtgctgggaaaactggctagccatatgtagaaagctgaaactggatcccttccttacaccttatacaaaaatcaattcaagatggattaaagacttaaacgttagacctaaaaccataaaaaccctagaagaaaacctaggcattaccattcaggacataggcatgggcaaggacttcatgtctaaaacaccaaaagcaatggcaacaaaacccaaaattgacaaatgggatctaatgaaactaaagagcttctgcacagcaaaagaaactaccatcagagtgaacaggcaacctacaaaatgggagaaaatttttgcaacctactcatctgacaaagggctaatatccagaatctacaatgaactcaaacaaatttacaagaaaaaaacaaacaaccccatcaaaaagtgggcaaaggacatgaacagacacttctcaaaagaagacatttatgcagccaaaaaacacatgaaaaaatgctcaccatcactggccatcagagaaatgcaaatcaaaaccacaatgagataccatctcccaccagttagaatggcaatcattaaaaagtcaggaaacaacaggtgctggagaggatgtggagaaataggaacacttttacactgttggagggactgtaaactagttcaaccattgcggaagacagtatggtga

SEQ ID NO: 5435 - DNA, 2379 bp, Homo sapiens
  SIMILAR (1)..(2103): 951254mologous to Homo sapiens unknown,accession number AF148856,Smith-Waterman Score=3515.
atggataaattccttgacacatacactctcccaagactaaaccaggaagaagttgaatctctgaatagaccaataacaggatctgaaattgtggcaataatcaatagcttaccaaccaaaaagagtccaggaccagatggattcacagccgaattctaccagaggtacaaggaggaactggtaccattccttctgaaactattccaatcaatagagaaagagagaatcctccctagctcattttatgaggccagcatcattctgataccaaagcctggcagagacacaaccaaaaaagagaattttagaccaatatccttgatgaacattgatgcaaaaatcctcaataaaatagtggcaaaacaaatccagcagcacatcaaaaagcttatccaccatgatcaagtgggcttcatccctgggatgcaaggctggttcaatatactcaaatcaataaatgtaatccagcatataaacagagccaaagacaaaaaccacatgattatctcaatagatgcagaaaaggcctttgacaaaattcaacaacccttcatgctaaaaactctcaataaattaggtattgatgggacgtatttcaaaataataagagctatctatgacaaacccacagccaatatcatactgaatgggcaaaaactggaagcattccctttgaaaacgggcacaagacagggatgccctctctcaccactcctattcaacatagtgttggaagttctggccaggccaattaggcaggagaaggaaataaagggtattcaattaggaaaagaggaagtcaaattgtccctgtttgcagatgacatgattgtatatctagaaaaccccattgtctcagcccaaaatctccttaagctgataaacaacttcagcaaagtctcaggatacaaaatcaatgtacaaaaatcacaagcattcttatacaccaacaacagacaaatagagagccaaatgatgagtgaactcccattcacaattgcttcacagagaataaaatacctaggaatccaacttacaagggatgtgaaggacctcttcaaggagaactacaaaccactgctcaatgaaataaaagaggatacaaacaaatggaagaacattccatgctcatgggtaggaagaatcaatatcgtgaaaatggccatactgcccaaggtaacttacagattcaatgccatccccatcaagctaccaatgcctttcttcacagaattggaaaaaactactataaagttcatatggaaccaaaaaagagcccgcatcgccaagtcaatcctaagccaaaagaacaaagctggaggcatcacactaccagacttcaaactatactacaaggctacagtaaccaaaacagcatggtactggtaccaaaacagagatatagatcaatggaacagaacagagccctcagaaataacgccgcatatctacgactatctgatctttgacaaacttgagaaaaacaagcaatggggaaaggattccctatctaataaatggtgctgggaaaactggctagccatatgtagaaagctgaaactggatcccttccttacaccttatataaaaatcaattcaagatggattaaagacttaaacgttagacctaaaaccataaaaacgctagaagaaagcctaggcattaccattcaggacataggcatgggcaaggacttcatgtctaaaacaccaaaagcaatggcaacaaaagacaaaattgacaaatgggatctaattaaactaaagtgcttctgcacagcaaaagaaactaccatcagagtgaacaggcaacctacaacatgggagaaaattttcgcaacctactcatctgacaaagggctaatatccagaatctacgatgaactcaaacaaatttacaagaaaaaaacaaacaaccccatcaaaaagtgggcaaaggacatgaacagacacttctcaaaagaagacatttatgcagccaaaaaacacatgaaaaaatgctcatcatcactggccatcagagaaatgcaaatcaaaaccacaatgagataccatctcacaccagttagaatggcaatcattaaaaagtcaggaaagaacagacgcacagcaactttaagtttgctgccagctatacgtcatgaaagggaagcttttcatcaaagggaagaagaaaaggaagggggaagaatcctacctttacaaaacagagtaattctttgcttctgctccctttgcccacatctctcacctgcgtccaaaccaaaacacaggggcctaggtcgctttaagtcacaaagcacctctatgttctcaggtgtgctcagcgttcggaattctctgcatgctcctcaggttgtttcctggttgcagcgctaa

SEQ ID NO: 5436 - DNA, 1827 bp, Homo sapiens
  SIMILAR (247)..(1563): 961254mologous to Homo sapiens unknown protein,accession number M22334,Smith-Waterman Score=2229.
atgccagccataagcaaactgcttctggtgagccttatggaaagctatggagaaaaaggcattcgccagtccaatagctatgtaccaagtttggaacgtgggcacacttgtgttggcagtggcaccagtggccaaggatcaggctcccattacagcagtggcacaagtgtgcaaggcacagctgctcacagaccagccacagagctagggtcaggagcatgggtatgcatgggtgggccatgcccaggaaaagaggaagtcaaattgtccctgtttgcagatgacatgattgtatatctagaaaaccccattgtctcagcccaaaatctccttaagctgataagcaacttcagcaaagtctcaggatacaaaatcaatgtacaaaaatcacaagcattcttatacaccaataacagacaaacagagagccaaatcatgagtgaactcccattcacaattgcttcaaagagaataaaatacctaggaatccaacttacaagggatgtgaaggacctcttcaaggagaactacaaaccactgctcaaggaaataaaagaggatacaaacaaatggaagaacattccatgctcatgggtaggaagaatcaatatcgtgaaaatggccacactgcccaaggcaatttacagattcaatgccatccccatcaagctaccaatgcctttcttcacagaattggaaaaaactactttaaagttcatatggaaccaaaaaagagcccacatcgccaagtcaatcctaagccaaaagaacaaagctggaggcatcacactacctgacttcaaactatactacaaggctacagtaaccaaaacagcatggtactggtaccaaaacagagatatagatcaatggaacagaacagagccctcagaaataaagccgcatatctacaactatctgatatttgacaaacctgagaaaaacgagcaatggggaaaggattccctatttaataaatggtgctgggaaaactggctagccatatgtagaaagctgaaactggatcccttccttacaccttatacaaaaatcaagtcaagatggattaaagacttaaacgttagacccaaaaccataaaaaccctagaagaaaacctaggcattaccattcaggacataggcatgggcaagggcttcatgtccaaaacaccaaaagcaatggcaacaaaagacaaaattcacaaatgggatctaattaaactaaagagcttctgcacagcaaaagaaactaccatcagagtgaacaggcaacgtacaacatgggagaaaattttcgcaacctacttatctgacaaagggctaatatccagcatctacaatgaactcaaacaaatttacaagaaaaaaacaaacgaccccatcaaaaagtgggcgaaggacatgaacagacacttctcaaaagaagacatttatgcagccaaaaaacacatgagaaaatgctcatcatcactggccatcagagaaatgcaaatcaaaaccacaatgagataccatctcacaccagttagaatggcaatcattaaaaagtcaggaaacaacagaggtttgaccgaggaggaaagaatggcagttccacatcatgactgtcaactgagcatctcagctaagccatgtaacagaacaggtgggggagaaaaggaagaagcagcagcaaggagttttccccagagaaagaggactggcagtgtccgcggcagggaggcagcacgctggcttggtttccatcttgctacaatcccaaatatatccatgagtagggagacagtagtgggtttccaggggagatggagaaatgatgctagttaa

SEQ ID NO: 5437 - DNA, 1074 bp, Homo sapiens
  SIMILAR (1)..(669): 931254mologous to Homo sapiens putative p150,accession number U93563,Smith-Waterman Score=1068.
atgaaggcagaaataaagatgttctttgaaaccaacgagaacaaagacacaacataccagaatctctgggacacattcaaagcagtgtgtagagggaaatttatagcactaaatgcccacaagagaaagcaggaaagatccaaaattgacaccctaacatcacaattaaaagaactagaaaagcaagaacaaacacatttaaaagccagcagaaggcaagaagtaactaaaatcagagcagaactgaaggaaatagagacacaaaaaacctttcaaaaaattaatgaatcaaggagctggttttttgaaaggatcaacaaaattgatagaccactagcaagactaataaagaaaagagagaagaatcaaatagatgcaataaaaaatgataaaggggatatcaccaccgatcccacagaaatacaaactgccatcagagaatactacaaacacctctacgcaaataaactagaaaatctagaagaaatggataaattcctcgacacatacaccctcccaagactaaaccaggaagaagttgaatctctgaatagaccaataacaggctctgaaattgcagcaataatcaatagcttaccaaccaaaaagagtccaggaccagatggattcacagccgaattctaccagagacaaacagagagccaaatcatgagtgaactcccattcacaattgcttcaaagagaataaaatacctaggaatccaccttacaagagatgtgaaggacctcttcaaggagaactacaaaccactgctcaatgaaataaaagaggatacaaacaaatggaagaacattccatgctcatgggtaggaagaatcaatatcgtgaaaatggccatactgcccaaggccagtgcccatggaagttccaggtctgcccccacatacttaatcaacaggtccaccccagtggatctaggttccaggctcaatttccaacctggatccacagggacccagtatgttcccagcaaagccaatatgcaaagactggagtactttttcaaatacgttgccaccaatgcaaggccatttcactgggtacctggttaa

SEQ ID NO: 5438 - DNA, 1839 bp, Homo sapiens
  SIMILAR (181)..(1557): 961254mologous to Homo sapiens putative p150,accession number U93564,Smith-Waterman Score=2349.
atggatacattcctcgacacatacactctcccaagactaaaccaggaagaagttgaatctctgaatagaccaataacaggagctgaaattgtggcaataatcaatagtttaccaaccaaaaagagtccaggaccagatggattcacagccgaattctaccagaggtacaaggaggaactgggatgccctctcttaccgctcctattcaacatagtgttggaagttctggccagggcaatcaggcaggagaaggaaataaaaggtattcaattaggaaaagaggaagtcaaattgtccctgtttgcagacgacatgattgtttatctggaaaaccccatcgtctcagcccaaaatctccttaagctgataagcaacttcagcaaagtctcaggatacaaaatcaatgtacaaaaatcacaagcattcttatacaccaacaacagacaaacagagagccaaatcatgagtgaactcccattcacaattgcttcaaagagaataaaatacctaggaatccaacttacaagggatgtgaaggacctctttgaggagaactacaaaccactgctcaatgaaataaaagaggatacaaacaaatggaagaacattccatgctcatgggtaggaagaatcaatatcgtgaaaatggccatactgcccaaggtaatttacagattcaatgccatccccatcaagctaccaatgactttcttcacagaattggaaaaaactactttaaagttcatatggaaccaaaaaagagcccgcatcaccaagtcaatcctaagccaaaagaacaaagctggaggcatcacactacctgacttcaaactatactacaaggctacagtaaccaaaacagcatggtactggtaccaaaacagagatatagatcaatggaacagaacagagccctcagaaataatgccgcatacctacaactatctgatctttgacaaacctgagaaaaacaagcaatggggaaaggattccctatttaataaatggtgctgggaaaactggctagccatatgtagaaagctgaaactggatcccttccttacaccttatagaaaaatcaattcaagatggattaaagatttaaatgttagacctaaaaccataaaaaccctagaagaaaacctaggcattaccattcaggacataggcgtgggcaaggacttcatgtccaaaacaccaaaagcaatggcaacaaaagccaaaattgacaaatgggacctaattaaactaaagagcttctgcacagcaaaagaaagtaccatcagagtgaacaggcaacctacaacatgggagaaaattttcacaacctactcatctgacaaagggctaatatccagaatctacaaagaactcaaacaaatttacaagaaaaaaacaaacaaccccatcaaaaagtgggtgaaggacatgaacagacacttctcaaaagaagacatttatgcagccaaaaaacacatgaaaaaatgctcatcatcactggccatcagagaaatgcaaatcaaaaccactatgagatatcatctcacaccaacccagaaagaagagggcagcacacctcagggccagcaggaggaaggggagtcatccaggacatgtactctcaactggcggttgggaagaagacagaaagagatagacatgtgggtcgaagtctttactggggtccgtcgtgttacccaaggtacagttgtcagagaaggctgtggtgaagttgtgctgagatccgggatgccagtcttcaggcttcagtggtggcagcagggagctgactgtgcctgcccttgggcccaaggtggcatacattggtaccagtgttag

SEQ ID NO: 5439 - DNA, 1368 bp, Homo sapiens
  SIMILAR (334)..(1200): 861254mologous to Homo sapiens putative p150,accession number U93574,Smith-Waterman Score=1308.
atggccctggaggcctcaggaaacttacaatcatggccaatggcgaaggggaagcaaggcatcttcttcacaaggaggcaggaaggacaagtgccaagagaagcaggaagagctcctataaaaccatcagatcttattctggatattagccctttgtcagatgagtgggttgcgaaaattttctcccattttgtgggttgccggttcactctgacggtagtttcctttgctgtgcagaagctctttagtttaattacatcccatttgtcaattttggcttttgttgccattgcttttggtgttttagacatgaagtccttgcctgtgcctatgtcttttaggcaggagaaggaaataaagggtattcaattaggaaaagaggaagtcaaattgtccctgtttgcagatgacatgattgtatatctagaaaaccccattgtctcagcccaaaatctccttaagctgataagcaacttcagcaaagtctcaggatacaaaatcaatgtgcaaaaatcacaagcattcttatacaccaataacagacaaacagagagccaaatcatgagtgaactcccattcacaattgcttcaaagagaataaaatacctaggaatccaccttacaagggacgtgaaggacctcttcaaggagaactacaaaccactgctcaatgaaataaaagaggatacaaacaaatggaagaacattccatgctcatgggtaggaagaatcaatatcgtgaaaatggccatactgcccaaggtaatttatagattcaatgccatccccatcaagctaccaatgactttcttcacagaattggaaaaaactactttaaagttcatatggaaccaaaaaagagcccgcatcgccaagtcaatcctaagccaaaagaacaaagctggaggcatcacgctacctgacttcaaactatactacaaggctatagtaaccaaaacagcatggtactggtaccgaaacagagatatagatcaatggaacaaagcagagccctcagaaataatgccacatatctacaactatctgatctttgacaaccctgagaaaaacaagcaatggggaaaggattccctatttaataaatgtgtggaagaatcattagttaataagtcactgcagctgaagcagggagtgcctcctaagtcctttgcctgtgaagtcaacgttcttccctccaccccacctgctttatgccttgttattgtccacaaggatgatttttcaaagcagatgatagaggccagagttcataaagtagaaactcactctaaggaacaatggaaaagaaaatcttcaagaatttgcagtattttctacggaaaacgaggggtccatggggaccattga

SEQ ID NO: 5440 - DNA, 1887 bp, Homo sapiens
  SIMILAR (1)..(918): 961254mologous to Cloning vector pZC320 SopA,accession number U26464,Smith-Waterman Score=1554.
atgaaactcatggaaacacttaaccagtgcataaacgctggtcatgaaatgacgaaggctatcgccattgcacagtttaatgatgacagcccggaagcgaggaaaataacccggcgctggagaataggtgaagcagcggatttagttggggtttcttctcaggctatcagagatgccgagaaagcagggcgactaccgcacccggatatggaaattcgaggacgggttgagcaacgtgttggttatacaattgaacaaattaatcatatgcgtgatgtgtttggtacgcgattgcgacgtgctgaagacgtatttccaccggtgatcggggttgctgcccataaaggtggcgtttacaaaacctcagtttctgttcatcttgctcaggatctggctctgaaggggctacgtgttttgctcgtggaaggtaacgacccccagggaacagcctcaatgtatcacggatgggtaccagatcttcatattcatgcagaagacactctcctgcctttctatcttggggaaaaggacgatgtcacttatgcaataaagcccacttgctggccggggcttgacattattccttcctgtctggctctgcaccgtattgaaactgagttaatgggcaaatttgatgaaggtaaactgcccaccgatccacacctgatgctccgactggccattgaaactgttgctcatgactatgatgtcatagttattgacagcgcgcctaacctgggtatcggcacgattaatgtcgtatgtgctgctgatgtgctgattgttcccacgcctgctgagttgtttgactacacctccgcactgcagtttttcgatatgcttcgtgatctgctcaagaacgttgatcttaaagggttcgagcctgatctgataagcaacttcagcaaagtctcaggatacaaaatcaatgtacaaaaatcacaagcattcttatacaccaacaacagacaaacagagagccaaatcatgagtgaactcccattcacaattgcttccaagagaataaaatacctaggaatccaacttacaagggatgtgaaggacctcttcaaggagaactacaaaccactgctcaaggaaataaaagaggatacaaacaaatggaagaacattccatgctcatgggtaggaagaatcaatatcgtgaaaatggccatactgcccaagttttctgctgaagtgaggaaggaacaggcacccacactgactgggtacatgaggattccagagaacaagccatttcacaatcagaatttcatcaaatcctcctgtttctggtctcttttgcagccctattttaataggtacctggtgttgacaatttctaaccctttctttgttcggtgtggagttttatgggacaatggaggtagagcaaaacagaaaagggataccattgctactgcctctaaaccaggtctagtaattgctactactgtaaacctgaaagggcaagaagagagagcagttgtaggaccgggcaagtactttagctgtaagagaagagctgtggcttttagtcaagcagagttgtcactgcataaagtggacagccagggaggacccagagtgctgattggtgcatttttacagagtgctgattggtgcatttacaatcctctagctagacagaaaagttctccaagtccccacttgacccaggaattccagctggcttcacctctcaatcccccctctaatcacgacaccccaacagctgttgggaattgggcaatgaccactctagctacttccaaaataagagtcgtcagcatgcaagttcagacagtcacaaaattgaaaacagttactaatgttgttggatttgtaatgggcttgacatctccaggcaagtcttcctactga

SEQ ID NO: 5441 - DNA, 1056 bp, Homo sapiens
  SIMILAR (139)..(801): 951254mologous to Homo sapiens putative p150,accession number U93574,Smith-Waterman Score=1061.
atggatagagctgaaggccattatcctaagtcaactagaacaggaagagaaagccaaataccacatgttcttacttataaatgggagctaaaactgagtacatgtggacacaaaaaagggaacaacaggtgcttgggcctatttgaggtgttggaagttctggccagggcaatcaggcaggagaaggaaataaagggtattcaattaggaaaagaggaagtcaaattatccctgtttgcagatgacatgattgtatatctagaaaaccccattgtctcagcccaaaatctccttaagctgataagcaacttcagcaaagtctcaggatacaaaatcaatgtacaaaaatcacaagcattcttatacaccaataacagacaaacagagagccaaatcatgagtgaactcccattcacaattgcttcaaagagaataaaatacctaggaatccaacttaaaagggatgtgaaggacctcttcaaggagaactacaaaccactgctcaatgaaataaaagaggatacaaagaaatggaagaacattccatgctcatgggtaggaagaatcaatatcgtgaaaatggccatactgcccaagataatttatagattcaatgccatccccatcaagctaccaatgactttcttcacagaattggaaaaaactactttaaagttcatatggaaccaaaaaagagcccgcaccaccaagtcaatccttagccaaaagaacaaagctggaggcatcatgctacctcacttcaaactatactacaaggctacagtaaccaaaacagcatgggccacttttaagaaagaattaggattgtttattgtcttactcactttgggctgctgtaacaagtatcagagactaaatggcttaaacagaaatttatttctcacatttctggaggctagaaagtccaagatcaaggtgctggcagacccgatgtctggctcttctgctctgcttaagaaggagccctcagggaacatacgacctgcacaattattgcccctcttattttctgcagacccgtgtaattacgggtaa

SEQ ID NO: 5442 - DNA, 2532 bp, Homo sapiens
  SIMILAR (670)..(1572): 951254mologous to Homo sapiens putative p150,accession number U93565,Smith-Waterman Score=1462.
atggagaagaattttattgagcgatggaacagctctcagcggagaggggatgtggtaggtggaggtggtcccccacccctgcagtcaggtggtttctcacccaatgtggctaggtctgggcatttatggattcagaatggaaagtgtgtgctgattggtttaaatgcaagggaagtgatacgtttttatatcaatcagggtccattcagaaacagatatcatattggcgattttaacaggaaaaatttaaagaattattttctagtaaaagatgatcagttactaaaagaggactctatgatacagaagaagcagctacgaaaaggagctgttacttctagggctgaagaagagttaataaaggagttacttaagttaaaggaaatgctcccttccccacctgcaagattagagattcagatctctgaggggagggacaagaactcgggacctgccgaacagcgggtgcaaaagaacagcaggctcccaaagtgtggggattaccggcatgagccactgcacctgacctttgaagttccgcagttgctggtgtcttttgagttttttggacgccactgcgttcccttcgttcatatgccagtgcccaaggcagaagctgcttgcagtatacctgatccagccacagcttcacatgaagctggtgcctggagaaccaaagacaaaaaccacatgattatctcaatagatgcagaaaaggcctttgacaaaattcaacaacacttcatgctaaaaactctcaataaattaggtattgatgggatgtatctcaaaataataagagctatctatgacaaacccacagctgatatcatactgaatgggcaaaaactggaagcattccctttgaaaatgggcacaagacagggatgccctctctcaccactcctattcaacatagtgttggaagttctggccagggcaatcaggcaagagaaggaaataaagggtattcaattaggaaaagaggaagtcaaattgtccctgtttgcagatgacatgattgtatacctagaaaaccccattgtctctgcccaaaatctcctcaagctgataagcaacttcagcaaagtctcaggatacaaaatcaatgtacaaaaatcacaagcattcttatacaccaataacagacaaacagagagccaaatcatgagtgaactcccattcacaattgcttcaaagagaataaaatacctaggaatccaacttacaagggatgtgaaggacctcttcaaggagaactacaaaccactgctcaatgaaataaaagaggacacaaagaaatggaagaacattccatgctcatgggtaggaagaatcaatatcgtgaaaatggccatactgcccaaggtaatttatagattcaatgccatccccatcaagctagcaatgactttcttcacagaattggaaaaaactactttgaaattcatatggaaccaaaaaagagtccacattgccaagtcaatcctaagccaaaagaacaaagctggaggcatcacgctacctgaattcaaactgtactacaaggctacagtaaccaaaacagcatggcttgcagtggtgtcaatgcgtttgaaacagcagtcacctcttactgcctgcaagggtagtggctgggtgaggtgcatggtgcactgggtcagcatgggactggagacttgtggggcacatatgggcactagttctaaagggtgtgtcatggcattgggtctgatagagggtgtggctgaggctctagctttggagggggtgcagcagtgtgagttctgggcagctccatcggctggtgtcagcattcttgaagactgtgggggtccttggcagttaaggctgtgggtatttgtggcagtggggatggctgctagagtcctgagtggcacagattcacatattgaagccctaatcctcagtgtgactgtatttggagatggagtgtttaaggaagtaattaaggttaaatcaggttacaaggagttgcctacggcaacccaagcccagaatgactatggaccacagcaaaaatcttcctcttccaggccttcttgttcttgccttgtggcaatagctttggggcttctgactgcagttcttctgagtgtgctgctataccagtggatcctgtgccagggctccaactactccacttgtgccagctgtcctagctgcccagaccgctggatgaaatatggtaaccattgttattatttctcagtggaggaaaaggactggaattctagtctggaattctgcctagccagagactcacacctccttgtgataacggacaatcaggaaatgagcctgctccaagttttcctcagtgaggccttttgctggattggtctgaggaacaattctggctggaggtgggaagatggatcacctctaaacttctcaaggaatacaaatggaacaattatccgcaaaagaaagcaccttcataagaaccaaaaatcagatgagcagtcacagtacctggttttaacatcatatcaacaaaagaggcactga

SEQ ID NO: 5443 - DNA, 2376 bp, Homo sapiens
  SIMILAR (1390)..(2166): 841254mologous to Homo sapiens putative p150,accession number U93564,Smith-Waterman Score=1055.
atgtcagtaaaatttccaacaggtataatcaagccaaattcaattacttctcttaatctggttaatgacaccaaatgcccaccaaaggccagcattgtttcacttaatgcccctgcctttgagtctgacagcaatgacaataatgtcactaccatgcctaaggtagatggtgtcagctccataaaattaagatttctattaattccctatcaaaaagtaactagaatggcacttcctcttggtgaaaatgatgaatctttatctgatacactggtgacattagaggtatcagagccactgggagaacactctaccatcaccaaccaaaactgggaaatcaccaaagcacaaagtgcctttcagccttttcccatggtctttcctattcctctggtagatcctgctactttttcagagaaacccataaatgtagccactgacatacctaccactgaaaatgaggtcattaatgataaaactaacaccagggtcttttcacctaatatggtccttcaacctgtaatccacaaaaatgaaggaataaataaaactcctaactatgatgtaaatcaagcagttattaaattttctgcaaaagaaattgctactgcaggaactaaggctaatgcattcctcaatagcaataaggctgttgcagaagatgaattctatatttctgaagccaatattccagtgaacttaagagatataaatgcagtgggagttgatcctttcatccttaagcctgatgcggcttctgctgaacagaaagcacctgaaaattccaaagaaacattttaccttgcttccacaatgagcacaacaaagcagacaaagatcagggttaggggctcattttctcttgataatgattacttagagaggtccatcacaaactcttatgataaagtgtatcaactacccctgaaatcaactcttttgcccactaattttattgaaatctataattctgaacttgcttcagcactcattataggagagagcaacataatgactgatgactttatcatatctaatgatataattggtctatctgacgaagaaaccatttcacctgacaatatcatctttattgaaaacatgaacaacataaatctttccagcacatggagcaccagtccaacaggcattacaactgaacccaccagtgtaaataatacctcaactagtacaagcaaccctgtacctagagtcactactaatttagccacaatcactagtactttatccaacagcaaaatgtctacgtcagttgctccaactagggcaactgccactactgctaagggactagatggaatcaccagaacacctcaaaccctatcccctgtcactgtaaccccaatgacatcaaacactaactcagaaatagctgctgtatctacaaagccggcatcaactgcaactgtcccagcatctgtgttggcctcagaggcaccttcagtggaatccacacctcaagggtctgctgcttccagtgcctcagcccctaccaacccaggagtgttggaagttctggccagggcaatcaggcaggagaaggaaataaagggtattcaattaggaaaagaggaagtcaaattgtccctgtttgcagacgacatgattgtttatgtagaaaaccccatcgtctcagcccaaaatctccttaagctgataagcaacttcagcaaagtctcaggatacaaaatcaatgtacaaaaatcacaagcattcttatacaccaacaacagacaaacagagagccaaatcatgggtgaactcccattcacaattgcttcaaagagaataaaatacctaggaatccaacttacaagggatgtgaaggacctcttcaaggagaactacaaaccactgctcaatgaaataaaagaggacacaaacaaatggaagaacattccatgctcatgggtaggaagaatcaatattgtgaaaatggccatactgccccaggtcatttacagattcaatgccatccccatcaagctaccaatgcctttcttcacagaattggaaaaaactactttaaagttcatatggaaccaaaaaagagccctcatcgccaagtcaatcctcagccaaaagaacaaagccggaggcatcacgctgcctgacttcaaactatactacaaggctacaataaccttaccctggggcacagcactatcctccaagtcacagggagcttctgaccacaaaaagagagggagagaagccaatcttaagaggcaaagactcctgaccatgaagaaagaacgttaccctgaggagattcccaaagttaaactagctctacatgaggatgcattaaagaacactcataacttcaaggcaccaagaacagtgggaaattaa

SEQ ID NO: 5444 - DNA, 2364 bp, Homo sapiens
  SIMILAR (331)..(1839): 951254mologous to Homo sapiens putative p150,accession number U93572,Smith-Waterman Score=2497.
atgacaatagctcattcttttgactactggatctttgtagaaagttttgaatacagaaaggaacaatgtctgatgttgaattctctactaagtaacagaattgggattgctattgatttagtaaagaagaaaggtggatattttctgcacgtgagagactgtgccttaaaattgatacctgttgcgcaaaaacagtctttgggaataagaaaggaaagtagtacctttctcagtgacagctacccctcagacagaattgccttcagctcctgtgacaaattaggaatgaatcccaacgtcatatctaaggtccctgcatctttattagtggtggatgacatcatctctgtgaagtcaaaaaggaggggtgaaaggaaagaagttgaatctctgaatagaccaataacaggatctgaaattgtggcaataatcaatagtttaccaaccaaaaagagtccaggaccagatggattcacagccgaattctaccagaggtacaaggaggaactggtaccattccttctgaaactattccaatcaatagaaaaacagggaatcctccctaactcattttatgaggccagcatcattctgataccaaagcctggcagagacacaaccaaaaaagagaattttagaccaatatccttgatgaacattgatgcaaaaatcctcaataaaatactggcaaaccgaatccagcagcacatcaaaaagcttatccaccatgatcaagtgggcttcatccctgggatgcaaggctggttcaatatacgcaaatcaataaatgtaatccagcatataaacagagccaaagacaaaaaccacatgattatctcaatagatgcagaaaaagcctttgacaaaattcaacaacccttcatgctaaaaactctcaagaaattaggtattgatgggacgtatttcaaaataataagagctatctatgacaaacccacagccaatatcatactgaatgggcaaaaactggaagcattccctttgaaaactggcacaagacagggatgccctctctcaccgctcctattcaacatagtgttggaagttctggccagggcaatcaggcaggagaaggaaataaagggtattcaattaggaaaagaggaagtcaaattgtccctgtttgcagacgacatgattgtttatctagaaaaccccatcgtctcagcccaaaatctccttaagctgataagcaacttcagcaaagtctcaggatacaaaatcaatgtacaaaaatcacaagcattcttatacaccaacaacagacaaacagagagccaaatcatgagtgaactcccattcacaattgcttcaaagagactaaaatacctaggaatccaacttacaagggatgtgaaggacttcttcaaggagaactacaaaccactgctcaaggaaataaaagaggacacaaacaaatggaagaacattccatgctcatgggtaggaagaatcaatatcgtgaaaatggccatactgcccaaggtaatttacagattcaatgccatccccatcaagctaccaatgactttcttcacagaattggaaaaaactactttaaagttcatatggaaccaaaaaagagcccgcatcgccaagtcaatcctaagccaagagaacaaagctggaggcatcacactacctgacttcaaactatactacaaggctacagtaaccaaaacagcatggtactggtaccaaaacagagatatagatcaatggaacagaacagagccctcagaaataatgccgcatatctacaactatctgatctttgacaaacctgagaaaaacaagcaatggggaaaggattcactactaaaagtctttaaaacaactgtcttatatatactaaaaaagcctaaggaaaatgtggacaaacaactaaaagaaattagaaaactgatacatgaacaaaacaagtctgctccagaacatggccagccctacagctccggctggaaggccagtccacaaagatttggaatccagttatgtctagactctagaacagccccagtgctgctaaggccccaggtgttaggcttgccccaggctgcagaccagcaactacagatttcagatctaggccagcacccatcatccaaggcaccagtctttgctcagttccaggcccattccaggttccagactggtctccacagacacaagctccagagaaaccaagatccaagtcaacctcagtggattctagtgctgggtcaaccatcacagactcagctacagaaccaaccctgcagacacaatctccaggcagatacccatgttctcattattcaggcttgtccacagactcaagttctaggcctgcccattcactga

SEQ ID NO: 5445 - DNA, 2277 bp, Homo sapiens
  SIMILAR (172)..(1752): 951254mologous to Homo sapiens putative p150,accession number U93564,Smith-Waterman Score=2634.
atggataaattcctcgacacacacactctcccaagactaaaccaggaagaagttgaatctctgaatagaccaataacaggatctgaaattgtggcaataatcaatagcttaccaactgaaaaaagtccaggaccagatggattcacagccaaattctaccagagatgcagaaaagcctttgacaaaattcaacaacctttcatgctaaaaactctcaataaattaggtattgatgggacgtatttcaaaatgataagagctatctatgacaaacccacagccaatatcatactgaatgggcaaaaactggaagcattccccttgaaaactggcacaagacagggatgccctctctcaccactcctattcaacatagtgttggaagttctggccagggcaattaggcaggagaaggaaataaaaggtattcaattaggaaaagaggaagtcaaattgtccctgtttgcagacgacatgattgtatatctagaaaaccccatcgtctcagcccaaaatctccttaagctgataagcaacttcagcaaagtctcaggatacaaaatcaatgtacaaaaatcacaagcattcttatacaccaataacagacaaacagagagccaaatcatgagtgaactcccattcacaattgcttcaaagagaataaaatacctaggaatccaacttacaagggatgtgaaggacctcttcaaggagaactacaaaccactgctcaaggaaataaaagaggatacaaacaaatggaagaacattccatgctcatgggtaggaagaatcaatatcgtgaaaatggccatactgcccaaggtaatttacagattcaatgccatccccatcaagctaccaatgactttcttcccagaattggaaaaaactactttaaagttcatatggaaccaaaaaagagccctcatcgccaagtcaatcctgagccaaaagaacaaagccagaagcatcacgctacctgacttcgaactatactacaaggctacagtaaccaaaacagcctggtactggtaccaaaacagagatatagaccaatggaacagaacagagccctcagaaataatgccgcatatctacaactatctgatctttgacaaacctcacaaaaacaagcaatggggaaaggattccctatttaataaatggtgctgggaaaaatggctaaccatatgtagaaagctgaaactggatcccttccttacaccttatacaaaaattaattcaagatggattaaagacttacatgttagagctaaaaccataaaaaccctagaagaaaaactaggcaataccattcaggacataggcatgggcaaggacttcatgtctaaaccaccaaaagcaacggcagcaaaagccaaaattgacaaatgggatctaattaaactaaagaacttctgcacagcaaaagaaactaccatcagagtgaacaggcaacctacaaaatgggagaaaattttcacaacctactcatctgacaaagggctaatatccagaatctacaatgaactccagcaaatttacaagaaaaaaacaaacaaccccatcaaaaagtgggcgaaggacatgaacagacacttctcaaaagaagacatttatgcagccaaaaaacacatgaaaaaatgctcaccatcactggccatcagagaaatgcaaatcaaaaccacaatgagataccatctcacaccagttagaatggcaatcattaaaaagtcaggaaacaacaggagacatttggcagtgtctggagacatttctggctgtcacaacctagggaggaaagttgcaggtattgagtgggtcgagggtggtgatgctgctaaacatcctgcaaggcacaggataatagcccgcaacaaagaactgtcccaaaatgccaatcatgccaagcttgagaagccctgtatgaggtggtggcaagagttacagggaaaacaatccgagaaaggtcaaagggagtcccaggggcaaggtggagggggtgaggagttgttcagggaagagctcaccaggaagatgacatctgaacaaaaacctgcaaaaggagcagcggggagctgctgtagatatctgcaggaagagcatcataggacaggaaatgacaaatgtgaaggccctgagggaggaacatgttgggcaagttccgggaaagcaggagaccaatgtggcaggggcagagtgagcaaaaggaggaggagcagaaatgaaaatcttacggggcccagatgtgtcgagcgtcagcttgtgctctga

SEQ ID NO: 5446 - DNA, 2044 bp, Homo sapiens
  SIMILAR (475)..(1404): 971254mologous to Homo sapiens putative p150,accession number U93563,Smith-Waterman Score=1618.
atggcgtccccaggacctgcacccacagccagtcccaaaatccactctgagctgttaacagcaaccagagaagctcagagacatcatcctgtgccccgtggtcaagacctagtgacctcagaatcattctcgctctccttctgcttctcagctgccatcttcatttttgaacttttgggttcaaactcagaaggagtcacagatcttagactgtggctatgccagccagcgcccaggtgcggggagtggacctacaaccccttggagcagtgctgtgatgacggtgtcatcctagacttgaaccagacccggctctgcggctccagctgcaccttctggccctgcttccagcactgctgcctggagtctttgggctctcagaaccagacagttgtgaggttcaaggtcccaggcatgaagccagattgcaagtcctcccctatcaccaggatctgtgcccaggctggagtgcaaataagcaacttcagcaaagtctcaggatacaaaatcaatgtacaaaaatcacaagcattcttatacaccaacaacagacaaacagagagccaaatcatgagtgaactcccattcacaattgcttcacagagaataaaatacctaggaatccaacttacaagggatgtgaaggacctcttcaaggagaactacaaaccactgctcaaggaaataaaagaggatacaaacaaatggaagaacattccatgctcatgggtaggaagaatcaatatcgtgaaaatggccatactgcccaaggtaatttacagattcaatgccatccccatcaagctaccaatgactttcttcacagaattggaaaaaactactttaaagttcatatggaaccaaaaaagagccctcatcgccaagtcaatcctaagccaaaagaacaaagctggaggcatcacactacctgacttcaaactatactataaggctacagtaaccaaaacagcatggtactggtaccaaaacagagatatagatcaatggaacagaacagagccctcagaaataacgccgcatatctacaactatctgatctttgacaaacctgagaaaaacaagcaatggggaaaggattccctatttaataaatggtgctgggaaaactggctagccatatgtagaaagctgaaactggatcccttccttacaccttatacaaaaatcaattcaagatggattaaagacttaaacgttagacctaaaaccataaaaaccctagaagaaaacctaggcattaccattcaggacataggcatgagcaaggacttcatgtctaaaacaccaaaagcaatggcaacaaaagacaaaattgacaaatgggatctaattaaactaaagagcttctgcacagcaaaagaaactaccatcagagttgaacaggcaacctacaaaatgggagaaaatttttgcaacctactcatctgacaaagggctaatatccagaatctacaatgaactcaaacaaatttataagaaaaaaacgaacaaccccatcaaaaagtgggcgaaggacatgaacagacacttctcaaaagaagacatttatgcagccaaaaaacacatgaaaaaatgctcactatcactggctatcagagaaatgcaaatcaaaaccacaaatcaaaaccacaatgagataccatctcacaccaggacatggatgaaattggaaatcatcattctcattaactatcgcaagaacaaaaaaccaaacaccgtattgaacaatgagaacacatggacacaggaaggggaacatcacactctggggaatgttgtgggctcactcgctatggtgtggagaattcctgcaggagcacacagtgggagccggaagggcagtcagaaagctgttgtggggctctgggtgaaacttggtggctattctcaccagggtactgtgtctgtgtacctcattccttttggtcataagacaagaactcagaactcaccaaactgtgagagtaaaatagctgtaacactccctcctgctcgccaaactctgggagaaaagaagctgtaa

SEQ ID NO: 5447 - DNA, 1875 bp, Homo sapiens
  SIMILAR (238)..(1770): 961254mologous to Homo sapiens unknown,accession number AF148856,Smith-Waterman Score=2663.
atgcctcttgcctccttcatcatctgtctccctcacatctgccctgcctttgacaatgtacaaatagctttgaagccctcacagagcgtggctgtgcgaattgcagacttggtggatgacggctgtggggagttagagctgggcctagtcatgacaagcactccaaaacccacaggtcccaggtccccatacacctgggaaacaaaagcatctaacatcaaaaaggaccacggccataaggaggaagaaacaccttctcaggacgacatgattgtttatctagaaaaccccatcgtctcagcccaaaatctccttaagctgataagcaacttcagcaaagtctcaggatacaaaatcaatgtacaaaaatcacaagcattcttatacaccaacaacagacaaacagagagccagatcatgggtgaactcccattcacaattgcttcaaagagaataaaatacctaggaatccaacttacaagggatgtgaaggacctcttcaaggagaactacaaaccactgctcaaggaaataaaagaggagacaaacaaatggaagaacattccatgctcatgggtaggaagaatcaatatcgtgaaaatggccatactgcccaaggtaatttacagattcaatgccatccccatcaagctaccaatgactttcttcacagaattggaaaaaactactttaaagttcatatggaaccaaaaaagagcccgcatcgccaagtcaatcctaagccaaaagaacaaagctggaggcatcacactacctgacttcaaactatactacaaggctacagtaaccaaaagagcatggtactggtaccaaaacagagatatagatcaatggaacagaacagagccctcagaaataatgccgcatatctacaactatctgatctttgacaaacctgagaaaaacaagcaatggggaaaggattccctatttaataaatggtgctgggaaaactggctagccatatgtagaaagctgaaactggatcccttccttacaccttatacaaaaatcaattcaagatggattaaagatttaaacgttaaacctaaaaccataaaaaccctagaagaaaacctaggcattaccattcaggacataggcgtgggcaaggacttcatgtccaaaacaccaaaagcaatggcaacaaaagacaaaattgacaaatgggatctaattaaactaaagagcttctgcacagcaaaagaaactaccatcagagtgaacaggcaacctacaacatgggagaaaatttttgcaacctactcatctgacaaagggctaatatccagaatctacaatgaactcaaacaaatttacaagaaaaaaacaaacaaccccatcaaaaagtgggcgaaggacatgaacagacacttctcaaaagaagacatttatgcagccaaaaaacacatgaagaaatgctcatcatcactggccatcagagaaatgcaaatcaaaaccactatgagatatcatctcacaccagttagaatggcaatcattaaaaagtcaggaaacaacaggtgctggagaggatgcggagaaataggaacacttttacactgttggtgggactgtaaactagttcaaccattgtggaagtcagtgtggcgattcctcagggatctagaactagaaataccatttgacccagccatcccattactgggtatatacccaaatgagtataaatcatgctgctataaagacacatgcacacctattatcaccaccatcatcatcatcatcgacttcatcaacattactgacatcatcatcaccatcatcttcatcatttcatcatcaccatcagcatcattactgccattatcatcattctcatcattgacatga

SEQ ID NO: 5448 - DNA, 1560 bp, Homo sapiens
  SIMILAR (267)..(332): 501254mologous to Homo sapiens putative p150,accession number U93568,Smith-Waterman Score=47.
  misc_feature (1)...(1560): n = a,t,c or g
atgtgggaggaagaatcaccgttgacgcatcttgatttggttggtttttacatgtgtaaagaagaggatcccctgttcccgagccaaggcctccagactagcaggaccgagatccacaagtaccgctacaaccccggaatgcggtggagggctggggatgcgagcggtccacagcgggaggagacgctgcatgaccacccggacagcatcttcaaaggcgctgtctcctccgcgtctccgggttctcagaaaatgcgaagaaaggcatgttggaagttctggccagggcaatacagacaggagaaaaaaataaagggtattcaatcaggaaaagaggaagtgaaattgtccctgtttgcagatgacatgattgtatatttagaaaaccccatcgtctcagcccaaaatctccttaagctgataagcaacttcagcaaagccttaggatacaaaatcagtgtgcaaaaatcacaagcattcttatacaccaataacagacagacagagagccaaatcatgagtgaactcccattcacaattgcttcaaagagaataaaatacctaggaatccaacttacaagggatgtgaaggacctcttcaaggagaactacaaaccactgctcaatgaaataaaagaggacacaaacaaatggaagaacattccatgttcatggataggaagaatcaatatcgtgaaaatggccatactgcccaaggtaatttatggattcaatgccatccccatcaagctaccaatgactttcttcacagaattggaaaaaactactttaaagttcatatggaaccaaaaaagagcccgcatcgccaagtcgatcctaagccaaaaggacaaagctggaggcatcacgctacctgacttcaaactatactacaaggctacagtaaccaaaacagcatgcaatagtaatggctctcagtccccgtggatggaggagcaaattcgggatgcctggggaagcatggttctaaaaaatgttgtacgtgaaacggatgaagttggtaaaggtcagatccggatgagaactgtttttgaacaggccattgatcaacgctcttcaactgatacttcgttatcgacaccagctgccccgatggtggattcgttaattgcgcgcgtaggagtaatggctcgcggtaatgccattactttgcctgtatgtggtcgggatgtgaagtttactcttgaagtgctccggggtgatagtgttgagaagacctctcgggtatggtcaggtaatgaacgtgaccaggagctgcttactgaggacgcactggatgatctcatcccttcttttctactgactggtcaacagacaccggcgttcggtcgaagagtatctggtgtcatagaaattgccgatgggagtcgccgtcgtaaagctgctgcacttaccgaaagtgattatcgtgttctgggtggcgagctggatgatgagcagatggctgcattatccagattgggtaacgattatcgnccaacaagtgcttatgaacgtggtcagcgttatgcaagcccattgccgacctgtgttgcatga

SEQ ID NO: 5449 - DNA, 1848 bp, Homo sapiens
  SIMILAR (385)..(1659): 831254mologous to Homo sapiens putative p150,accession number U93574,Smith-Waterman Score=1772.
gaaggtatggacccccatccaaaatttagtttggatgttgatactgataatgctatgcctacaccaagaggtatgaaaaggtttattatgatgagggtttttgaagacagcaaagcaggcctcctgaactggtccaaaaatggcttaagagagagaggaaaggtgcctggcttgggatttattgtgattggtagctccttcaatcctatcaccaacaggcacctaaggttgtttgagctggccaaggactatatgaatggaacaggaagatatagagttgtcaaacacatgatctttcctgttggtgatgcttataagaagaaaggactcattcctgcccatcaccaggtcatcatagccgaacttgccaccaagaattccaaactaaaccaggaagacattgaatccctgaacagaccaataacaggttctgaaattgaggcaataattaatagcctaccaaccaaaaaaagtccaggaccagatggattcacagccgatttctaccagaggtacaaacaggagctagtaccattccttctgaaactattccaatcaatagaaaaagagggaatcctccctaattcatttgatgaggccagcatcatcctgataccaaagcctggcagagacacaacaaaaaaagagaattttagaccaatatccctgatgaacattgatgcaaaaattctggcaaaccaaatccagcagcagatcaaaaagtttatccaccacgatcaagttggcttcatccctgggatgcaaggctggttcaacatacacaaatcaataaatgtaatccagcatataaacagaaccaaagacaaaaaccacacgattatctcaacagatgcagaaaaggccttcgacaaaattcaacagcccttcatgctaaaaactctgaataaactaggtattgatgggacgtatctcaaaataataagagctatttatgatgaacccacagccaatatcatactgaatgggcaaaaactggaagcattccctttgaaaactggcacaagacagggatgtcctctctcaccactcctattcaacatagtattggaagttctggccagggcaatcaagcaggataaagaaatacaggatattcagttaggaaaagaagtcaaattgtccctatttgcagatgtcatgattgtatatttagaaaactccatcgtctcagtccaaaatctccttaagctgataagtaacttcagcgaagtctcaggatacaaaatcaatgtgcaaaaatcacaagcattcctctacaccaataaaagacaaagagagagccaaatcatgagtgaactcccattcacaattgcttcaaagagaataaaatacctaggaatccaacttacaagggatgtgaaggacctcttcaaggagaactacaaaccactgctcaatgaaataaaagaggacacaaacaaatggaagaacattccatgctcatggattggaagaatcaatatcgtgaaaatggccatactgcccaagataatttatgcagccaaaaaacacatgaaaaaatgctcatcatcactggccatcagagaaatgcaaatcaaaaccacaatgagataccatctcacaccagttagaatggcgatcattaaaaagtcaggaaacaacagaagtacccgtggcctgctcagctgtgactctgctgacctcaggacctcactggtcaaggtatgtagggacccttgcaggagacttggtaatggtgaaatgatcctatcgttacattatctatggagcaacaactttgtacagagaaccagctgcttggctttttctcccagtgcccaggatgctgctgatgcggccgtgtaa

SEQ ID NO: 5450 - DNA, 2112 bp, Homo sapiens
  SIMILAR (652)..(1800): 931254mologous to Homo sapiens putative p150,accession number U93572,Smith-Waterman Score=1916.
atgaaggcagaaataaagatgttctttgaaaccaatgagaacaaagacacaacataccagaatctctgggatgcattcaaagtagtgtgtagagggaaatttatagcactaaatgcccacaagagaaagcaggaaagatccaaaattgacaccctaacatcacaattaaaagaactagaaaagcaagagcaaacacattcaaaagctagcagaaggcaagaaataactaaaatcagagcagaactgaaggaaatagagacacaaagaacccttcagaaaattaatgaatccaggagctggttttttgaaaggatcaacaaaattgataggctgctagcaagactaataaagaaaaaaagagagaagaatcaaatagacacaataaaaaatgataaaggggatatcaccaccgatcccacagaaatacaaactaccatcagagaatactacaaacacctctacacaaataaactagaaaatctagaagaaatggataaattcctcgacacatacactctcccaagactaaaccaggaagaagttgaatttctgaatagaccaataacaggatctgaaattgtggcaataatcaatagcttaccaaccaaaaagagtccaggaccagatggattcacagccgaattctaccagagacaaacagagagccaaatcatgagtgaaatcccattcacaattgcttcaaagagaataaaatacctaggaatccaacttacaagggaagtgaaggacctcttcaagaagaactacaaaccactgctcaatgaaataaaagaggatacaaacaaatggaagaacattccatgctcatgggtaggaagaatcaatatcgtgaaaatggccatactgcccaaggtaatttatagattcaatgccatccccataaagctaccaatgcctttcttcacagaattggaaaaaactactttaaagttcatatggaaccaaaaaagagcccgcatcgccaagtcaaacctaagtcaaaagaacaaagctggaggcatcacactacctgacttcaaactatactacaaggctacagtaaccaaaacagcatggcactggtaccaaaacagaaatatagatcaatggaatagaacagagccctcagaaataatgccacatatctacaactatctgatctttgacaaacctgagaaaaacaagcaatggggaaaggattctctatttaacaaatggtgctgggaaaacaggctagccatatgtagaaagctgaaactggatctcttccttacatcttatacaaaaatcaattcaagatggattaaagacttaaacgttagacctaaaaccataaaaaccccagaagaaaacctaggcaataccattcaggacataggcatgggcaaggacttcatgtctaaaacaccagaagcaatggcaacaaaagccaaaattgacaaatgggatctaattaaactaaagagcttctgcacagcaaaagaaactaccatcagagtgaacaggcaacctacaaaatgggagaaaattttcgcaacctactcatctgacaaagggctgatatccagaatctacaatgaactcaaacaaatttacaagaaaaaaacaaacaaccccatcaaaaagtgggtgaaggacatgaacagatacttctcaaaagaagacatttatgcagccaaaaaacacatgaaaaaatgctcaccatcactggccatcagagaaatgcaaatcaaaaccacaatgagataccatctcacaccagttagaatggcgatcattaaaaagtcaggaaacaacaggatggtgactaataggtactcaatgtatatttgccgagagaacaagccagaaaatacaactagaattgaatgctcagatactgaagaggggactggggtgggggccatggaagtagcagacctggatctagcactcagcagggcctacttctgtctcaaaagcttcaaaagggtggagggggcaggagacagtttcaatgagctgaagagtgagtgggaagaggagactgagtgtagagaacttgcaaagcagattgtcaatgaaagcaaaggcagaaaagatacagtaattgaaggagaatttatgtcataa

SEQ ID NO: 5451 - DNA, 2629 bp, Homo sapiens; identical to SEQ ID NO: 4459
  SIMILAR (793)..(2388): 931254mologous to Homo sapiens putative p150,accession number U93564,Smith-Waterman Score=2624.

SEQ ID NO: 5452 - DNA, 2285 bp, Homo sapiens
  SIMILAR (342)..(2135): 951254mologous to Homo sapiens putative p150,accession number U93563,Smith-Waterman Score=3026.
acagatcaaccagacagaaagttaacaaggatatccaggacttgaactcagctctgcaccaagcggacctaatagacatctacagaactctccaccccaaatcaacagaatatacatttttttcagcaccacaccacacctgttccaaaattgaccacatagttggaagtaaagcactgctcagcaaatgtaaaagaacagaaattatcagaaactatctctcagaccacagtgcaatcaaactagaactcaggattaagaaactcactcaaaaccactcaactacatggaaactgaacaacctgctcctgaatgactactggatgcagaaaaggcctttgaaaattcaacaatgcttcatgctaaaaactctcaataaattaggtattgatgggacgtatctcaaaataataagagctatctatgacaaacctacagccaatatcatactgaatgggcaaaaactggaagcattccttttgaaaactggcacaagacagggatgccctctctcaccactcctattgaacgtagtgttggaagttctggccagggcaatcaggcaggagaaggaaataaagggcattcaattaggaaaagaggaagtcaaactgtccctgtttgcagatgacatgattgtatatctagaaaaccccatcgtctcagcccaaaatctccctaagttgataagcaacttcagcaaagtctcaggatacaaaatcaatgtgcaaaaatcacaaacattcttatacaccaataacagacaaacagagagccaaatcatgagtgaactcccattcacaattgcttcaaagagaataaagtacctaggaatccaacttacaagggatgtgaaggacctcttcaaggagaactacaaaccactgctcaaggaaataaaagaggatacaaacaaatggaagaacattccatgctcatgggtaggaagaatcaatatcgtgaaaatggccatactgcccaaggtaatttacagattcaatgccatccccatcaagctaccaatgactttcttcacagaattggaaaaaactactttaaagttcatatggaaccaaaaaagagcctgcatcgccaagtcaatcctaagccaaaagaacaaagctggaggcatcacactacctgacttcaaactatactacaaagctacagtaaccaaaacagcatggtactggtatcaaaacagagatatagatcaatggaacagaacggagccctcagaaataacgccgcatatctacaactgtctgatctttgacaaacctgagaaaaacaagcaatggggaaaggattccctatttaataaatggtgctgggaaaactggctagccatatgtagaaagctgaaactagatcccttccttacatcttatacaaaaatcaattcaagatgtattaaagacttaaatgttagacctaaaaccataaaaaccctagaagaaaacctaggcattaccattcaggacataggcatgggcaaggacttcatgtctaaaacaccaaaagcaatggcaacaaaagccaaaattgacaaatgggatctaattaaactaaagagcttctgcacagcaaaagaaactaccatcagagtgaacaggcaacctacaaaatgggagaaaattttcgcaacctactcatctgacaaagggctgatatccagaatctacaatgaactcaaacaaatttacaagaaaagaacaaacaaccccatcaaagagtgggcaaaggacatgaacagacacttctcaaaagaagacatttatgcagccaaaaaacacatgaaaaaatgctcaccatcactggccatcagagaaatgcaaatcaaaaccacaatgagataccatctcacaccagttagaatggcaatcattaaaaaggcaggaaacaacaggtgctggagaggatgtggagaaataggaacacttttacactgttggtgggactgtaaactagttcaaccattgtggaagtcagtgtggcgattcctcagggatctagaactagaaataccatttgacccagccatcccattactgggcatatacccaaaggactgtaaatcatgctgctataaagacacatgcacacaatgtatgttagtgaagctaagtgtagtcaaaggattgattctggaatcacaaatccaggttcctgatagtaagcaacagaaactaacaaaagctagtgtaagcaaaaatgatgatgatgatgatgatgatgatgatgatgatgatgatggaatgctttggaggagctctctgaattga

SEQ ID NO: 5453 - DNA, 1248 bp, Homo sapiens
  SIMILAR (181)..(1173): 891254mologous to Homo sapiens putative p150,accession number U93574,Smith-Waterman Score=1585.
atggataaattcctcaacacatacactctcccaagactaaaccaggaagaagttgaatctctgaatagaccaataacaggagctgaaattgtggcaataatcaatagcttaccaaccaaaaagagtccaggaccagatggattcagagccgaattctaccagaggtacaaggaggaactgctgataagcaactttggcaaagtctcaggatacaaaatcaatgtacaaaaatcacaagcattcttatacaccaataacagacaaacagagagccaaatcatgagtgaactcccattcacaattgcttcaaagagaataaaatacctaggaatccaacttacaagggatgtgaaggacctcttcaaggagaactacaaaccactgctcaatgaaataaaagaggatacaaacaaatggaagaacattccatgctcatgggtaggaagaatcaatatcgtgaaaatggccatactgcccaaggtaatttatagattcaatgccatccccatcaacctaccaatgactttcttcacagaattggaaaaaacgactttaaagttcatatggaaccaaaaaagagcccacatcaccaagtcaatcctaagccaaaagaacaaagctggaggcatcaccctacctgacttcaaactatactacaaggctacagtaaccaaaacaggatggtactggtaccaaaacagagatatagatcaatggaacggaacagagccctctgaaataatgccgcatatctacaactatctgatctttgacaaacctgagaaaaacaagcaatggggaaaggattccctatttaataaatggtgctgggaaaactggctagccatatgtagaaagctgaaactggatcccttccttacaccttatacaaaaattaattcaagatggattaaagacttaaatgttagacctaaaaccataaaaaccctagaagaaaacctaggcaataccattcaggacataggcatgggcaaggacttcatgtctaaaacaccaaaagcaatggcaacaaaagccaaaattgacaaatgggatctaattaaactaaggagcttctgcacagcagaagaaattaccatcagagatcatgaagacgccagatcctgctggcttgcattctcagaggagggaataccaggtggaattgtggccatgcggcattgtcatgaagaatatgagatttgcagctgtcatggcaaggaaaccctggagcttcagagattttag

SEQ ID NO: 5454 - DNA, 1143 bp, Homo sapiens
  SIMILAR (208)..(858): 961254mologous to Homo sapiens putative p150,accession number U93574,Smith-Waterman Score=1047.
atgaaggaaactgtggcacatgctattgcatggatgcaccttgaagagattatgctaagtgagggattttactttgtaataatctcccatgagaactggccaaacagctgtgaaggcaagagagagctacaagaggcaatcatatttttcaaagcagggcaacaagagagtgaagctggtcaaaatgaatcttttctgcatttcgctgtgttggaagttctggccagggcaattaggcaggagaaggaaataaagggtattcaattaggaaaagaggaagtcaaattgtccctgttcgcagacgacatgattgtatatctagaaaactccattgtctcagcccaaaatctccttaagctgataagcaacttcagcaaagtctcaggatacaaaatcaatgtacaaaaatcacaagcattcttatacaccaacaacagacaaacagagagccaaatcatgagtgaactcccattcacaattgcttcaaagagaataaaatacctaggaatccaacttacaagggatgtgaaggacctcttcaaggagaactacaaaccaatgctcaaggaaataaaagaggacacaaacaaatggaagaacattccatgctcatggttaggaagaatcaatatcgtgaaaatggccatactgcccaaggtaatttacagatttaatgccatccccatcaagctaccaatgcctttcttcacagaattggaaaaaactactttaaagttcatagggaaccaaaaaagagcccacattgccaagtcaatcctaagccaaaagaacaaagctggaggcatcacactacctgacttcaaactatactacaaggctgcagtaaccaaaacagcatgcgctcaggctctacagtcagcaggtggcaaatcctgtcatgcctctgtgcttcccttcagggcactgaaggcccccaggccctgggagggctctatggatagcttatatgagccaatcccagagcaacaagctaaccaagaaaacatgtctagtagaactgattctcctatcccaccctttggagagagtgaacaaacaccaaacaatctcttcgtgcctactcaatgtgaagatgacaggaataaagacctttatgatgatccacttccacttactgaataa

SEQ ID NO: 5455 - DNA, 1185 bp, Homo sapiens
  SIMILAR (109)..(588): 961254mologous to unidentified cloning vector 29kD protein essential for the replication of mini F plasmid,accession number AB015619,Smith-Waterman Score=792.
  misc_feature (1)...(1185): n = a,t,c or g
atgtcgtacagcagcaagtctgctttgcacttgaaaatccttcaggcaggacaggaggttcttaagtgtgacaatctaaaaacttgtcacacttcacatggatctgtcatggcggaaacagcggttatcaatcacaagaaacgtaaaaatagcccgcgaatcgtccagtcaaacgacctcactgaggcggcatatagtctctcccgggatcaaaaacgtatgctgtatctgttcgttgaccagatcagaaaatctgatggcaccctacaggaacatgacggtatctgcgagatccatgttgctaaatatgctgaaatattcggattgacctctgcggaagccagtaaggatatacggcaggcattgaagagtttcgcggngaaggaaagtgttttttatcgccctgaagaggatgccggcgatgaaaaaagctatgaatcttttccttggtttatcaaacgtgcgcacagtccatccagagggctttacagtgtacatatcaacccatatctcattcccttctttatcgggttacaagacccggttacgcagtttcggcttagtgaaacaaaagaaatcaccaatcctgttggaagttctggccagggaaatcaggcaggagaaggaaataaagggtattcaattaggaaaagaggaagtcaaattgtccctgtttgcagatgacatgattgtatatctagaaaaccccattgtctcagcccaaaatctccttaagctgataagcaactttagcaaagtctcaggatacaaaatcaatgtacaaaaatcacaagcattcttatacaccaacaacagacaaacagagagccaaatcatgagtgaactcccattcacaattgcttcaaagagaataaaatacctaggaatccaacttacaagggatgtgaaggacctcttcaagcagaactacaaaccactgctcaatgaaataaaagaggatacaaacaaatggaagaacattccatgctcatgggtaggaagaatcaatatcgtgaaaatggccatactgcccaaggaacgcagctcctcaccagcaacggaacaaagctggatggagaatgactttgatgagttgagagaagaaggcttcagacgatcaaacttctccgagctaaaggagaaagttcgaacccatcacaaacaagataaaaaccttgaaaaaag

SEQ ID NO: 5456 - DNA, 3159 bp, Homo sapiens
  SIMILAR (1474)..(3018): 921254mologous to Homo sapiens putative p150,accession number U93572,Smith-Waterman Score=2522.
atgttggaagttctggcctgggcagttaggcaggagaaggaaataaagggtattcaactaggaaaagaggaagtcaaattgtccctgtttgcagacaacatgactgtatatctggaaaaccccatcgtctcagcccaaaatctccttaagctgataagcaacttcagcaaagtctcaggatacaaagtcagtggacaaaaatcacaagcattattatacaccaataacagacaaacagagagccaaatcatgagtgaactcccattcacaattgcttcaaagagaataaaatacctaggaatccaccttacaagggatgtgaaggacctcttcaaggagaactacaaaccactgctcaaggaaataaaaaaggatacaaacaaatggaagaacattccatgctcatgggtaggaagaatcaatatcgtgaaaatggccatactgcccaaggacatcatccaggagaacttccccaatctagcaaggcaggccaacattcagattcaggaaatacggaaaacaccacaaagatattcctcgagaagagcaactccaagacacataattgtcagattcaccaaagttgaaatgaaggaaaaaatgttaagggccgccagagagaaagcatcacaccacacctattccaaaattgaccccatacttggaagtaaacctctcctcagcaaatgtaaaagaacagaaattataacaaactatctctcagaccacagtgcaatcaaactagaattcaggattaagaatctcactcaaaactgctcaactacgtggaaaccaaacaacctgctcctgaacgactactgggtacataacgaaatgaaggcagaaataaagatgttctttgaaaccaacgagaacaaagacacaacataccagaatctctgggacacattcaaagcagtgtgtagagggaaatttatagcaacaaatgcccataagaggaagcaggaaagatccaaagttgacaccctaacatcacagttaaaagaactagaaaagcaagagcaaacacattcaaaagctagcagaaggcaagaaataactaaaatcagagcagaactgaaggaaatagagacacagaaaacccttcaaaaaattaatgaatccaggagctggttttttgaaaggatcaacaaacttgacagacctctagcaagactagtaaagaaaaaaagagagaagaatcaaatagatgcaataaaaaatgataaaggggatatcaccaccaatcccacagaaatacaaactaccatcagagattattacaaacacctctatgcaaataaactagaaaatctagaagaaatggataaattcctggacacatacactctcccaagactaaaccaggaagaagttgaatctctgaatagaccaataacaggatctgaaattgtggcaataatcaatagcttaacaaccaaaaagagtccaggaccagatggattcacagccgaattctaccagagggcaattaggcaggagaaggaaataaagggtattcaattaggaaaagaggaagtcaaattgtccctgtttgcagatgacatgattgtatatctagaaaaccccattgtctcagcccaaaatctccttaagctgataagcaacttcagcaaagtctcaggatacaaaatcaatgtacaaacatcacaagcattcttatacaccaacaacagacaaacagagagccaaatcatgagtgaactcccattcacaattgcttcaaagagaataaaatacctaggaatccaacttacaagggatgtgaaggacctcttcaaggagaactataaaccactgctcaatgaaataaaagaggatacaaagaaattgaagaacattccatgctcatgggtaggaagaatcaatatcgtgaaaatggccatactgcccaaggtaatttacagattcaatgccatccccatcaagctaccaatgactttcttcacagaattaaaaaaaactactttaaatttcatatggaaccaaaaaaagagcccacatcgccaagtcagcctaagccaaaagaacaaagctggaggcatcacactacctgacttcaaactatactacaaggctacagtaaccaaaacagcatggtactggtaccaaaacagagatacagatcaatggaacagaacagagccctcagaaataatgccgcgtatctacaactatctgatctttgacaaacctgagaaaaacaagcaatggggaaaggattccctgtttaataaatggtgctggaaaaactggctagccatatgtagaaagctgaaactggatcctttccttacaccttatacaaaaattaattcaagatggattaaagacttaaacattagacctaaaaccataaaaaccctagaagaaaacctaggcattaccattcaggacataggcatgggcaaggacttcatgtctaaaacaccaaaagcaatggcaacaaaagccaaaattgacaaatgggatctaattaaactaaagagcttctgcacagcaaaagaaactaccaacagagtgaacaggcaacctacaaaatgggagaaaatttttgcaacctactcatctgacaaagggctaatatccagaatctacaatgaactcaaacaaatttacaagaaaaaaacaaacaaccccatcaaaaagtgggcgaaggacatgaacagacacttctcaaaagaagacatttatgcagccaaaaaacacatgaaaaaatgctcatcatcactggccatcagagaaatgcaaatcaaaaccacaatgagataccatctcacactagttagaatggcaatcattaaaaagtcaggaaacaacaggtgctggagaggacgtggagaaataggaacacttttacactgttggtgggactgtaaactagttcaatcattgtggaagtcagtgtggcaattcctcagggatctagaactggaaataccatttgacccagccatcccattactgggaaaactgtctcataaattagggaagtgctcaattacaagcctgacagagattgattttggttctgctgttggtcactaccagcaagtgaaggccgcagaaaccacaactccagctaatgctggaatcgcttcagaggtgctcactgaacaagtgttcattaagaagtga

SEQ ID NO: 5457 - DNA, 2516 bp, Homo sapiens
  SIMILAR (558)..(1865): 861254mologous to Homo sapiens putative p150,accession number U93563,Smith-Waterman Score=1961.
aaatacaaactaccatcagtgaatactacaaacacctctacacaaataaactagaaaatctagaagaaatggataaattccttgacacatacactctcccaacactaaaccaggaagaagttgaatctctgaatagaccaataacaggagctgaaattgtggcaataatcaatagcttaccaacgaaaaagagtccaggaccagatggattcacagccgaattctaccagaggtacaaggaggaactggtaccattccttctgaaactattccaatcaatagaaaaagagggaatcctccctaactcattttatgaggccagcatcattctgataccaaagtcaggcagagacacaacaaaaaaagagaattttagaccaatatccttgatgaacattgatgcaaaaatcctcaataaaatactggcaaaccgaatccagcagcacatcaaaaagcttatccaccatgatcaagtgggcttcattcctgggatgcaaggctggttcaatatacgcaaatcaataaatataatccagcatataaacagagccaaagacaaaaaccacatgattatctcaatagatgcagaaaaagcctttgacaaaattcaacaacccttcatgctaaaaactctcaataaattagctgataagcaacttcagcgaagtctcaggatacaaaatcagtgtacaaaaatcacaagcattcttatacaccaacaacagacagagagccaaatcatgagtgaactcccattcacaattgcttcaaagagaataaaatacctaggaatccaacttacaagggatgtgaaggacctcttcaaggagaactacaaaccactgctcaaggaaataaaagaggatacaaacaaatggaagaacattccatgctcatgggtaggaagaatcaatatcgtgaaaatggccatactgcccaaggcaatttacagattcaatgccatccccatcaagctaccaatgactttcttcacagaattggaaaaaactactttaaagttcatatggaaccaaaaaagagcccgcatcgccaagtcaatcctaagccaaaagaacaaagctggaggcatcacactacctgacttcaaactatactacaaggctacagtaaccaaaacagcatggtactggtaccaaaacagagatatagatcaatggaacagaacagagccctcagaaataacgccgcatatctacaactatctgatctttgacaaacctgagaaaaacaagcaatggggaaaggattccctatttaataaatggtgctgggaaaactggctagccatatgtagaaagctgaaactggatcccttccttacaccttatacaaaaatcaattcaagatggattaaagacttaaatgttggacctaacaccataaaaaccctagaagaaaacctaggcattaccattcaggacataggcacgggcaaggacttcatgtctaaaacaccaaaagcaatggcaacaaaagccaaaattgacaaacgggatctaattaaactaaacagcttctgcacagcaaaagaaactaccatcagagtgaacaggcaacctacaaaatgggagaaaattttcacaacctactcatctgacaaagggctaatatccagaatctacaatgaactcaaacaaatctacaagaaaaaaacaaacaaccccatcaaaaagtgggcgaaggacatgaacagacacttctcaaaagaacacatttatgcagccaaaaaacacatgaaaaaatgctcaccatcactggccatcagagaaatgcaaatcaaaaccacaatgagataccatctcacaccagttagaatggcaatcattaaaaagtcagaaaacaacagccttctagcagcaggaggaggaaaccgtcgaactgccaatgtggtggcccacgggtttgccaatcttttaactctagacaaaaagaccctccaagaaattctagtgcattatccagattctgaaaggatcctcatgaagaaagccagagtgcttttaaagcagaaggctaagaccgcagaagcaacccctccaagaaaagatcttgccctcctcttcccaccgaaagaagagacacccaaactgtttaaaactctcctaggaggcacaggaaaagcaagtcttgcaagactactcaaattgaagcgagagcaagcagctcagaagaaagaaaattctgaaggaggagaggaagaaggaaaagaaaatgaagataaacaaaaagaaaatgaagataaacaaaaagaaaatgaagataaaggaaaagaaaatgaagataaagataaaggaagagagccagaagagaagccactggacagacctgaatgtacagcaagtcctattgcagtggaggaagaaccccactcagttagaaggacagttttacccagagggacttctcgtcaatcactcattatcagcatggctccttctgctgagggcggagaagaggttcttactattgaagtcaaagaaaaggctaagcaataa

SEQ ID NO: 5458 - DNA, 2466 bp, Homo sapiens
  SIMILAR (1)..(1737): 911254mologous to Homo sapiens putative p150,accession number U93572,Smith-Waterman Score=2698.
atgggagactttaacaccccactgtcaacattagacagatcaacgagacagaaagccaacaaggatacccaggaattgaactcagctctgcaccaagtggacctaatagacatctacagaactctccaccccaaatcaacagaatatacattcttttcagcaccacaccacacctattccacaactgaccacatacttggaagtaaagctctcctcagcaaatgtagaagaacagaaattataacaaactatctctcagaccacagtgcaatcaaactagaactcagaattaagaatctcactcaaaaccgctcaactacatggaaactgaacaacctcctcctgaatgactacggggtgcataatgaaatgaaggcagaaataaagatgttctttgaaaccaatgagaacaaagacacaacataccagaatctctgggacacattcaaagcagtgtgtagagggaaatttatagcactaaatgcccacaagagaaagcaggaaagatccaaaattgacaccctaacatcacaattaaaagaactagaaaagcaagagcaaacacattcaaaagctagcagaagacaagaaataactaaaatcagagcagaactgaaggaaatagagacacaaaaaacccttcaaaaaattaatgaatccaggagctggttttttgaaaggatcaacaaaatagatagactgctagcaagactaataaagaaaaaaagagagaagaatcaaatagatgcaataaaaaatgataaaggggatatcaccactgatcccacagaaatacaaactaccatcagagaatactacaaacacctctacgcaaataaactagaaaatctagaagaaatggataaattcctgcacacatacactctcccaagactaaaccaggaagaagttgaatctctgaatagaccaataacaggatctgaaattgtggcaataatcaatagcttaccaaccaaaaagagtccaggaccagatggattcacagccgaattcgaccagaggtacaaggaggaactggtaccattccttctgaaactattccaatcaatagaaaaagagggaatcctccctaactcattttatgaggccagcatcatcctgatacgaaagcctggcagagacacaaccaaaaaagagaattttagaccaatatccttgatgaacactgatgcaaaaatcctcaataaaatactggcaaaacgaatccagcagcacatcaaaaagcttatccaccatgatcaagtgggcttcatccctgggatgcaaggctggttcaatatacacaaatcaataaatgtaatccagcatataaacagagccaaagacaaaaaccacatgattatctccatagatgcagaaaaggcctttgacaaaattcaacaacccttcatgctaaaaactctcagtaaattaggtattgacgggacatatttcaaaataataagagctatctatgacaaacccacagccaatatcatactgaatgggcaaaaactggaagcattccctttgaaaactggcacaagacagggatgccctctctcaccactcctattcaacatagtgttggaagttctggccagggcaattaggcaggagaaggaaataaaggggaacttcagcaaagtctcaggatacaaaatcaatgtacaaaaatcacaagcattcttatacaccaacaacagacaagcagagagccaaatcatgagtgaactcccattcacaattgcttcaaagagaataaaatacctaggaatccaacttacaagggatgtgaaggacctcttcgaggagaactacaaaccactgctcaatgaaataaaagaggatacaaacaaatggaagaacattccatgctcatgggtaggaagaatcaatatcgtgaaaatggccatactgcccaagatggctgcattatccagattgggtaacgattatcgcccaacaagtgcttatgaacgtggtcagcgttatgcaagccgattgcagaatgaatttgctggaaatatttctgcgctggctgatgcggaaaatatttcacgtaagattattacccgctgtatcaacaccgccaaattgcctaaatcagttgttgctcttttttctcaccccggtgaactatctgcccggtcaggtgatgcacttcaaaaagcctttacagataaagaggaattacttaagcagcaggcatctaaccttcatgagcagaaaaaagctggggtgatatttgaagctgaagaagttatcactcttttaacttctgtgcttaaaacgtcatctgcatcaagaactagtttaagctcacgacatcagtttgctcctggagcgacagtattgtataagggcgataaaatggtgcttaacctggacaggtctcgtgttccaactgagtgtatagagaaaattgaggccattcttaaggaacttgaaaagccagcaccctga

SEQ ID NO: 5459 - DNA, 1221 bp, Homo sapiens; identical to SEQ ID NO: 5174
  SIMILAR (268)..(732): 961254mologous to Homo sapiens putative p150,accession number U93563,Smith-Waterman Score=755.

SEQ ID NO: 5460 - DNA, 4497 bp, Homo sapiens
  SIMILAR (2638)..(4233): 961254mologous to Homo sapiens putative p150,accession number U93564,Smith-Waterman Score=2689.
atgggagactttaacaccccactgtcaacattagacagatcaacaagacagaaagtcaacaaggatacccaggaattgaactcagctctgcaccaagtggacctaatagacatctacagaattctccaccccaaatcaacagaatatacatttttttcagcaccacaccacacctattccaaaattgaccacatacttggaagtaaagctctcctcagcaaatgtgaaagaacagagattataacaaactatctctcagaccacagtgcaatcaaactagaactcaggattaagaatctcactcaacactgctcaacttcatggaaactgaacaaactgctcctgaatgactactgggtacataacgaaatgaaggcagagataaagatgttctttgaaaccaatgagaacaaagacacaacataccagaatctctgggatgcattcaaagcagtgtgtagagggaaatttatagcactaaacgcccacaagagaaagcaggaaagatccaaaattgacaccctaacatcacaattaaaagaactagaaaagcaagagcaaacacattcaaaagctagcagaagtcaacaaataactaaaatcagagcagaactgaaggaaatagagacacaaaaaacccttcaaaaaattaatgaatccaggagcttgttttttgaaaggatcaacaaaattgatagactgctagcaagactaataaagaaaaaaagagagaagaatctaatagacgcaataaaaaatgataaaggggatatcaccaccgatcccacagaaatacaaactgccatcagagaatattacaaacacctctacgcaaataaactagaaaatctagaagaaatggataaattccttgacacatacaccctcccaagactaaaccaggaagaagttgaatctctgaatagaccaataacaggatctgaaattgtggcaataatcaatagcttaccaaccaaaaagaatccaggaccagatggattcacagccgaattctaccagaggttcaaggaggaactgcatataaagagagccaaagacagaaaccacatgattatctcaatagatgcagaaaaagcctttgacaaaattcaacaacccttcatgctaaaaactctcaataaattaggtattgatgggacatatttcaaaataataagagctatctatgacaaacccacagccaatatcatactgaatgggcaaaaactggaagcattccctttgaaaactggcacaagacagggatgccctctctcaccactcttattcaatatagtgtttgaagttctggccagggcaattaggcaggagaaggaaataaagggtattcaattaggaaaagaggaaatcaaattgtctctgtttgccgatgacatgattgtatatctagaaaaccccattgtctcagcccaaaatctccttaagctgataagcaacttcagcaaagtctcaggatacaaaatcaatgtacaaaaatcacaagcattcttatacaccaacaacagacaaacagagagccaaatcatgagtgaactcccattcacaattgcttcaaagagaataaaatacctaggaatccaacttacaagggatgtgaaggacctcttcaaggagaactacaaaccactgctcaaggaaataaaagaggatacaaacaaatggaagaacattccatgctcatgggtaggaagaatcaatatcgtgaaaatggccatactgcccaagctaccaatgcctttcttcacagaattggaaaaaactactttaaagttcatatggaaccaaaaaagagcctgcatcaccaagtcaatcctaagccaaaagaacaaagctgaaggcatcacactacctgacttcaaactatactacaaggctacagtaaccaaaacagcatggtactggtaccaaaacagagatatagatcaatggaacagaacagagccctcagaaataatgccacatatctacagctatctgatatttgacaaacctgagaaaaacaagcaatggggaaaggattccctatttaataaatggtgctgggaaaactggctagccatatttagaaagctgaaactggatcccttccttacaccttatacaaaaatcaattcaagatggattaaagacttaaacgttagacctaaaaccataaaaaccctagaagaaaacctaggcattaccattcaggacataggcatgggcaaggacttcatgtctaaaacaccaaaagcaatggcaacaaaagccaaaattgacaaatgggatctaattaaactaaagagcttctgcacagccaaagaaactaccatcagagtgaacaggcaacctacaaaatgggagaaaattttcgcaacttactcatctgacaaagggctaatatccagaatctacaatgaactcaaagaaatttacaagaaaaaaacaaacaaccccatcaaaaagtgggcaaaggacatgaacagacacttctcaaaagaagacatttatggagccaaaaaacacatgaaaaaatgctcatcatcactggccatcagagaaatgcaaatcaaaaccacaatgagatatcatctcacactagttagaatggcaatcattaaaaagtcaggaaacaacagtcttgctagtggtctatcaattgacaaaattcaacaacccttcatgctaaaaactctcaataaattaggtattgatgggacgtatttcaaaataataagagctatctatgacaaacccacagccaatatcatactgaatgggcaaaaactggaagcattccctttgaaaactggcacaagacagggatgccctctctcaccgctcctattcaacatagtgttggaagttctggccagggcaatcaggcaggagaaggaaataaagggtattcaattaggaaaagaggaagtcaaattgtccctctttgcagacgacatgattgtttatctagaaaaccccatcgtctcagcccaaaatctccttaagctgataagcaacttcagcaaagtctcaggatacaaaatcaatgtacaaaaatcacaagcattcttatacaccaacaacagacaaacagagagccaaatcatgagtgaactcccattcacaattgcttcaaagagaataaaatacctaggaatccaacttacaagggatgtgaaggacctcttcaaggagaactacaaaccactgctcaaggaaataaaagaggatacaaacaaatggaagaacattccatgctcatgggtaggaagaatcaatatcgtgaaaatggccatactgcccaaggtaatttatagattcaatgccatccccatcaagctaccaatgactttcttcacagaattggaaaaaactactttaaagttcatatggaaccaaaaaagagcccgcattgccaagtcaatcctaagccaaaagaacaaagccggaggcatcacactacctgacttcaaactatactacaaggctacagtaaccaaaacagcatggtactggtaccaaaacagagatatagatcaatggaacagaacagagccctcagaaataacgccgcttacctacaactatctgatctttgacaaacctgagaaaaacaagcaatggggaaaggattccctatttaataaatggtgctgggaaaactggctagccatatgtagaaagctgaaactggatcccttccttacaccttatacaaaaatcaattcaagatggattaaagatttaaacgttagacctaaaaccataaaaaccctagaagaaaacctacgcattaccattcaggacatagggatgggcgaggacttcatgtccaaaacaccaaaagcaatggcaacaaaagccaaaattgacaaatgggatctaattaaactaaagagcttctgcacagcaaaagaaactaccatcagagtgaacaggcaacctacaaaatgggagaaaattttcgcaacctactcatctgacaaagggctaatatccagaatctacaatgaactcaaaccaatttacaagaaaaaaacaaacaaccccatcaaaaagtgggcgaaggacatgaacagacacttctcaaaagaagacatttatgcagccaaaaaacacatgaaaaaatgctcatcatcactggccatcagagaaatgcaaatcaaaaccacaatgagatatcatctcacaccagttagaatggcaatcattaaaaagtcaggaaacaacagaagtaaagacataaaagatagagaagatcctttggcttatggagtttttgctccagtcgtaagggtggaatcaagtttacaggaaggaagctggtgggtttcattttggacagaacgaggacgagctatgtgggagaacattcaaatagagctaggattcaggaagaagcaggacccaggatgccaccttacgtggaaatgtggatactacttctatgatggacgaagaggaggaagttgtttgcagatgcaactgactctgtag

SEQ ID NO: 5461 - DNA, 2827 bp, Homo sapiens
  SIMILAR (1679)..(2542): 931254mologous to Homo sapiens putative p150,accession number U93564,Smith-Waterman Score=1450.
atggccaggacaagttacgggcagcacttcttcccaaccctcatttccatgaatatagacagtggtaggcagaataatggcatccccaaattgtccacatcctactcactgaaacctatgaatacattatgttacctggtaaaaagggacttggaaggtgtgcttaagttaaggatcttgacatgggagagtagcctggattatccaggtgggcctagtgtaatcacaaaggtccttataagacagaaggagggccagagtcagagaacgagatatgacaatggaagcagaggttggagtgatgccatcgctgtaaaaaggccacaagccaaggaatgtgggtggccactagaggctggaaaaggcaaggaatggattcttagaaaggaatgcatccctgccaacaccttgatgttagcccagtgcccacccacactcagggtgggtggaagtgtctgcagtgcctggaggatgattcagaactcagatggggagaggaggaaaaggaacagaatccagcttcaggcagtaagactctcaaaagttatacatgatacttttagaaactttccaaggtttgttcattccagagagctatcaaagggagctgagaaaagctcctctttgaagaagggtttggagcaagtcattatctggacaaaatgtagacaatgtggagaaagcaggtgtacaaagaaagtggaggaacggaaagtacttcataacaccttcatcagtaccagcaccactataaccactctaggacagaagcatcaatttgctgtgaagaaatatgccagaattaccacctacctcacatcttctagggaaaatcaagggaaaggtttatgtcctcagctaaacaaaatcgctgcctctttcaccaaggggccaatcagcactgaccctgggatagcagagccctgtgcaggggtggcagatggagtgagacccctggaaaccaccatttcattctttggttctgtaaattttgagcacttttctatgcctcagatcccagaacagagtcagccagacttgtacctaccagacaggtcactgaaaatcttccacaaggaaatacaatcaaccaaagagaaaacaaaaaagaaaatggtcgaatctatcagggaaaagaaatggaaaacaaggtggttttgcacaggattaaagaattatctggccagggcaattaggcaggagaaggaaataaagggtattcaattaggaaaagaggaagtcaaattgtccctgtttgcagatgacatgattgtatatctagaaaaccccattgtctcagcccaaaatctccttaagctgataagcaacttcagcaaagtctcaggatacaaaatcaatgtacgaaaatcacaagcattcttatacaccaataacagacaaacagagagccaaatcatgagtgaactcccattcacaattgcttcaaagagaataaaatacctaggaatccaacttacaagggatgtgaaggacctcttcaaggagaactacaaaccactgctcaatgaaataaaagaggatacaaacaaatggaagaacattccatgctcatgggtaggaagaatcaatatcatgaaaatggccatactgcccaaggtaatttatagattcaatgccatccccatcaagctaccaatgactttcttcacagaattggaaaaaaactactttaaagttcatatggaacctaaaaagagcccgcattgccaactcaatcctaagccaaaagaacaaagctggaggcatcacactacctgacttcaaactatactacaaggctacagtatccaaaacagcatggtactggtaccaaaacagagatatagaccaatggaacagaacagaaccctcagaaataatgccgtacatctacaatcatctgatctttgacaaacctgagaaaaacaagcaatggggaaaggattccctatttaataaatggtgctgggaaaactggctagccatacgtagaaagctgaaactggatcccttccttacaccttacacaaaaattaattcaagatggattaaagacttacatgttagacctaaaaccataaaaaccgtagaagaaaacctaggcattaccattcaggacataggcatgggcaagcacttcttgtctaaaacaccaaaagcaatggcaacaaaagccaaaattgacaaatgggatctaattaaactaaagagcttctgcacagcagaagagactaccatcagagtgaacaggcaacctacgcaatgggagaaaatttttgcaacctactcatctgacaaagggctgatacccagaatctacaatgaactcaaacaaatttacaaggaaaaaacaaacaaccccatcaaaaagtgggcaaagaatatgaacagacacttctcaaaagaagacatttatgcagccaacagacacatgaaaaaatgctcatcatcactggctatcagagaaatgcaaatcaaaaccacaatgagataccatctcacaccagttagaatggcaatcattaaaaagtcaggaaacaacagtcttattctagtgcccctattaaaaaaagaagaacgtgctttgcagagtgacaccactacaaagccaagtagaaccagtgtccaaaggtcaccaattcaagataagcccagatttggcattcatctgaagagtccagtaaagatccagaggacatcgtgtcagttcaagtgtggcaggccaggtctcactaacacaggcctccgtaacaactgtttccatactgaccgagtggttaagttaaatattgaaagtcaaagcccttatacaaagcctgggatataa

SEQ ID NO: 5462 - DNA, 4794 bp, Homo sapiens; identical to SEQ ID NO: 3980
  SIMILAR (1435)..(2874): 971254mologous to Homo sapiens putative p150,accession number U93563,Smith-Waterman Score=2534.

SEQ ID NO: 5463 - DNA, 2234 bp, Homo sapiens
  SIMILAR (1563)..(2228): 941254mologous to Homo sapiens putative p150,accession number U93563,Smith-Waterman Score=1051.
ttagcaggttcttaatcggaaagttgaaaaaggcgacacattgccatgtgcgcattttttattgcttattccgggggcggcttcaacgggaagcggccgcgcaccagcacaaagaacagcggcacgaagtaaatagccagaataatggccgatatcatgccgcccattatcccagttcccagggcatgctgaccaccggaaccggcacccgtactggttgccattcgccatgaggccgaagataaatgccagccgaggcatcataatcgggggtaaacgctgaatgcaggtcgtgagcgacacctcaaaccggtcgtggcctcttttggttctcttgggcagtatggccattttcacgatattgattcttcctacctacgagcatggaatgttcttccgtttgtttgtatcctcttttatttcattgagcagtggtttgtagttctccttgaggaggtccttcacatcccttgtaagttggattcctaggtattttattctctttgaagcaataacagaatgggagttcactcatgatttggctctctgtttgtctgttattggtgtataagaatgcttgtgatttttgtacattgattttgtatcctgaggagtttgctgaagtcgcttatcagttgatcatggtggataagctttttgatgtgctgctggattcgttttgccagtattttattgaggatttttgcatcaatgttcatcaaggatattggtctaaaattctcttttttggttgtgtctctgcccggctttggtatcaggatgatgctggcctcataaaatgtgttggggaggagttgctctttttctattgtttggaaccatttcagaaggaatggtaccagctcctctctgtacctctggtagaatttggctgtgaatccgtctggtcctgggctttttttggctgggacatggatgaagctggaaaccatcattctcagcaaactaacacaccaacagaaaaccgaacagcacatcttctcactcataagtgggaattgaacaatgaaaacacatggacacatggagggaaacatcacacaccagggcctgttgggggatgttcacttatccaagtggaaatcagatggtttatcgaaatggtatgtaagagagaagtttacagatacgaccattcatggtggtggcagttgcagcaacagcagcaggatccccagggcagactgcaggcctctgggggctgggctctcagaagggtgccaggccacagccaaaatgctcaggcagaagcaaggtggctgtactgtgagcctagggaaggcaggtcccccttagcgggaacagtgaaagcaagggtgctcaatgtgcttgctcctttaccctgcagcagcagcagccgtgatacacatttttgggcttcctcaggcatgagccaaatatcagacactctatccctcaaactccaagagaccctcacgttcctcaacatccttctcttccaaagaaagggagaggggaagaacagcatgtcaacaacactctccaaagaattcctgactctcagcttctttgacttcaacctgtttcaaaactcaatgttggaagttctggccagggcaattaggcaggagaaggaaataaagggtattcaattaggaaaagaggaagtcaaattgtccctgtttgcagatgacatgattgtatatctagaaaacccccttgtctcagcccaaaatctccttaagctgataagcaacttcagcaaagtctcagaatacaaaatcaatgtacaaaaatcacaagcattcttacacaccaataacagacaaacagagagccaaatcatgagtgaactccccttcacaattgcttcaaagagaataaaatacctaggaatccaacttacaagggatgtgaaggacctcttcaaggagaactacaaaccactgctcaatgaaataaaagaggatacaaacaaatggaagaacattccatgctcatgggtaggaagaatcaatatcgtgaaaatggccatactgcccaaggtaatttatagattcaatgccatcctcatcaagctaccaatgactttcttcacagaattggaaaaaactactttaaagttcatatggaaccaaaaaagagcccacgtcgccaagtcaatcctaagccaaaagaacaaagctggaggcatcacactacctgacttcaaatacaaggctacagtaaccaaaacagcatggtatatataa

SEQ ID NO: 5464 - DNA, 4131 bp, Homo sapiens; identical to SEQ ID NO: 4015
  SIMILAR (3487)..(4128): 971254mologous to Cloning vector pBACe3.6 levansucrase,accession number U80929,Smith-Waterman Score=1084.
  misc_feature (1)...(4131): n = a,t,c or g

SEQ ID NO: 5465 - DNA, 4911 bp, Homo sapiens
  SIMILAR (2491)..(4347): 841254mologous to Homo sapiens putative p150,accession number U93563,Smith-Waterman Score=2698.
atgaaggcagaaataaaaatgttctttgaaaccaacgagaacaaagacacaacataccagaatctctgggacgcattcaaagcagtgtgtagagggaaatttatagcactaaatgcccacaagagaaagcaggaaagatccaaaattgacaacctaacatcacaattaaaagaactagaaaagcaagagcaaacacattcaaaagctagcagaaggcaagaaataactaaaatcagagcagaactgaaggaaatagagacacaaaaaacccttcaaaaaatcaatgaatccaggagctggttttttgaaaggatcaacaaaattgatagaccgctagcaagactaataaagaaaaaaagagagaagaatcaaatagacacaataaaaaatgataaatgggatatcaccaccgatcccacagaaatacaaactaccatcagagaatactacaaacacctctacgcaaataaactagaaaatctagaagaaatggataaattcctcgacacatacactctcccaagactaaaccaggaagaagttgaatctctgaatagaccaataacaggatctgaaattgtggcaataatcaatagcttaccaaccaaaaagagtccaggaccagatggattcacagccgaattctaccagaggtacaaggaggaactggtaccattccttctgaaactattccaatcaataggaaaagagggaatcctccctaactcattttatgaggccagcatcattctgataccaaagccaggcagagacacaaccaaaaaagcaaattttagaccaatatccttgatgaacattgatgcaaaaatcctcaataaaatactggcaaaacgaatccagcagcacatcaaaaagcttatccaccatgatcaacatataaacaaagccaaagacaaaaaccacatgattatctcaatagatgcagaaaaagcctttgacaaaattcaacaacccttcatgctaaaaactctcaataaattaggtattgatgggacgtatttcaaaataataagagctatctatgacaaacccacagccaatatcatactgaatgggcaaaaactggaagcattccctttgaaaactggcacaagacagggatgccctctctcaccactcctattcaacatagtgttggaagttctggccagggcaattaggcaggagaaggaaataaagggtattcaattaggaaaagaggaagtcaaatttgtccctgttggcagatgacatgatggtatatcttagaaaatcccaatgtctcagccccaaaatcttctttaaggctggttaagcaacttcagcaaaagtcttcaggttacaaaatcaatgtgcaaaaatcacaagcattcttatacaccaacaaaagacaaacagagagccaaatcataagtgaattcccattcacaattgcttcaaagagaataaaatacctaggaatccaacttacaagggatgtgaaggacctcttcaaggagaactacaaaccactgctcaaggaaataaaagaggatacaaacaaatggaagaacattccatgctcatgggtaggaagaatcaatatcgtgaaaaatggccatactgcccaaggtaatttatagatacaatgccatccccatcaagctaccaatgactttcttcacagaattggaaaaaactactttaaagttcatatggaaccaaaaaagagcctacatcaccaagtcaatcctaagccaaaaggacaaagctggaggcatcacgctacctgacttcaaactacactacaaggctacacagggtactccaacagacctgcagctgagggtcctctctgttagaaggaaaactaacacaaaggacatccacaccaaaaacccatctgtacaacaccatcatcaaagaccaaaagtagataaaaccacaaagatggggaaaaaacagaacagaaaaactggaaactctaaaaagcagagcgcctctcctcctccaaaggaacgcagttcctcaccagcaatggaacaaagctggatggagaatgactttgatgagttgagagaagaaggcttcagacgatcaaattactctgagctacgggaggacattcaaaccaaaggcaaagaagttgaaaactttgaaaaaaatttagaagaatgtataactagaataaccaatacagagaagtgcttaaaggagctgatggagctgaaaaccaaggctcgagaactacatgaagaatgcagaagcctcaggagccgatgcgatcaactggaagaaagggtatcagcaatggaagatgaaatgaatgaaatgaagcgagaagggaagtttagagaaaaaagaataaaaagaaatgagcaaagcctccaagaaatatgggactatgtgaaaagaccaaatctacgtctgattggtgtacctgaaagtgatggggagaatggaaccaagttggaaaacactctgcaggatattatccaggagaacttccccaatctagcaaggcaggccaaccatataaacagagccaaagacaaaacccacatgattatctcaatagatgcagaaaaagcctttgacaaaattcaacaactcttcatgctaaaaactctcaataaattaggtattgatgggacgtatttcaaaataataagagctatctatgacaaacccacagccaatatcatactgaatgggcaaaaactggaagcattccctttgaaaactggcacaagacagggatgccctctctcaccgctcctattcaacatagtgttggaagttctggccagggcaatcaggcaggagaaggaaataaagggtattcaattagcaaaagaggaagtcaaattgtccctgtttgcagacgacatgattgtttatctagaaaaccccatcgtctcagcccaaaatctccttaagctgataagcaacttcggcaaagtctcaggatacaaaatcaatgtacaaaaatcacaagcattcttatacaccaacaccagacaaacagagagccaaatcatgagtgaactcccattcacaattgcttcaaagagaataaaatacctaggaatccaacttacaagggatgtgaaggacctcttcaaggagaactacaaaccacttgctcaatgaaataaaagaggatacaaacaaatggaagaacattccatgctcatgggtaggaagaatcaatatcgtgaaaatggccatactgcccaaggtaatttacagattcaatgccatccccatcaagctaccaatgactttcttcacagaattggaaaaaactactttaaagttcatatgggaaccaaaaaagagcctgcatcgccaagtcaatcctaagccaaaagaacaaagctgggaggcatcacactacctgactttcaaactattacttacaaggctacagtaaccaaaacagcatggtactggtaccaaaacagagatatagatcaatggaacagaacagagccctcagaaataacactacatatctacaactatctgatctttgacaaacctgagaaaaacaagcaatggggaaaggattccctatttaataaatggtgctgggaaaactggctagccatatgtagaaagctgaaactggatcccttccttacaccttatacaaaaatcaattcaagatggattaaagacttaaacgttagacctaaaaccataaaaaccctagaagaaaagctaggcattaccattcaggacataggcattggcaaggacttcatgtctaaaacaccaaaagcaatggcaacaaaagacaaaattgacaaatgggatctaattaaactaaagagcttctgcacagcgaaagaaactaccatcagagtgaacaggcaacctacaaaatgggaggaaattttcgcaacctactcatctgacaaagggctaatatccagaatctacaatgggctcaaacaaatttacaagaaaaaaacaaacaaccccatcaaaaagtgggcgaaggacatgaacagacacttctcaaaagaagacatttatgcagctaaaaaacacgtgaaaaaatgctcatcatcactggccatcagagaaatgcaaatcaaaaccacaatgagataccatctcacaccagttagaatggcaatcattaaaaagtcaggaagcaacagatgctggagaggatgtggagaaataggaacacttttacactgttggtgggactgtaaactagttcaaccattgtggaagtcagtgtggcgattcctcagggatctagaactagaaataccatttgacccagccatcccattactgggtatatacccaaacgactataaatcatgctgctataaagacacatgcacattgagtctaccagaaatccgcaactgcccaacgaaaagtgtcccagtccccttctctgttgatgaaactcagtatcatgttgaagatactagtcctgtaagctggcaagtaaaagttctaggcaagcatatacatcagggaagcagctatgaagatgtttggctgcctcagcgcatgcaaggaaaactaacaaacagaaaggacatccacaccaaaaacccatctgtacatcaccatcatcaaagaccaaaagtagataaaaccacaaagatggggaaaaaacagaacagaaaaactggaaactctaaaaagcagagcgcctctcctcctccaaaggaacgcagttcctcaccagcaatgcaacaaagctggacggagaatgactttgacgagctgagagaagaaggcttcagacgatcaaattactctgagctacgggaggacattcaaaccaaaggcaaagaagttgaaaactttgaaaaaaatttagaagaatgtataactagaataaccaatacagagaagtgcttaaaggagctgatggagctgaaaaccaaggcttga

SEQ ID NO: 5466 - DNA, 3121 bp, Homo sapiens
  SIMILAR (247)..(1242): 921254mologous to Homo sapiens putative p150,accession number U93563,Smith-Waterman Score=1544.
atgggtaccgagcgtgcattcgaggtcatcggtacccggaactgtcagttaagaaatagtgatactgcattgctgactcacagtcagctcatgggtcactatgctgcccccattctgttgagatttcagtacactttccgtatatggagtttctgtgttgatgactccctgttggccaaagggaccccagaaaagactgaagaactgagttcgtggccattgatggaagcgagtgggcttcatccctgggatgcaaggctggttaaacatacgcgaatcagtagggaatttatagcactaaatgcctacaagagaaagcaggaaagatccaaaattgacaccctaacatcacaattaaaagaactagaaaagcaagagcaaacacattcaaaagctagcagaaggcaagaaataactaaaatcagagcagaactgaaggaaatagagacacaaaaaacccttcaaaaaatcaatgaatccaggagctggttttttgaaaggatcaacaaaattgatagaccgctagcaagactaataaagaaaaaaagagagaagaatcaaatagacacaataaaaaatgataaaggggatatcaccaccgatcccacagaaatacaaactaccatcagagaatactacaaacacctctacgcaaataaactagaaaatctagaagaaatggatacattcctcgacacatacactctcccaagactaaaccaggaagaagttgaatttctgaagagaccaatatcaggctctgaaattgtggcaataatcaatagtttaccaaccaaaaagagtccaggaccagatggattcacagccgaattctaccagaggtacaaggaggaactggtaccattccttctgaaactattccaatcaatagaaaaagagggaatcctccctaactcattttatgaggccagcatcattctgataccaaagccgggcagagacacaaccaaaaaagagaattttagaccaatatccttgatgaacattgatgcaaaaatcctcaataaaatactggcaaaccgaatccagcagcacatcaaaaagcttatccaccatgatcaagtgggcttcatccctgggatgcaaggctggttcaatatacgcaaatcaataaatgtaatccagcatataaacagagccaaagacaaaaaccacatgattatctcaatagatgcagaaaaaaagcctttgacaaaattcaacaacccttcatgctacaaactctcaataaattaggtattgatgggacgtatttcaaaataataagagctatctatgacaaacccacagccaatatcatactgaatgggcaaaaactggaagcattccctttgaaaactggcacaagacagggatgtcctctctcactgctcctattcaacatagtgttggaagttctggccagggcaatcaggcaggagaaggaaataaagggtattcaattaggaaaagaggaagtcaaattgtccctgtttgcagacgacatgattgtttatctagaaaaccccatcatctcagcccaaaatctccttaagctgataagcaacttcagcaaagtctcaggatacaaaatcaatgtacaaaaatcacaaacattcttatacaacaacaacagacaaacagagagccaaatcatgagtgaactcccattcacaattgctttaaagagaataaaatacctaggaatccaacttacaagggatgtgaaggacctcttcaaggagaactacaaaccactgctcaaggaaataaaagaggacacaaacaaatggaagaacattccatgctcatgggtaggaagaatcaatatcgtgaaaatggccatactgcccaaggtaatttacagattcaatgccatccccatcaagctaccaatgactttcttcacagaattggaaaaaactactttaaagttcatatggaaccaaaaaagagcccgcatcgccaagtcaatcctaagccaaaagaacaaagctggaggcatcacactacctgacttcaaactatactacaaggctacagtaaccaaaacagcatggtactggtaccaaaacagagatatagatcaatggaacagaacagagccctcagaaataatgccgcatatctacaactatctgatctttgacaaacctgagaaaaacaagcaatggggaaaggattccctatttaataaatggtgctgggaaaactggctagccatatgtagaaagctgaaactggatcccttccttacacgttatacaaaaatcaattcaagatggattaaagatttaaatgttagacctaaaaccataaaaaccctagaagaaaacctaggcattaccattcaggacataggcgtgggcaaggacttcatgtccaaaacaccaaaagcaatggcagcaaaagccaaaattgacaaatgggatctaattaaactaaagagcttctgcacagcaaaagaaactaccatcagagtgaacaggcaacctacaacatgggagaaaattttcgcaacctactcatctgacaaagggctaatatccagaatctacaatgaactccaacaaatttacaagaaaaaaacaaacaaccccatcaaaaagtgggcgaaggacatgaacagacacttctcaaaagaagacatttatgcagccaaaaaacacatgaaaaaaatgctcatcatcactggccatcagagacaatgcaaatcaaaaccactatgagatatcatctcacaccagttagaatggcaatcattaaaaagtcaggaaacaacagaatcagaaggcatttccagccaagatcagccatgttcttctgctgctgccctgggggcgagggctcagggctgcagtgggagctgctgctggcagcatggactgtgctcccctacccctgccctgcagccacagttgggagattcctcaagcaggcacagactgctgaccattccttcctgggccatgtttggagggtgcccagcagcaggagctggactgataaagaaatcctgagcttggtcgtcaacagacagaaccaggaagttgtgcagctcatagggggcctctgtgggacacacaccatctcgcccacacagcacccagccacgggttga

SEQ ID NO: 5467 - DNA, 5719 bp, Homo sapiens
  SIMILAR (2392)..(3282): 861254mologous to Homo sapiens putative p150,accession number U93563,Smith-Waterman Score=1332.
atgagtgaactcccattcacaattgcttcaaagagaataaaatacctaggaatccaacttacaagggatgtgaaggacctcttcaaggagaactacaaaccactgctcaaggaaataaaagaggatacaaacaaatggaagaacattccatgctcatgggtagaaagaatcaatatcgtgaaaatggccatactgcccaagggattttgccgatttcggaaccaccatcaaacaggattttcgcctgctggggcaaaccagcgtggaccgcttgctgcaactctctcagggccaggcggtgaagggcaatcagctgttgcccgtctcactggtgaaaagaaaaaccaccctggcgcccaatacgcaaaccgcctctccccgcgcgttggccgattcattaatgcagctggcacgacaggtttcccgactggaaagcgggcagtgagcgcaacgcaattaatggattttgccgatttcggaaccaccatcaaacaggattttcgcctgctggggcaaaccagcgtggaccgcttgctgcaactctctcagggccaggcggaagaaagtatgaagacagtgagagaattgatcaagatttcacaggaggcacgtgaagagaaaatgaaaccagtgctcagtgacttcatcagtcggagcaggaaagattctagctttttcatcgcgggctcctttcagggcgatgaaaaaccccttccttctcggcgaaattttcaatgctgccgtatatccttactggcttccgcagaggtcaatccgaatattcaggcatatttagcaacatggatctcgcagataccgttcatgtcctgtaagggtgccatcagattttctgatctggtcaacgaacagatacagcatacgtttttgatcccggaagagactatatgccgcctcattattaggtccctcgactatagggtcaccgtcgacagcgacacacttgcatcggatgcagcccggttaacgtgccggcacggcctgggtaaccagggattttgccgatttcggaaccaccatcaaacaggattttcgcctgctggggcaaaccagcgtggaccgcttgctgcaactctctcagggccaggcggtgaagggcaatcagctgttgcccgtctcactggtgaaaagaaaaaccaccctggcgcccaatacgcaaaccgcctctccccgcgcgttggccgattcattaatgcagctggcacgacaggtttcccgactggaaagcgggcagtgagcgcaacgcaattaatagtcccccacggacggttttcaagcccaagtcgaaaacctttgcggaatttccagaagaattccccttttagcaggcaggcacctcagattcaggaaagcaggaccccccaagatactcctcgagagagcagtccaagacaaatatgtcaattcaccaaagtgaaagaagaaaaaatgtctgccctaaaagagctcctgaaggaagcactaaacatggaaaggaacaaccggagctggttttttgaaaagatcaacaaaattgatagaccactagcaagagtaataaagaagaaaagagagaagaatcaaatagacgcaataaaaaatgataaagaggatatcaccaccaatcccacagaaatacaaactatcatcagagaatactacaaacacctctacccaaataaactagaaaatctagaagaaatggatacattcctcgacacatacaccttcccaagactaaaccaggaagaagttgaatctctgaatacatcaataacaggctctgaaattgtggcaataatcagtatagcataccaaccaaaaaaagtccaggaccagatggatccacagccgaattctaccagaggtacaaggaaggagctgtgttggaagttctggccagggcaatcaggcaggagaaggaaataaagggtattcaattaggaaaagaggaagtcaaattgtccctctttgcaggtgacatgattgtatatctagaaaaccccattgtctcagcccaaaatctccttaagctgataagcaacttcagcaaagtctcaggatacaaaatcaatgtgcaaaaatcacaagcattcttatacaccaataacagacaaacagagagccaaatcatgagtgaactcccattcacaattgcttcaaagagaataaaatacctaggaatccaacttacaagggatgtgaaggacctcttcaaggagaactacaaaccactgctcaatgaaataaaagaggatacaaacaaatggaagaacattccatgctcatgggtaggaagaatcaatatcgtgaaaatggccatactgcccaaggtaatttacggattcaatgccatccccatcaagctaccaatgactttcttcacagaattggaaaaaaactactttaaagttcatatggaaccaaaaaagagcccacatcgccaagtcaatcctaagccaaaagaacaaagctaagaggcatcatgctacctgacttcaaactatactacaaggctatagtaactcaaaacagcatggtactggtaccaaaacagcatggtactggtaccaaaacagagatatagatcaatggaacagaacagagccctcagaaataacgccgcatatctacaactatctgatatttgacaaacctgacaaaaacaagaaatggggaaaggattccctatttaataaatggtgctgggaaaactggctagtcatatgtataaagctgaaactggatcccttccttacaccttatacaaaaattaattcaagatggattaaagacttaaatgttagacctaaaaccataaaaaccatagaagaaaacctaggcaataccattcaggacataggcatgggcaaggacttcatgtctgaaacactaaaagcaagggcaacaaaagccaaaattgacaaatgggatctaattaaactaaagagcttctgcacagcaaaagaaactaccatcagagtgaacaggcaacctacaaaatgggagaaaatttttgcaatctactcatctgacaaagggttaatacccagaatctacaaagaactcaaacaaatttacaagaaaaaaacaaacagccccatcaaaaagtgggtgaaggatatgaacagacacttctcaaaagaagacatttatgcagccaaaaaacacatgaagaaatgctcatcatcactggccatcagagaaatgcaaatcaaaaccgctatgagataccatctcacaccagttagaatggcaatcattaaaaagtcaggaaacaacagaatctttgatcacctgctcagctttctgctgctgctgtccttttctgctgttataccttatgatgtctttgtctttgacagttacaaaccactaattccaccaacccctccttttgaactctccacatctgtatttcaacatataatggttgtcaagaaaacaaagttacctgtcaaacagactcaggcaggtccttcaaaaggtattccagaagacgccattgttatcataggaaatgacagcttcatgcatgttactgtccctgaagacctttcagtgggacaagatgtggaggtggaagacagtgatattgaggtcaaatggccacaggaaaaaagcagcagcgcattttcagctcacctccctgtggttctgccctctccaaagcctcagaccttcaggtcctcatggcttcagcagatctccattgcctttaagccaattattcttacatttcatcttgatttattacttgttttagaagaaacattgactatggaaacgatgttagacaaaaagcaaattcaggcaattttcttattcgagttcaaaatgggtcgcaaagcagtggagacaactcgcaacatcagcaacacattgggcccagaaactgctaatgaatgtacaaagtttggcaaaggagaaaagagccttgaagataaggagcatagttgtcggccatgggaagttgacaatgaccaactgagagcaatcatcgaagttgatcctcttacagctatgagagaagtggcagaagaactcaacgtcaaccgttctacagtctttcagcatttgaagcaaattgcaagatatggtaaactctttcgaagtcctcctacatcttgggcacaatggcagacacttgagcatgtgttgtctctgttcatcgtcacaataaccttttgggtgttggaagttctggccagggcaattaggcaggagaaggaaataaagggtattcaattaggaaaagaggaagtcaaattgtccctgtttgcagatgacatgattgtatatctagaaaaccccattgtctcagcccaaaatctccttaagctgataagcaacttcagcaaagtctcaggatacaaaatcaatgtacaaaaatcacaagcattcttatacaccaacaacagacaaacagagagccaaatcatgagtgaactcccattcacaattgcttcaaagagaataaaatacctaggaatccaacttacaagggatgtgaaggacctccttcaaggagacctacaaaccactgctcaatgaaataaaagaggatacaaacaaatggaagaatattccatgctcatgggtaggaaaaatcaatatcgtgaatatggccatactgcccaaggtaacttatagattcaataccatccccatcaagctaccaatgactttcttcacagaattggaaaaaactactttcaagttcatatggaaccaaaagagagcccgcatcgccaagtcaatcctaagccaaaagaataaagctgaaggcatcatgctacctgacttcaaactatactacaaggctacagtaaccaaaacagcatggtactggtaccaaaacagagatatagatcaatggaacagaacagagccctcagaaataacgccgcatatctacaactatctgatctttgacaaacctgagaaaaacaagcaatggggaaaggattccctatttaataaatggtgctgggaaaactggctagccatatgtagaaagctgaaactggatcccttccttacaccttatacaaaaatcaattcaagatggattaaagacttaaacgttagacctaaaaccataaaaaccctagaagaaaacctaggcaataccattcagaacataggcatgggcaaggacttcatgtctaaaacaccaaaagcaatggcaacaaaagacaaaattgacaaatgggatctaattaaactaaagagcttctgcacagcaaaagaaactacaatcagagtgaacaggcaacctacaaaatgggagaaaatttttgcaacctactcatctgacaaagggctaatatccagaatctacaatgaactcaaacaaatttacaagaaaaaaacaaacaaccccatcaaaaagtggacaaaggacatgaacagatacttctcaaaagaagacatttatgcagccaaaaagcacatgaaaaaatgctcatcatcactagccatcagagaaatgcaaatcaaaaccacaatgagataccatctcacaccagttagaatggcaatcattaaaaagtcaggaaacaacagccatgctgacatcttggcccctgcactgcaaaatgtgaagaatggaggacaagatcaagagcacagaatccttcaggatacacgccaagctctgggaccatctgctcttccactgacatcttctctgtgtattcacaaaagagtatctgattag

SEQ ID NO: 5468 - DNA, 5584 bp, Homo sapiens
  SIMILAR (1)..(1041): 961254mologous to Homo sapiens putative p150,accession number U93563,Smith-Waterman Score=1736.
atgggagactttaacaccccactgtcaacattagacagatcaacgagacagaaagtcaacaaggatacccaggaattgaactcagctctgcaccaagcggacctaatagatatctaccaaactctccaccccaaatcaacagaatatacatttttttcagcaccacaccacacctattccaaaattgaccacatacttggaagtaaagctctcctcagcaaatgtaaaagaacacaaattataacaaactatctctcagaccacagtgcaatcaaactagaactcaggattaagaatctcactcaaaaccactcaactacatggaaactgaacaacctgctcctgaatgactactgggtatataacgaaatgaaggcagaaataaagatgttctttgaaaccaacgagaacgaagacacaacataccagaatctctgggatgcattcaaagcagtgtgtagagggaaatttatagcactaaatgcccacaagagaaagcaggaaagatccaaaattgacaccctaacatcacaattaaaagaactagaaaagcaagagcaaacacattcaaaagctagcagaaggcaagaaataactaaaatcagagcagaactgaaggaaatagagacacaaaaaacccttcaaaaaattaatgaatccaggagctggttttttgaaaggatcaacaaaattgatagaccgctagccagactaataaagaaaaaaagagagaagaatcaaatagacacaataaaaaatgataaaggggatatcaccaccgatcccacagaaatacaaactaccatcagagaatactacaaacacctctacgcaaataaactagaaaatctagaagaaatggataaattcctcgacacatacactctcccaagactaaaccaggaagaagttgaatctctgaatagaccaataacaggagctgaaaatgtggcaataatcaatagtttaccaaccaaaaagagtccaggaccagatggattcacagccgaattctaccagaggtacaaggaggaactgctgataagcaacttcagcaaagtctcaggatacaaaatcaatgtacgaaaatcacaagcattcttatacaccgacaacagacaaacagagagccaaatcatgagtgaactcccattcacaattgcttcaaagagaataaaatacctaggaatccaacttacaagggatgtgaaggacctcttcaaggagaactacaaaccactgctcaaggaaataaaagaggatacaaacaaatggaagaacattccatggtcatgggtaggaagaatcaatatcgtgaaaatggccatactgcccaagaggaaacagccttctgcactcacagccgaagggaaagcagcaggttggggcttcttgtggccaacttcagagcctgtcaccaggaaaggtttagaagagaacgctcagtcccggcaggagtccacgcggaggctcatccttgttgggagaacaggggccgggaagagcgccactgggaacagcatcctgggccagagacggttcttctccaggctgggggccacgtctgtgaccagggcctgcaccacgggcagccgcaggtgggacaagtgccacgtggaagtcgtggacactccggacattttcagctcccaagtgtccaagacagatcctggctgtgaggagagaggtcactgctacctgctctcggcccccggaccccacgcgctgctcctggtgacccagttgggtcggttcaccgcccaggaccagcaggcggtgaggcaggtgagggacatgttcggggaggacgtcctaaaatggatggtcatcgtcttcaccaggaaggaggacctggccgggggctccctgcacgattacgtgagcaacacagagaaccgggccttgcgcgagctggtggccgagtgcgggggccgggtctgtgcctttgataaccgggccaccggccgggagcaggaagcccaggtggagcagctgctggggatggtcgagggcttggtgctggagcacaagggcgcccattactccaacgaggtgtatgagctggcgcaggtgctgcgctgggcaggccctgaggagcggctccggcgggtggcggagcgcgtggcagccaggggagaatggacagaagaaatatttgaaaaggaaatggttaagacttttctaaaagtattgaaggacaccaaactacagatccaagaaacagagagctccaagcagggctcccctttgtcttccacaatgattggaagcctcctgaggccctcaccagaagaagatgccagcactgtgaggccctcaccagaagaagatgccagcactgtgcttcctgcacagcctgcaaactggtgggctccatcacgtgccagacagcttaccagggtcagtcacgagcccagagtcaaaccctgcaagggcttgttctggtcctctttggaccagagtgcctttctgatcctggttagcagaaactttccagaagcagagcctctgagtcatggagctttcagccccagcacatggctcctccttaactgcgtctgctcaacctccctcagccctgtgaacagcatccccgcacacagacgcagagcaggactctctctgctgccacttcaccttcctgagagaggaccagcggccagagcctcagtgactgccaccctggaggacagggcacaacaaccgtttctggagagaatgggaggattccagaggggcaaatatggaactatggctgaaggtagatcagaagataacttgtctgcaacaccaccggcattgaggattatcctagtgggcaaaacaggctgcgggaaaagtgccacagggaacagcatccttggccagcccgtgtttgagtccaagctgagggcccagtcagtgaccaggacgtgccaggtgaaaacaggaacatggaacgggaggaaagtcctggtggttgacacgccctccatctttgagtcacaggccgatacccaagagctgtacaagaacatcggggactgctacctgctctctgccccggggccccacgtcctgcttctggtgatccagctggggcgtttcactgctcaggacacagtggccatcaggaaggtgaaagaggtctttgggacaggggccatgagacatgtggtcatcctcttcacccacaaagaggacttagggggccaggccctggatgactatgtagcaaacacggacaactgcagcctgaaagacctggtgcgggagtgtgagagaaggtactgtgccttcaacaactggggctctgtggaggagcagaggcagcagcaggcagagctcctggctgtgattgagaggctggggagggagcgagagggctccttccacagcaatgacctcttcttggatgcccagctgctccaaagaactggagctggggcctgccaggaagactacaggcagtaccaggccaaagtggaatggcaggtactgcctgtagtcttcttggcaggccccagccctgcctctctggagcagctgggcatccaggaagaggttattgctgtagaaggagccctctcgctccctccccagcctctcgatcgcagccaggagctctgcctgctgctgcctctgctcctccccggcagcccggttgttgaaggcacagtaccttctctcacattcctgcaccagtgctcgggtagaaaatccacccaggccccacagaagaataacttctcaggcttcgctactatgaaaaacccatacaacccattccagagcaacatgaggaccttgctgtgtgcaaagtttcacacaatgaagcatgcaggcctgggtgaaggaatacctcctgacaactccgggaatgatggctatgctaataatgggtatagtgcccgtgaagaagaaaatgagacactcactgaaaatctgagaagcaaagtaactgctataaaatctttttccattgaaataggccatgaagttaaaacccaaaataaattattagctgtaatggattcacaatttgattctacaactggatttctagtgttggaagttctggccagggcaatcaggcaggagaaagaaataaagggtattcaattaggaaaagaggaagtcaaattgtccctgtttgcagatgacatgattgtacatttagaaaaccccatcgtctcagcccaaaatctctttaagctgataagcaacttcagcaaagtctcaggatacaaaatcaatgtgcaaaaatcacaagcattcttatacaccaataacagacaaacagagagccaaatcatgagtgaactcccattcacaattgcttcaaagagaataaaaaacctaggaatccaacttacaagggatgtgaaggacctcttcaaggagaactacaaaccactgctcaaccgaaataaaagaggacacaaacaaatggaagaacattccatgctcatggataggaagaatcaatattgtgaaaatggccatactggccaaggtaatttatagattcaatggcatccccatcaagctacaaatgactttcttcacagaattggaaaaaaactactttaaagttcatatggaaccaaaaaaagagcccgcatcgccaaggcaatcctaagccaaaagaacgaagctggaggcatcacactacctgacttcaaactatactacaaggctacagtaaccaaaacagcatggtactggtaccaaaacagagatatagatccatggaacagaacagagccctcagaaataacgcagcatatctacaactatctgatctttgacaaacctgagaaaaacaagcaacggggaaaggattccctatttaataaatggtgctgggaaaactggctagccatatgtagaaagctgaaactggatcccttccttacaccttatacaaaaatcaattcaagatggattaaagacttaaacgttagacctaaaaccataaaaaccctagaagaaaacctaggcattaccattcaggacataggcatgggcaaggacttcatgtctaaaacaccaaaagcaatggcaacaaaagacaaaattgacaaatgggatctaattaaactaaagagcttctgcatagcaaaagaaactaccatcagagtgaacaggcaacctacaaaatgggagaaaattttcacagcctactcatctgacaaagggctaatatccagaatctacaatgaactccaacaaatttacaagaaaaaaacaaaacaactgcatcaaaaagtgggcgaaggacatgaacagacacttctcaaaagaagacatttatgcagccaaaaaacacatgaaaaaatgctcaccatcactggccatcagagaaatgcaaatcaaaaccacaatgagataccatctcacaccagttagaatggcaatcattaaaaagtcaggaaacagcagagtatactccttccacttaaatataaaagttaactgtaagacagcctcaggaggtgttccaaaaggcattgttaatataggagatgacagttccatgcatgttattgcccctgaagaccttctagtgggacaggctgtggagatggaagacagatactag

SEQ ID NO: 5469 - DNA, 5377 bp, Homo sapiens
  SIMILAR (3038)..(4909): 741254mologous to Homo sapiens unknown,accession number AF149422,Smith-Waterman Score=2237.
atgacaggatcaaattcacacataacaatattaactttaaatataaatggactaaattctgcaattaaaagacacagactggcaagttggataaagagtcaagacccatcagtgtgctgtattcaggaaacccatctcatgtgcagagacacacataggctcaaaataaaaggatggaggaagatctaccaagcaaatggaaaacaaaaaaaggcaggggttgcaatcctagtctctgataaaacagactttaaaccaacaaagatcaaaagagacaaagaaggccattacataatggtaaagggatcaattcaacaagaggagctaactatcctaaatatttatgcacccaatacaggagcacccagattcataaagcaagtcctgagtgacctacaaagagacttagactcccacacattaataatgggagactttaacaccccactgtcaatattagacagatcaacgagacagaaagtcaacaaggatacccaggaattgaactcagctctgcaccaagcagacctaatagacatctacagaactctccaccccaaatcaacagaatatacatttttttcagcaccacaccacacctattccaaaatcgaccacatagttggaagtaaagctctcctcagcaaatgtaaaagaacagaaattataacaaactatctctcagaccacagtgcaatcaaactagaactcaggattaagaatctcactcaaagccgctcaactacatggaaactgaacaacctgctcctgaatgactactgggtacataacgaaatgaaggcagaaataaagatgttctttgaaaccaacgagaacaaagacaccacataccagaatctctgggacgcattcaaagcagtgtgtagagggaaatttatagcactaaatgcctacaagagaaagcaggaaaagatccaaaattgacactctaacatcacaattaaaagaactagaaaagcaagagcaaacaacattcaaaagctagcagaaggcaagaaataactaaaatcagagcagaactgaaggaaatagagatacaaaaaacccttcaaaaaattaatgaatccaggagctggtttttttgaaaggatcaacaaaattgatagaccgctagcaagactaacaaagagaaaaagagagaagaatcaaatacacgcaataaaaaatgataaaggggatatcaccaaccgatcccacagaaatacacactaccatcagagaatactataaaaacctctacgcaaagaaactagaaaatctagaagaaatggataaattcctggacacataacactctcccaagactaaaccaggaagaagttgaatctctgaatagaccaataacaggagctgaaattgtggcaataatcaatagtttaccaaccaaaaagagtccaggaccagatggattcacagccgaattctaccagaggtacaaggaggaactggtaccattccttctgaaactattccaatcaatagaaaaacagggaatcctccctaactcattttatgaggccagcaccattctgataccaaagccgggcagagacacaaccgaaaaagagaattttagaccaatatccttgatgaacattgatgcaaaaatcctcaataaaatactggattcggcaaaccgaatccagcagcacatcaaaaagcttatccaacatgatcaagtgggcttcatccctgggaatgcaaggcttggttcaatatacgcaaatcaataaaggtaatccagcatataaacagagccaaagacaaaaaccacatgattatctcaatagatgcagaaaaagcctttgacaaaattcaacaacccttcatgctaaaaactctcaataaattaggtattgatgggacgtatttcaaaataataagagctatctatgacaaacccacagccaatatcatactgaatgggcaaaaactggaagcattccctttgaaaactggcacaagacagggatgccctctctcaccgctcctattcaacatagtgttggaagttctggccagggcaatcaggcaggagaaggaaataaaaggtattcaattaggaaaagaggaagtcaaattgtccctgtttgcagacgacatgattgtttatctagaaaaccccattgtcctcagccccaaatctcccttaagctgataagcaacgtcagccaaagtctgaggatacaaaatcaatgtacaagaatctacaagcattcttatacaccatcaacagacaaacagagagccaaatcatgagtgcactcccagttcacaattgcttcaaagagaataaaatacctaggaatccaacttaacaagggaatgtgaaggaactcttcaaggagaactacaaaccaactgctcaaggaaataaaagaggacacaaacaaatggaagaacattccatgctcatgggtaggaaagaatcaatatcgtgaaaatgggccatacttgcccaaggtaatttacagattcaatgccatccccatcaagctaccaatgactttcttcacagaattggaaaaaaactactttaagtaaagttcattatggaaccaaaaaagagcccgcgtcgccaagtcaatcctaagccaaaagaacaaagctggaggaggcatcatgctacctgacctcatcaaacttcaaactatactgtaaaggctacagtaaccaaaacagtatgttatcagcatggtactggtaccaaaacagcatggtactggtaccaaaacagagatatagaccagtggaacagaatagagcccttggaaataataccatacacctacaaccatctgatcttcgaaaaacctgaacaaaaacaagaaatggggaaaaggattccctatttaataaatggtgctgggaaaactggctagccatatgtaggagaaagctgaaactggatcccttccttacaccttatacaaaaattaattcaagatggattaaagacttaaacatcattagacctaaaaccataaaaaccctagaagaatacctaggcattaccattcaggacataggcatgggcaaggacttcatgtctaaaacaccaaagacaaaagcaatggcaccaaaagcaatggcaacaaaagccaaaattgacaaatgggatctaataattaaacttaagagcttctgcacatctgcacagcaaaaagaaactaccatcagagtgaacaggcaacctgttgggagaaaattcaggcaacctgaatgggagaaaattttcacaacccactcatctgacaaagggctaatatccagaatctacaatgaactcaaacacatttacaagaaaaaaaacaaacaaccccatcaaaaagtggacgaaggcacatgaacagacacttctcaaaagaagacatttatgcagccaaaaaaacacatgaaaaaatgctcaccatcactggccatcagagaaatgcaaatcaaaaccacaatgagataccatctcacaccagttagaatggcaatcattaaaaagtcaggaaacaacaggagctggtattttgaaaagatcaacaaaattgatagactgctagcaagactaataaagaaaaaaagagagaagaatcaaatagacgcaataaaaaatgataaaggggatatcaccactgatcccacagaaatacaaactaccaccagagaatactataaacacctctatgcaaataaactagaaaatctagaagaaatggataaattcctcgacacatacaacctcccaagactaaagcaggaagaagttgaatctctgaatagaccaataagaggctctgaaattgtggcaataatcaatagcttaccaaccaaaaaaagtccaggaccagatggattcacagccgaattctaccacaggtacaaagaggagctggtaccattgcttctgaaactattccaatcaatagaaaaagaggtaatcctccctaactcattttatgaggccagcatcatcctgataccaaagcctgacagagacacagcaaaaaaagagaattttagaccaatatccttgatgaacatcgatgcaaaaatcctcaataaaatactggcaaaccgaatccagcagcacatcaaaaagcttatccaccatgatcaagtgggcttcatccctgggatgcaaggctggttcaacatacgcaaatcagtaaatgtaatccagcatataaacagaaccaaagacaaaaaccacatgatcatctcaatagatgcagaaaagtcctttgataaaattcaacaacacttcatgctaaaaactctcaataaattaggtattgatgggacatatctgacatatctcaaaataataagagctatttatgacaaacccacagccaatatcatactgaatgggcaaaaactggaagcattcccttttaagactggcacaagacagggatgtcctctctcaccactcctattcaacatagtgttggaagctctggccagggcaatcaggcaagagaaagaaataaagggtattcaattaggaaaagaggatgtcaaattgtccctgtttgcagatgacatgattgtatatttagaaaaccccatcgtctcagcccaaaatctccttaagctgataagcaacttcagcgaagtctcaggatacaaaatcaatgtgcaaaaatcacaagcattcctatacaccaataacagacagacagagagccaaatcatgagtgaactcccattcacaattgcttcaaagagaataaaatacctaggaatacaacttacaagggatgtgaaggacctcttcaaggagaactacaaaccactgctcaatgaaataaaagaggacacaaacaaatggaagaacattccatgctcatggataggaagaatcaatattgtgaaaatggccatactgcccaagacttgcacttatgatgatgaatataaaaagaaagacataaagagtgttgcattttggaggatctggcaagatggccaaataggaagagctccggtctgcagcttccagcagaccaacatagaagatcatcagcctcaaagatcaaaggcagataaacccacaaagatgaggaaaaatcagcgcaaatatgctgaaaattccaaaaaccagaatgcctcttctcttccaaatgatcgcaactcctctccagaaagggcacaaaactggttggagaataaatgtgatgaattgtcagaagtaggcttcaaaaggtgggtaataacaaactcctctgagctaaaggagcatgttctaacccaatgcaaggaagctaagaaccttgataaaaggttacaggaactgctaactaaaataaccagtgtagagaagaacacaaatgacctgatggagctgaaaaacacagcatga

SEQ ID NO: 5470 - DNA, 4037 bp, Homo sapiens
  SIMILAR (509)..(919): 1001254mologous to Homo sapiens acetylglucosaminyltransferase -like protein,accession number AJ007583,Smith-Waterman Score=702.
ggccgcgctcgtctcgccgggctgttcgcgggcaggccctgccctgaagggacgaatcggcttggagcgcgggaggtggagtcggccccggcggtcgctccctggacccaacccgaggctgacccaggcccctgcccatgcggggcgcccctggctcggaagagtcccccgggccgggagcagctccaggcagcggccccggaggaagaggaagaagggacagtgctcagcttgggggacccggaccctcgccgcggcatttggagccgggggcagtcccgaactctgtgcttggcaccgccgctccgagtagggcagcgcctgccgggaccctgacccggaccccctgcgcctcgtaggcggcggcgccgccgcgccaccctgttcttccgtgtctccctctgcctggcggcagtcacggccaagagagtattatgagggaggccgaggacttcatgctccggacagagaaacggcgctgggattagggattgccacttctgagaggatgctgggaatctgcagggggagacggaaattcttggctgcctcgttgagtcttctctgcatcccagccatcacctggatttacctgttttctgggagcttcgaagatggaaagcccgtgtctctgtcaccgctggagtcccaggcacacagccccaggtacacggcctccagccagcgggagcgcgagagcctggaggtgcgcatgcgcgaggtggaggaggagaaccgcgccctccgcaggcagctcagcctggcccagggccgagccccatcccatcgccgaggcaaccactccaagacctactccatggaggagggcactggagacagcgagaaccttcgggctggcatcgtggcaggcaacagctccgagtgtgggcagcagccggtcgtggagaaatgcgagacggaaccctctgcacttccaccttattgctgactccattgcggagcagatcctggccacgctcttccagacctggatggtgcccgctgtgcgtgtggacttctacaatgcagacgagctcaagtctgaagtttcctggatccccaataaacattactctgggatttatggtctgatgaagcttgtcctgaccaagactcttcctgccaacctggagagagtcatcgtccttgacacggatatcacctttgccactgacattgcagagctgtgggctgtgttccacaagttcaaaggtcagcaagtcctgggcttggtggagaaccagagtgactggtaccttggaaacctgtggaaaaatcaccgcccatggccagcccttggaagaggctacaacacaggggtgatcctgttacttctggataagctgcggaagatgaaatgggagcagatgtggaggctgaccgcagagagggagctcatgggcatgctctctacatccttagctgaccaggatattttcaatgccgtcatcaaacaaaaccccttccttgtgtaccagctcccctgcttctggaatgtgcagctgtcagaccacacccgctccgagcagtgctacagagacgtgtctgatctaaaggtcattcactggaactcccccaagaagctccgggtgaagaacaagcatgtggagttttttcgcaacctctacctgaccttcctggagtatgacggcaatcttctgaggcgggaactgtttggctgccccagtgaggctgatgtcaacagtgaaaacctccagaagcagctgtctgagctggacgaggacgacctgtgctatgagttccggcgagagcgcttcactgtccaccgcacccacctgtacttcctgcactacgagtatgagcctgcagcagacagcacggacgtcaccctggtcgctcagctgtccatggacaggctccagatgctggaggccatctgcaagcactgggaggggcccatcagcctggccctctacctgtcagacgccgaggcccagcagttcctccgctacgcacagggctctgaggtgcttatgagccgccacaacgtgggctaccacatcgtgtacaaggagggccagttctaccccgtgaacctgctgcgcaacgtggccatgaagcacatcagcactccctacatgttcctgtctgacattgacttcctgcccatgtatgggctctatgagtacctcaggaagtctgtcatccagctcgatcttgccaacaccaagaaagcaatgattgtccccgcgttcgagacactgcgctaccggctgtccttccccaagtcaaaagcggagttgctgtcaatgctggacatggggaccctcttcacattcaggtaccacgtctggacgaaaggccacgcacccacaaacttcgccaagtggcggaccgccaccacgccttaccgggttgagtgggaggccgattttgagccgtatgttgttgtgagacgtgactgcccggagtacgaccggaggtttgtaggctttggctggaacaaagtggctcatatcatggagctggatgtgcaggagtatgagttcattgtgctgcccaacgcctacatgatccacatgcctcatgcccccagcttcgacattaccaagttccgttccaacaagcaataccgcatctgtctcaaaaccctcaaggaagagtttcagcaggacatgtcccgccgctacggctttgctgccctgaaatatctcacagccgagaacaacagctagcaccaagaagcccaccactagggggagacatgctgtaggggaagtgccactcgctgtttggggcccggccttcaaattcaaaattgagccatgctttttcggtttgtttttatttatctctttggcccagccaagctgccctcactacagagaccttggacaaggatccagccagtccctctctgccccacaaccctgcattcccagaggttagctatgcagcccacctagatgagtctcttcaagaatgggaaatcaaggggtgacagggagtaaaagggttatcatcttactgcaaagccacaagatcagggcagggctttaggatgttctggatgctttttaataattatgcttcccatcataactggggagaaagggaagtcagggttctaggggttattcgtcccaggaaatagaagtgaaattgtctttattaagtgaaaactttcccctttgccctgcaatgtagctgggcattcaaacggagggcaaaccgatgatctaaaccaaccacttggaaaaacccaatggggacattgtaaccagagggtcctggaggtggggttgatgggtttccttatccccaaagtcactcctgttttgttttgtttttctttgggggttttgtttatttttggggctggcaatccaaaatagaaaatctgatcctttgaggctctaaaggaaaatcagctgcctctaccaaccaccctctatcagcagtggcccaggaaggaggtcaagcatcttcggccgatatttaaacatgggcagcttccttcaggatgatcaccgaggctcccgtgactttgaactccctactctccagaatccaggggctatagcgatggggactgcggaattacgagggctggctgttttacaccggtcacattttctattggcagtgactgattcatgggaaagggctttgaaggaactacttcagtgcacacacaaggtacgaacctctcaggcctttcgaagaactttcataattcatgaaagcccagttctgaagattcacgtatccatctggagacctacaggaagaagtgattgggttcctctggttcttgcctgcttcactgtggatgggaagaggtgacaacctcagtctccctttgggacctgtccaagggtaggcaaccaccttcaccttcacacagattgaggagacactggactttttacccattttctttaatcttcaatattaatattgtgtttacattgatgagaacaagagttaatgccctaccctctgctgggctgtttgtattgagttgcaatgtgaccagcgaaagctgcatttaataaatgaaagtacagactgtt

SEQ ID NO: 5471 - DNA, 2082 bp, Homo sapiens
  SIMILAR (3)..(305): 1001254mologous to Homo sapiens acetylglucosaminyltransferase -like protein,accession number AJ007583,Smith-Waterman Score=514.
atggaaagcccgtgtctctgtcaccgctggagtcccaggcacacagccccaggtacacggcctccagccagcgggagcgcgagagcctggaggtgcgcatgcgcgaggtggaggaggagaaccgcgccctccgcaggcagctcagcctggcccagggccgagccccatcccatcgccgaggcaaccactccaagacctactccatggaggagggcactggagacagcgagaaccttcgggctggcatcgtggcaggcaacagctccgagtgtgggcagcagccggtcgtggagaaatgcgagacggaaccctctgcacttccaccttattgctgactccattgcggagcagatcctggccacgctcttccagacctggatggtgcccgctgtgcgtgtggacttctacaatgcagacgagctcaagtctgaagtttcctggatccccaataaacattactctgggatttatggtctgatgaagcttgtcctgaccaagactcttcctgccaacctggagagagtcatcgtccttgacacggatatcacctttgccactgacattgcagagctgtgggctgtgttccacaagttcaaaggtcagcaagtcctgggcttggtggagaaccagagtgactggtaccttggaaacctgtggaaaaatcaccgcccatggccagcccttggaagaggctacaacacaggggtgatcctgttacttctggataagctgcggaagatgaaatgggagcagatgtggaggctgaccgcagagagggagctcatgggcatgctctctacatccttagctgaccaggatattttcaatgccgtcatcaaacaaaaccccttccttgtgtaccagctcccctgcttctggaatgtgcagctgtcagaccacacccgctccgagcagtgctacagagacgtgtctgatctaaaggtcattcactggaactcccccaagaagctccgggtgaagaacaagcatgtggagttttttcgcaacctctacctgaccttcctggagtatgacggcaatcttctgaggcgggaactgtttggctgccccagtgaggctgatgtcaacagtgaaaacctccagaagcagctgtctgagctggacgaggacgacctgtgctatgagttccggcgagagcgcttcactgtccaccgcacccacctgtacttcctgcactacgagtatgagcctgcagcagacagcacggacgtcaccctggtcgctcagctgtccatggacaggctccagatgctggaggccatctgcaagcactgggaggggcccatcagcctggccctctacctgtcagacgccgaggcccagcagttcctccgctacgcacagggctctgaggtgcttatgagccgccacaacgtgggctaccacatcgtgtacaaggagggccagttctaccccgtgaacctgctgcgcaacgtggccatgaagcacatcagcactccctacatgttcctgtctgacattgacttcctgcccatgtatgggctctatgagtacctcaggaagtctgtcatccagctcgatcttgccaacaccaagaaagcaatgattgtccccgcgttcgagacactgcgctaccggctgtccttccccaagtcaaaagcggagttgctgtcaatgctggacatggggaccctcttcacattcaggtaccacgtctggacgaaaggccacgcacccacaaacttcgccaagtggcggaccgccaccacgccttaccgggttgagtgggaggccgattttgagccgtatgttgttgtgagacgtgactgcccggagtacgaccggaggtttgtaggctttggctggaacaaagtggctcatatcatggagctggatgtgcaggagtatgagttcattgtgctgcccaacgcctacatgatccacatgcctcatgcccccagcttcgacattaccaagttccgttccaacaagcaataccgcatctgtctcaaaaccctcaaggaagagtttcagcaggacatgtcccgccgctacggctttgctgccctgaaatatctcacagccgagaacaacagctag

SEQ ID NO: 5472 - DNA, 4326 bp, Homo sapiens
  SIMILAR (490)..(2757): 971254mologous to Mus musculus acetylglucosaminyltransferase- like protein,accession number AJ006278,Smith-Waterman Score=3933.
cggccccggcggtcgctccctggacccaacccgaggctgacccaggcccctgcccatgcggggcgcccctggctcggaagagtcccccgggccgggagcagctccaggcagcggccccggaggaagaggaagaagggacagtgctcagcttgggggacccggaccctcgccgcggcatttggagccgggggcagtcccgaactctgtgcttggcaccgccgctccgagtagggcagcgcctgccgggactctgacccggaccccctgcgcctcgtaggcggcggcgccgccgcgccaccctgttcttccgtgtctccctctgcctggcggcagtcacggccaagaacctacattaagaaacgcattcagatgcatcagccgtttgtaaagcacctgtcgtgagccagagagtattatgagggaggccgaggacttcatgctccggacagagaaacggcgctgggattagggattgccacttctgagaggatgctgggaatctgcagggggagacggaaattcttggctgcctcgttgagtcttctctgcatcccagccatcacctggatttacctgttttctgggagcttcgaagatggaaagcccgtgtctctgtcaccgctggagtcccaggcacacagccccaggtacacggcctccagccagcgggagcgcgagagcctggaggtgcgcatgcgcgaggtggaggaggagaaccgcgccctccgcaggcagctcagcctggcccagggccgagccccatcccatcgccgaggcaaccactccaagacctactccatggaggagggcactggagacagcgagaaccttcgggctggcatcgtggcaggcaacagctccgagtgtgggcagcagccggtcgtggagaaatgcgagacaatccacgttgctattgtctgcgctggatacaatgccagccgggatgtcgtcaccctggtcaaatccgtcctgttccatagacggaaccctctgcacttccaccttattgctgactccattgcggagcagatcctggccacgctcttccagacctggatggtgcccgctgtgcgtgtggacttctacaatgcagacgagctcaagtctgaagtttcctggatccccaataaacattactctgggatttatggtctgatgaagcttgtcctgaccaagactcttcctgccaacctggagagagtcatcgtccttgacacggatatcacctttgccactgacattgcagagctgtgggctgtgttccacaagttcaaaggtcagcaagtcctgggcttggtggagaaccagagtgactggtaccttggaaacctgtggaaaaatcaccgcccatggccagcccttggaagaggctacaacacaggggtgatcctgttacttctggataagctgcggaagatgaaatgggagcagatgtggaggctgaccgcagagagggagctcatgggcatgctctctacatccttagctgaccaggatattttcaatgccgtcatcaaacaaaaccccttccttgtgtaccagctcccctgcttctggaatgtgcagctgtcagaccacacccgctccgagcagtgctacagagacgtgtctgatctaaaggtcattcactggaactcccccaagaagctccgggtgaagaacaagcatgtggagttttttcgcaacctctacctgaccttcctggagtatgacggcaatcttctgaggcgggaactgtttggctgccccagtgaggctgatgtcaacagtgaaaacctccagaagcagctgtctgagctggacgaggacgacctgtgctatgagttccggcgagagcgcttcactgtccaccgcacccacctgtacttcctgcactacgagtatgagcctgcagcagacagcacggacgtcaccctggtcgctcagctgtccatggacaggctccagatgctggaggccatctgcaagcactgggaggggcccatcagcctggccctctacctgtcagacgccgaggcccagcagttcctccgctacgcacagggctctgaggtgcttatgagccgccacaacgtgggctaccacatcgtgtacaaggagggccagttctaccccgtgaacctgctgcgcaacgtggccatgaagcacatcagcactccctacatgttcctgtctgacattgacttcctgcccatgtatgggctctatgagtacctcaggaagtctgtcatccagctcgatcttgccaacaccaagaaagcaatgattgtccccgcgttcgagacactgcgctaccggctgtccttccccaagtcaaaagcggagttgctgtcaatgctggacatggggaccctcttcacattcaggtaccacgtctggacgaaaggccacgcacccacaaacttcgccaagtggcggaccgccaccacgccttaccgggttgagtgggaggccgattttgagccgtatgttgttgtgagacgtgactgcccggagtacgaccggaggtttgtaggctttggctggaacaaagtggctcatatcatggagctggatgtgcaggagtatgagttcattgtgctgcccaacgcctacatgatccacatgcctcatgcccccagcttcgacattaccaagttccgttccaacaagcaataccgcatctgtctcaaaaccctcaaggaagagtttcagcaggacatgtcccgccgctacggctttgctgccctgaaatatctcacagccgagaacaacagctagcaccaagaagcccaccactagggggagacatgctgtaggggaagtgccactcgctgtttggggcccggccttcaaattcaaaattgagccatgctttttcggtttgtttttatttatctctttggcccagccaagctgccctcactacagagaccttggacaaggatccagccagtccctctctgccccacaaccctgcattcccagaggttagctatgcagcccacctagatgagtctcttcaagaatgggaaatcaaggggtgacagggagtaaaagggttatcatcttactgcaaagccacaagatcagggcagggctttaggatgttctggatgctttttaataattatgcttcccatcataactggggagaaagggaagtcagggttctaggggttattcgtcccaggaaatagaagtgaaattgtctttattaagtgaaaactttcccctttgccctgcaatgtagctgggcattcaaacggagggcaaaccgatgatctaaaccaaccacttggaaaaacccaatggggacattgtaaccagagggtcctggaggtggggttgatgggtttccttatccccaaagtcactcctgttttgttttgtttttctttgggggttttgtttatttttggggctggcaatccaaaatagaaaatctgatcctttgaggctctaaaggaaaatcagctgcctctaccaaccaccctctatcagcagtggcccaggaaggaggtcaagcatcttcggccgatatttaaacatgggcagcttccttcaggatgatcaccgaggctcccgtgactttgaactccctactctccagaatccaggggctatagcgatggggactgcggaattacgagggctggctgttttacaccggtcacattttctattggcagtgactgattcatgggaaagggctttgaaggaactacttcagtgcacacacaaggtacgaacctctcaggcctttcgaagaactttcataattcatgaaagcccagttctgaagattcacgtatccatctggagacctacaggaagaaagtgattgggttcctctggttcttgcctgcttcactgtggatgggaagaggtgacaacctcagtctccctttgggacctgtccaagggtaggcaaccaccttcaccttcacacagattgaggagacactggactttttacccattttctttaatcttcaatattaatattgtgtttacattgatgagaacaagagttaatgccctaccctctgctgggctgtttgtattgagttgcaatgtgaccagcgaaagctgcatttaataaatgaaagtacagactgtttcttccccattcccctcccactcttgcaggaagctactgagacacaccttgacatagagagctaaattgcagtggataaacagcaacttcacactttctgttcccccattctatttttctcatcatttgaactttagccttttttttccccttttgcctgaagttagatcccactctgtctctaactcaaaccatcttcaagttttccattccgcatctttctc

SEQ ID NO: 5473 - DNA, 408 bp, Homo sapiens
  SIMILAR (123)..(239): 1001254mologous to Homo sapiens acetylglucosaminyltransferase -like protein,accession number AJ007583,Smith-Waterman Score=207.
acactggtgcaatgggcaggctcccaaagccttgggcaggaacactcctgtggctttgcagtgtacagcccctgcagctgctctcatgggttggagttgagtgtctgttgcttttcactccccacagacggaaccctctgcacttccaccttattgctgactccattgcggagcagatcctggccacgctcttccagacctggatggtgcccgctgtgcgtgtggacttctacaatgcagttcatccctaggatgatgaaactcaaggaaaattgtcaagcaccaaaaggaattgtatacctgcagatcaaaaggagccttccactcctaggtgttcaaccaagagaaataaaacctatgtccactggaaaacttgtatgtggatattcgtggcagctttattcatag

SEQ ID NO: 5474 - DNA, 380 bp, Homo sapiens
  SIMILAR (2)..(124): 871254mologous to Rattus norvegicus putative four repeat ion channel,accession number AF078779,Smith-Waterman Score=177.
cgaccactccaaacgttcagcaattgaggacaacaaatacatcgaccaaaaacttcgcaagtctgttttcagcatcagggcaaggaaccttctggaaaaggagaccgcagtcactaaaatcttaagcaagagtccattaccgacgagctcacccattagcatccgctgttgtctctacttgggaagatcacattgtcactctagtggagtcagaatgtataggaattttccacagccttgttctgggacattaagaaagacgacatggagacaaagaagaaaagaaccggggaccccctgctactgtgtctctaatcaacttgctggtgtttaaaggctaataaagcttcaatgatctctgtgataaaaaaaaaaaaaaa

SEQ ID NO: 5475 - DNA, 1359 bp, Homo sapiens
  SIMILAR (550)..(954): 851254mologous to Rattus norvegicus putative four repeat ion channel,accession number AF078779,Smith-Waterman Score=566.
gtgagcttgatatttctttgttggatgcctcaaaatgtacctgctgaatcgggagctcagcttctaatggtccttcggtgcctgagacctctgcgcatattcaaactggtgccccagatgaggaaagttgttcgagaacttttcagcggcttcaaggaaatttttttggtctccattcttttgctgacattaatgctcgtttttgcaagctttggagttcagctttttgctggaaaactggccaagtgcaatgatcccaacattattagaaggaacatatcacagtgtagcttaacattacatggagatgagtttcgggtgagccagagtctggctcctggaaacacacctacggaccctttggagggggttaccctttcccagcacaaagccctttgccgcaaggctcaagaggactcagatgatgtggccctaggcagtgactactgggctctccaggaacaccagataaccctgctctccagatgtgcatgtgttggaggtggcgtctgtgggacagcctatgcaagcatcagcctgggggtgatccccacgttccgcgtcaagttcctgctgcggctactgcgtgggaggctggaggtggacctggacaaggacaagctcctgtttaagcacatgtgctacgaaatggagaggctccacaatggcggcgacgtcaccttccatgatgtcctgagcatgctttcataccggtccgtggacatccggaagagcttgcagctggaggaactcctggcgagggagcagctggagtacaccatagaggaggaggtggccaagcagaccatccgcatgtggctcaagaagtgcctgaagcgcatcagagctaaaacagcagcagtcgtgcagtatcatccacagcctgagaaagagtcagcagcaaaagctggagcccggtttctgaacccgcccagcatggagaccacccagcccaagcctttacaatatggaatcatctatattatccagcacaagcaagtctgccgatttcagatgagttatattactggcaaagatgaaagaggagtaatgacaagttacatcagattttctattagaaacaaaatcacaaaaagcatttggctcttgataaagagctcatcctggaaaccacattgcatttcattgtcacatctgaagtttctcttggctgtgacaattcctctaattcttcttgttgttaatgactttgatggtttcgaggagtatcagtcaggtcttctttattttctggcaccacaaaatgtcctatcctcatcttgtgttctctttaattcagctctaaagccagccatttcttcagagtgccgacttgttttattggagaatgttatttag

SEQ ID NO: 5476 - DNA, 1113 bp, Homo sapiens
  SIMILAR (643)..(1110): 931254mologous to Rattus norvegicus putative four repeat ion channel,accession number AF078779,Smith-Waterman Score=758.
atggagcaaagagcttgcacccgacagcgcatgctgagcggatcatttgaggggcagcccgcaaaggagaggtcaatcctcagcgtgcagcatcatatccgccaagagcgcaggtcactaagacatggatcaaacagccagaggatcagcaggggaaaatctcttgaaactttgactcaagatcattccaatacagtgagatatagaaatgcacaaagagaagacagtgaaataaagatgattcaggaaaaaaaggagcaagcagagatgaaaaggaaagtgcaagaagaggaactcagagagaaccacccatacttcgataagccactgttcattgtcgggcgagaacacaggttcagaaacttttgccgggtggtggtccgagcacgcttcaacgctgatttgctgggattggtcacttacctggactgggtcatgatcatcgtaaccatctgctcttgcatttccatgatgtttgagtccccgtttcgaagagtcatgcatgcacctactttgcagattgctgagtatgtgtttgtgatattcatgagcattgagcttaatctgaagattatggcagatggcttatttttcactccaactgctgtcatcagggacttcggtggagtaatggacatatttatatatcttaaacagcagcagtcgtgcagtatcatccacagcctgagagagagtcagcagcaagagctgagccggtttctgaacccgcccagcatcgagaccacccagcccagtgaggacacgaatgccaacagtcaggacaacagcatgcaacctgagacaagcagccagcagcagctcctgagccccacgctgtcggatcgaggaggaagtcggcaagatgcagccgacgcagggaaaccccagaggaaatttgggcagtggcgtctgccctcagccccaaaaccaataagccattcagtgtcctcagtcaacttacggtttggaggaaggacaaccatgaaatctgtcgtgtgcaaaatgaaccccatgactgacgcggcttcctgcggttctgaagttaagaagtggtggacccggcagctgactgtggagagcgacgaaagtggggatgaccttctggatatttag

SEQ ID NO: 5477 - DNA, 2529 bp, Homo sapiens
  SIMILAR (1042)..(1566): 991254mologous to Rattus norvegicus putative four repeat ion channel,accession number AF078779,Smith-Waterman Score=883.
ggggtgatccccacgttccgcgtcaagttcctgctgcggctactgcgtgggaggctggaggtggacctggacaaggacaagctcctgtttaagcacatgtgctacgaaatggagaggctccacaatggcggcgacgtcaccttccatgatgtcctgagcatgctttcataccggtccgtggacatccggaagagcttgcagctggaggaactcctggcgagggagcagctggagtacaccatagaggaggaggtggccaagcagaccatccgcatgtggctcaagaagtgcctgaagcgcatcagagctgcatttatgtccatgttccagatcctcacccaggaaggatgggtggacgtaatggaccaaactctaaatgctgtgggacatatgtgggcacccgtggttgccatctatttcattctctatcatctttttgccactctggtactaacctacgtcctggccaaagtgggaaagagcttaattcatgtcctcttaggggctacaaataattggaaattagcaataacgaacacagacaggctaaccaacaaacaaataaaaccagtggttccaaggcctaaagatgcaaatggaaagccctgtgatgtgaatactgaaaagaaagaaaatgtaattaagcgttcattagcttgcacccgacagcgcatgctgagcggatcatttgaggggcagcccgcaaaggagaggtcaatcctcagcgtgcagcatcatatccgccaagagcgcaggtcactaagacatggatcaaacagccagaggatcagcaggggaaaatctcttgaaactttgactcaagatcattccaatacagtgagatatagaaatgcacaaagagaagacagtgaaataaagatgattcaggaaaaaaaggagcaagcagagatgaaaaggaaagtgcaagaagaggaactcagagagaaccacccatacttcgataagccactgttcattgtcgggcgagaacacaggttcagaaacttttgccgggtggtggtccgagcacgcttcaacgctgatttgctgggattggtcacttacctggactgggtcatgatcatcgtaaccatctgctcttgcatttccatgatgtttgagtccccgtttcgaagagtcatgcatgcacctactttgcagattgctgagtatgtgtttgtgatattcatgagcattgagcttaatctgaagattatggcagatggcttatttttcactccaactgctgtcatcagggacttcggtggagtaatggacatatttatatatcttgtgagcttgatatttctttgttggatgcctcaaaatgtacctgctgaatcgggagctcagcttctaatggtccttcggtgcctgagacctctgcgcatattcaaactggtgccccagatgaggaaagttgttcgagaacttttcagcggcttcaaggaaatttttttggtctccattcttttgctgacattaatgctcgtttttgcaagctttggagttcagctttttgctggaaaactggccaagtgcaatgatcccaacattattagaaggcttcgcaagtctgttttcagcatcagggcaaggaaccttctggaaaaggagaccgcagtcactaaaatcttaagaattattgtttttagtcttatccaagaggttcctcgccagggagcaagaggccattaccgacgagctcacccattagcatccgctgttgtctctacttgggaagatcacattgtcactctagtggagtcagagtggggggctactataaggatacctgaaaatgtggaagcgactttggaactgggtaacaggcagaggttggaacaatttggaggactcagaagaagacaggaagatatgggaaagtttggaacttcctacttgttggatagctttgaccaaaatactgatagtgatatggacagtgaagtccaggctgagctttgggacatggtgccctgccttccagcagcttctgctccagccatggctaaaaggtgccaatatacagctcaggctgatgcttcaaagagtgcaagccccacgacttggtggcttacacatggttttgggcctgtgggtgaacagaagtcaagaactgaggtttgggaacctctgcctagatttcacaggatgtatagaaacaactggatgtccaggcagaagtttgctgtgggggtagagccctcatggagaacctctgctggggcagtgcggaaggaaaatgtgtggttggagtccacacacagagtccccactggagcactgcctagtggagctgtgagaagagggccaccatcctccagactccagaatggtagatccactgacagcttgcactgtgtgcctggaaaagccacagacactcaataccagtccaggagggggtctgtaccctgcaaagccacaatggtggagctgcccaaggccatgggagcccacctcttgcatcagtgtgccctggatatatataagacagagtcaaaggagattattttggaactttaa

SEQ ID NO: 5478 - DNA, 555 bp, Homo sapiens
  SIMILAR (318)..(548): 741254mologous to Mus musculus Pro-Pol-dUTPase polyprotein,accession number Y12713,Smith-Waterman Score=305.
caccgatgagtcccttccctgaggactgtgggaaactggaggtggagcgaggtggagatcaagtcccactgggcaactggagctcagaaactgtgggacggggcctcttccacccaccctgtggaccacagaagcaaaggacttctagcttcagagaaagcagcatgaagcggaaggaatctagacctaaaaccacactaaagcacagacttattcagagagaccttgatcacttttcacttctgcaagatatcacactggtctattacacggatgacattatgctgattgcatccggtgagcaggaagtagcaaacacgctggactcccaggctgcactgatggcctcatggggagttccctatgatcacttgaaagaggaagagaagaccagggcctggttcacagatggttctgcacaatatgcaggcaccacccaaaagtgggcagctgcaacactacagccccttgctaggacatccctgaaggacagcggggaagggaaatcttcccagtgggcagaacttcaagcagtgcacctggttgtccaccttg

SEQ ID NO: 5479 - DNA, 1713 bp, Homo sapiens
  SIMILAR (1057)..(1710): 781254mologous to Mus musculus Pro-Pol-dUTPase polyprotein,accession number Y12713,Smith-Waterman Score=933.
atgtcgcaggggacgactccctgggggccgaccccggcgggaaccacgcccgaatcggaggtacaccgcccctttcccttcccggtaccggtgccggtaccagagacctccgagcgctcattcccagtccgcggagtctgcggccaagccaaatccggtctccgaagaggcgccgcacgtctggccccggctgcttatctcttcacccggcagcagacaagggagttaatacacagcgcgtgtgtgtccatttccgttaacacaatgcacgggctatcagtcgctattaattccaggaggtgtacctattatagaaaatatgttattgatttttccaaatctgagatcattggaataccaatatccaagaatatagatctaacagtgggaaccacagtcactcaactacaaaatttaaatacagtgggaataattggatcccgaggtggcagaggccaagtggcagcactcaactgtgacaggcaaggacacctctggctttttaccagggtaactgtgcactggagaatgggaaatgatcggacattttggggactactggacactgtctctgagctgatgtttattccagggaacccaaaacatcattgtggccctccagttaaagtaggggcttatggagtaacatttctaggggtccactggtgtggggcctgtcaagatactccttgtaagatgaaggataagttgctgcatttggcccctcctacaactaagaaaaaggcacaatatgtagtgggcctacttggattttggaggcccatttatcgagtgactcaaaaggctgccagttttgagtggggtccagaacaggataaggctctgcctcaggtccaggctgctgtccaacctgctctgctgtttgggccatatgactcagcagatccaatggtgcttgaggcatcagtggcagatagggatgctgtttggagcctttggcaggcccccacagccataaaatgggtcatgcacagcagcattccatcatcaaatggaagtgatatatatgtgattgggctcgagcaggtcctaaaggcacaacctgcaccgatggcctcatggggagttctctatgatcagttgacagaggaagagaagactagggcctggttcacagatggttctgcacgatatgcaggcaccacccaaaagtggacagctgcagcactacagcccctttctaggacatcactgaagggcagtggtgaagggaaatcttcccagtgggcagaacttcaagcagtgcacctggttgtgcacttttcatggaaggataaatggccagatgtgcgattatatattgattcatgggctgtagccaatggtttggctggatggtcagggacttggaagaagcatgattggaaaattggtgacaaagaaatttggggaagaggtatgtggatggacctctctgagtggccaaaacctgtgaagatatttggatcccatgtgagtgctcaccaatgggtgatctcagcagaggaggattttaataatcaagtggataagatgacctgttctgtggacatcactcagcctctttccccagccacccctgttatcacccaatgggcccataaacaaagtggccatggtggcagggatggaggttatacatgggctcagcaacatggacttccactcaccaaaactggcctggctatggctacagctgagtgcccaatttga

SEQ ID NO: 5480 - DNA, 441 bp, Homo sapiens
  SIMILAR (7)..(138): 1001254mologous to unidentified T-RECE,accession number A95097,Smith-Waterman Score=230.
atgggtttctacagtgacggttatgaagcacagtttggagtgcagccaactttcgtttttctggttgccagcacaactattgaatgcggacgttatccggttgaaattttcatgatgggcgaagaagcaaaactggcagtgatgccacaacttatggaggagacagaacagttcatgcctaattccatcatgattgtcaggagggccattgaaaatgatttggtggtggctggtggtggggctattgagataaagctctccaagttaataaaaacaatttatatgcagggtagtgaacaagagaaaagttatggaaaacatttctcaaccaaggacagtgtaccagatgtgctaagacttatgggagcaatcagaggtgaccaactctctgtggcgggccttattaagttagactgtgaaccagaaccttcaacttattaa

SEQ ID NO: 5481 - DNA, 615 bp, Homo sapiens
  SIMILAR (7)..(180): 691254mologous to Homo sapiens chaperonin containing t- complex polypeptide 1, eta subunit; CCT-eta,accession number AF026292,Smith-Waterman Score=207.
atggggaattaccaggcaattgttgatgctgagtggaacattctctatgacaagttagcaaggatccatcattctggagccaaagttgtcttgtccaaactctccaatggggatgtggtcactcagtactttgctgacaggggcaggacaacacatgcacctttatcctccacagtgatgccacaacttatggaggagacagaacagttcatgcctaattccatcatgattgtcaggagggccattgaaaatgatttggtggtggctggtggccatcagtggtcacaacacaattttttccaccagtatgttgaccaggttcacaagggtgtcacacacggtcaatgtcacacagggtcacacccaacaagtccaggagtggcaatcacagtttcacacgcccacacagacaggccacagagcagatcaccaagcagggatcaaggcaggactccagttatacaggacgactcacccccacaaggacacagacaggcgccaccgcccagtttaaccacagaaaaccgctatcatcaaggagtagctatgaacaaaggtgcggacagctttacgcccacacgaacgagggagtatcacagaaaagacgacatctag

SEQ ID NO: 5482 - DNA, 736 bp, Homo sapiens
  SIMILAR (366)..(446): 1001254mologous to Homo sapiens chaperonin containing t- complex polypeptide 1, eta subunit; CCT-eta,accession number AF026292,Smith-Waterman Score=137.
ggaaaagtgtgccatgaccgctctgagctccaagctgatctcccagcagaaagctttctttgctaagatggtggtggatgcagtgatgatgctcgatgatttgctgcagcttaaaatgattggaatcaagaaggtacagggtggagccctcgaggattctcagctggtagctggtgttgcattcaagaagactttctcttacgctgggtttgaaatgcaacccaaaaagtaccacaatcccaagattgcccttttgaatgtcgagctcgagttgaaagctgagaaagacaatgctgagataagagtccacacagttgaggattatcaggcaattgttgatgctgagtggaacattctctatgatcaagttagagaagatccatcattctggagccaaagttgtcttgtccaaactccccattggggatgtggccacccagtactttggctgacagggacatgttctgtgctggccgagtacctgaggaggatctgaagaggacaatgatggcctgtggaggctcaatccagaccagtgtgaatgctctgtcagcagatgtgctgggtcgatgccaggtgtttgaagagacccagattggaggcgagaggtacaatttttttactggctgccccaaggccaagacatgcaccttcattctccgtggcggcgccgagcagtttatggaggagacagagcggtccctgcatgatgccatcatgatcgtcaggagggccc

SEQ ID NO: 5483 - DNA, 474 bp, Homo sapiens
  SIMILAR (204)..(350): 411254mologous to Onchocerca volvulus pyrrolidone-rich antigen,accession number AF055985,Smith-Waterman Score=68.
ggaatagtacaacaattatgagccgtcacagcctggtaagtatagaagaagaaggcctggatatggtgaacagagaaactgcacatgaaagggaaatgcaaacggcaatgcagataagccaatcatgggatgagagcttgagcctgagtgacagtgattttgacaagccggagaaattatattctcctaagagaattgacttcactccagtttctccagcaccttcacccaccaggggattcggaaagatgttcgtgagcagcagtggattgccaccaagtccagttcccagtccaagacgattttcaagcaggagaagtcagagtccagtcaagtgcattagacccagtgttcttggtcctcttaaaagaaaaggtgaaatggagacagaaagtcagcccaagagactcttccaaggcactaccaatatgttatctccagatgccgcgcaactgtctgatctcagttcatggt

SEQ ID NO: 5484 - DNA, 970 bp, Homo sapiens
  SIMILAR (121)..(11): 451254mologous to Arabidopsis thaliana glycine-rich protein,accession number AL161577,Smith-Waterman Score=68.
gaagaactggcccagcggaggttcccgcttctgaagcgtgggaggcggaagagactgcagcccccgcccccgtccccaagcctccgccccttagcccccgcccccagctgccagtccccagcagctcagtcctgcagtgagagtcttgggagtccatagctaagcaccaggagctgagcactgcccgctgtgcctgcctgcaagtctgacatggctcaggagaaaatggagctggaccttgagcctgacacatcttatgggggaaccctgaggagatccagcagcgctcccctaatccatgggctcagtgacctttcacaggttttccaaccttacacacttataactcggaggaatagtacaacaattatgagccgtcacagcctggaagaaggcctggatatggtggaacagagaaactgcacatgaaagggaaatgcaaacggcaatgcagataagccaatcatgggatgagagcttgagcctgagtgacagtgattttgacaagccggagaaattatattctcctaagagaattgacttcactccagtttctccagcaccttcacccaccaggggattcggaaagatgttccgtgagcagcagtggattgccaccaagtccagttcccagtccaagaccgattttcaagcaggagaagtcagagtccaagtcaagtgcattaagacccaagtgttcttgggtcctcttaaaaagaaaaaggtgaaatggagaccagaaagtcagccccaagagactctttccaaaggcactaccaatatgttatctccagatgccgcgcaactgtctgatctcagttcatgttcagatattttggatggcagtagtagcagcagtggcttatcctcagacccgctggctaaaggcagcgctaccgcagagtctccagtagcatgctccaattcatgctcttcgttcatcttgatggatgatctctcacccaagtga

SEQ ID NO: 5485 - DNA, 568 bp, Homo sapiens
  SIMILAR (34)..(231): 801254mologous to Homo sapiens putative p150,accession number U93570,Smith-Waterman Score=294.
atgcctcagcaagtacaaaatcatggaaatcgtaacagtctctcagaccacagtgcaatcaaattagaactcaggattaagaaactcactcaaaaccacacaattacatggaaactgaacaatctgctcctgaatgactactggataaataacgaaattaaggtggaaataaataagttctttgataccaataagaacaaagacacaacgtaccagaatctctgggacacaggatttccaatttccaagcctgatgggctctcccagctggaacaggatctacaggtctttgatctggaaactaagactagagaagtcttaagagatgacttctcagagtttaggcaaataacaatcagcaaagaagccttcaccagtgagaagaacaatgaatgtaataaacctgaaaaaagcttcagtctggactctactattgatgcagatcagaaagttcttagaatacagaacactgatgataatgataagaacgacatgagcttcagccagaattcagcctctggtaaacatgaacacataaatctaacacaggattttcagagtagtatat

SEQ ID NO: 5486 - DNA, 2139 bp, Homo sapiens
  SIMILAR (517)..(2130): 391254mologous to Homo sapiens b34I8.1 (Kruppel related Zinc Finger protein 184),accession number AL021918,Smith-Waterman Score= 960.
atggagggcagtgggaccggaaaaagacgtggaaaagctgcgaaaacgagccttcgaatcatggacgcgcgggcccagctcctcctccgagttcctcatccggggccgtcactcacatccggggccctcactcacatccgggaccctcatccggggctctcacccacatccgggaccctcatgcctgggcggaggagggggggccctcattcgggaccctgcactccgtcgccggaagtgccaccgagaagcgccggcctcggggctgtctacagcggcccgggagaggctgtggtggccccgagcgcgagtgtagcagtgatggaggaaataccagcccaggaagcagcagggtcaccaagggtccagtttcagtctttggagacccagtctgagtgtctgtccccagagcctcagtttgtgcaggacaccgacatggaacagggactcactggggctccacctgttcctcaggtgcctgctcttccccgtgagggaagcccaggagaccaggcagctgcgctcttgacagccaggtaccagagcagccaggatgtgttatttcaggagtttgtgacattcgaggatgtggctgtgcaccttactcgagaggaatggggatacctggaccctgttcagagggacctctacagagaagtgatgttagagaattatgggaacgtggtctcactgggatttccaatttccaagcctgatgggatctcccagctggaacaggatctacaggtctttgatctggaaactaagactagagaagtcttaagagatgactgctcagatggagagaccagagaagagaacaagctgttgattcctaagcagaaaatttcggaagaagtgcattcatacaaagtgagagtaggaagactcaaacacgatattacccaagttcctgagactagagaagtgtataagtctgaggacagattagaaagacttcaggaaattctaaggaaatttctgtacctggagagagagtttaggcaaataacaatcagcaaggaaaccttcaccagtgagaagaacaatgaatgtcatgaacccgaaaaaagcttcagtctggactctactattgatgcagatcagagagttcttagaatacagaataccgatgacaatgataagtatgacatgagcttcaaccagaattcagcctctggtaaacatgaacacttaaatctaacagaggattttcagagtagtgaatgtaaggaaagcttaatggatctctcccaccttaataaatgggagagcatccctaacactgagaaatcctataaatgtgatgtatgtgggaaaattttccatcagagctcagcccttactagacatcagagaatccatactagagagaagccctacaaatgtaaagaatgtgaaaagtctttcagtcagagctcaagtcttagtcgacataaaagaatacacactagagaaaaaccttacaaatgtgaagcatctgataaatcctgtgaagcgtctgataaatcctgtagtccaagctcaggcataattcagcataagaaaattcacaccagagccaaatcttacaaatgtagcagttgtgaaagagtcttcagtcgtagtgtccaccttactcaacatcagaaaattcacaaagagatgccctgtaagtgtactgtatgtggcagtgacttctgccatacttcatacctacttgaacatcagagggtccatcatgaagagaaagcctatgagtatgatgaatatgggttggcctatattaaacaacaaggaattcatttcagagaaaagccctatacgtgtagtgaatgtggaaaagacttcagattgaattcacatcttattcagcatcaaagaattcacacaggagagaaagcacatgaatgtaatgaatgtggaaaagctttcagtcaaacctcatgccttattcagcatcacaaaatgcataggaaagagaaatcgtatgaatgtaatgagtatgagggcagtttcagtcatagctcagatcttatcctgcaacaagaagtcctcaccagacagaaagcctttgattgtgatgtatgggaaaagaactccagtcagagagcacatctagttcaacatcagagcattcataccaaagagaactcatga

SEQ ID NO: 5487 - DNA, 243 bp, Homo sapiens
  SIMILAR (115)..(225): 811254mologous to Homo sapiens AF-17 protein, N-terminal region with similarity to peregrin,accession number R66461,Smith- Waterman Score=161.
atggcgggaacccaggaggcggagcttgcggtgaggcaggcgactaatcagattgtgatgaattgtgctgatattgatattattacagcttcatatgcaccagaaggagatgaaggttgggcccatgagatgtgtgctctgtatattccggaggtacaatttgccagtgtttccacaatggaaccaattgttttacagtctgttccacatgatcattgtaataaggtatcaagagtctggtaa

SEQ ID NO: 5488 - DNA, 1036 bp, Homo sapiens
  SIMILAR (494)..(1030): 731254mologous to Homo sapiens NAG13,accession number AF194537,Smith-Waterman Score=638.
gcttttcttctcaacattccactttatattatagtccttcctcttttctttcacatatacttgctttagtgcttttatccagctgtcctcagaatgtttggtcctgggttggggggtgcaggcatcatgtaataattttctgtaccacgttgcacccacctggttagctggcaaagggtgagcgcaagggaaaaaagactggctaagtgattatatggaggatctctaatatcccttcctcttttgaccacctgataatgtggagatcattgataacaacatgagatgtgtgactcttacttgttccagctgctccagcaaagctcagtgggcaccagaaacagagctggctgtaaccacctccaggccatcactaactctatggcccaatgcaggagcactatggaacaaatcaggtatcttgatttttctgtcctcaagacactggttcttcaaggtcctaggggataaagtagcagaatctgaaggccccaacatcatcctgaaaccaaaacttggcaaagacacaccagaaaaagaaaatttcaggcccgtatccctgatgaatatcgatgcgaaaatcctcaataaaatactggcaaaccgaatccagcagcacatcaaaaagcttatccaccacgatctagtcagcttaatccctcggatgcaaagcttgttcaacatatgcaaatcaataaatgtattccatcacataaacagaactaatgacaaaaaccacatgattatctcaatagatgcaaaaaaggccttcagcaaaattcaacacctcttcatggtaaaaactctcaatgaattatgtattcatggaacttatctcaacatactaagagctatttatgacaaacgcacagccaatatactgaatgggaaaaaacttgaaacattccttttgaaaatctgcacaaaacaagaataccctctctcatcactcctattcaatatagtattggaagttctggccagggcaatcagtcaagagaaagaaacaaagcgtaatcaaataggaagatcctaa

SEQ ID NO: 5489 - DNA, 1605 bp, Homo sapiens
  SIMILAR (1)..(732): 921254mologous to Homo sapiens putative p150,accession number U93563,Smith-Waterman Score=1175.
atgaagaaactcactcaaaaccgctcaactacatggaaactgaacaacctgctcctgaatgactactgggtacataacaaaatgaaggcagaaataaagatgctctttgaaaccaacaaaaacaaagacacaacataccagaatctctgggacacatttaaagcagtgtgtagagggaaatttatagtactaaatgcccacaagagaaagcaggaaagatctaaaattgacaccctaacatcacaattaaaagaactagagaagcaagagcaaacacattcaaaagctagcagaaggcaagaaataactaagatcagagcagaactggaggaggtagagacacaaaaaacccttcaaaaaatcaatgaatccaggagctggttttttgaaaagatcaacaaaattgatagaccgctagcaagactaataaagaagaaaagagagaagaatcaaatagatgcaataaaaaatgataaaggggatatcaccaccgatcccacagaaatacaaactaccatcagagaatactataaacacctctacgcaaataaactagaaaatctagaagaaatggataaattcctcgacacatacaccctcccaagactaaaccaggaagaagttgaatctctgaatagaccaataacagactctgaaattgaggcaataattaatagcttaccaaccaaaaaaagtccaggactagacggattcacagccgaattgtaccagagcaaggtaactgagtcgttcaccaagaggtttggtccaggtcatcaggaacacctttcagttgtagctaacatcctgccttcaccctttcctacagtgaatggaggcattgagaacacattagagaaggaggtgatgcagtatgactactattcttcatattttgatatatttcttctggcagtttttcgatttaaagtgttaatacttgcatatgctgtgtgcagactgcgccattggtgggcaatagcggtgagtatgccctgcatgagtgggtcatctcctccagtgctggtggccaagtcctgctctcaacaggcctgggctgggagaagatacagttctaatgcagttgacaacggcagtgaccagtgcctttttactagcaaaagtgatcctttcgaaggtatggcctaccactttttctatacagttaccatcttcagtgatgaagcctcgtttttcagtcttttctctcaaggggcttttggctatgtgctgcccatcatttcattcatccttgcctggattgagacgtggttcctggatttcaaagtgttacctcaagaagcagaagaagaaaacagactcctgatagttcaggatgcttcagagagggcagcacttatacctggtggtctttctgatggtcagttttattcccctcctgaatccgaagcagggcagctctcacgggggtatcgtgaggatcaggaaacacagtgtctgcgaaacactctacagctgagctcacacgcagaaagccgttcttctaagcagacagcaggtgatgatggcaaaatagaccacactcttgaggagcaggaggaggtacgtgtaatatgcagaggtgtttgtgagctgcagcagtag

SEQ ID NO: 5490 - DNA, 340 bp, Homo sapiens
  SIMILAR (9)..(338): 361254mologous to Homo sapiens Human glial fibrillary acidic protein GFAP mutant fragment 43,accession number Y21034,Smith- Waterman Score=96.
ttatgtttcaaagttggcgccctcggacctgccgtagtggcagagggcacagcccatgcaaaggccctgagagaggacctcgcctggggtgttggagaaacaggaggaggccagtgtgactactctcgaagcagagtccgtacgtccaaccgtcgggggtccgtccagccgcctccgtgggccggggccgttgccgcggcggtgggagcagcgccggagccggggccggggccggggcggggcgggcagcgcggccccgccctccactcgcctcgcccctcggcaggccacgccctccactcgccccgcccgcgcggaagggaccggagagttgccaggc

SEQ ID NO: 5491 - DNA, 753 bp, Homo sapiens
  SIMILAR (2)..(352): 721254mologous to Homo sapiens nucleophosmin,accession number M23613,Smith-Waterman Score=414.
tgatgaagatgatgacgatgatgatgaagaggatgatgatgaagatgatgatgatgatgattttgatgatgaggaagctgaagaaaaagcgccagtgaagaaatctatacgagatactccagcccaaaaatgcacaaaagtcaaatcagaatggaagagactcaaaacctatcatcaacaccaagatcaaaaggacaagaatccttcaaaaaacaggaaaaaactcctaaaacacctaaaaggacctagttctgtagaagacattaaagcaaaaatgcaagcaagtatagaaaaaggtggttctcttcccaaagtggaagccaaattcatcaattatgtgaaggattgctttccggatgactgaccaagaggctatttcaagatctctggcagtggagaaagtctctttaagaaaatagtttaaacaaattgtttaaaaaatttcccgtcttatttcatttctgtaacagttgatatctggctgtcctttttataatgcagagtgagaactttccctaccgtgtttgataaatgttgtccaggttctattgcccaagaatgaaattgtccaaaatgcctgtttagtttttaaagatggaactccaccctttgcttggttttaagtatgtatggaatgttatgataggacatagtagtagcggtggtcagacatgggaaatggtggggagacaaaaatatacatgtgaaataaaactcagtattttaataaagtaaaaaaaaaaaaaaaagggc

SEQ ID NO: 5492 - DNA, 1301 bp, Homo sapiens
  SIMILAR (512)..(556): 661254mologous to Homo sapiens nucleophosmin,accession number M23613,Smith-Waterman Score=55.
atggtaaatatgaaattacttcagagtgactggcaaacttggtacaagcagcccatgggtgttgcggaccctccacagtatttctggacaaattcactacttacccaaagtccttgtgagcttcgtggactttattggagactgtctatgggagagaagatggatgaggtgaggcattgggaagggttgatagtggtcgtttatctccatccaccttctctcctacctaagtgcgtgccaccacctgatggaagattcgtggacatggggatgaggcccctgaggccccagaactatcttttcagttgtgaactaaaggccaacaaagattatcactttaaggtagataataatgaaaatgagcaccagttacctttaacaacaatcaatttaggggctggtgcaatggatgaattggacattgttgaagcagaggcaatgaattacgaaggcagtccaattaaagtaatactggcaactttgaaaatgtctgtacagccaacggtttcccttgggggactttgaaataacaccaccagtggtctttaaggttgaagtgtggttcagggccagtgcatattagtggacagcacttagtagctgtggaggaagatgcagagtcagaagatgaagaggaggaggatgtgaaactcttaagtatatctggaaagcggtctgcccctggaggtggtagcaaggttccacagaaaaaagtaaaacttgctgctgatgaagatgatgacgatgatgatgaagaggatgatgatgaagatgatgatgatgatgattttgatgatgaggaagctgaagaaaaagcgccagtgaagaaatctatacgagatactccagccaaaaatgcacaaaagtcaaatcagaatggaaaagactcaaaaccatcatcaacaccaagatcaaaaggacaagaatccttcaagaaacagcaaaaaactcctaaaacaccaaaaggacctagttctgtagaagacattaaagcaaaaatgcaagcaagtatagaaaaagcgcattgaacagtcctgggcactacatgtaaattaagcccaaagatggggagaaaggaaaaggagagacaaatatagtccatactgagtgtcatcaacaatccagactgaagtcttctattttaattctcatccccctttcttgattggccacccatgcctcttcaggctggaaacaatctcttggttccctaaagcactttcttctgactgctgtgattcagtgaaccttgccctttgctttctattacttggtgcatttgcctcacctgacaatgtttt

SEQ ID NO: 5493 - DNA, 367 bp, Homo sapiens
  SIMILAR (365)..(6): 761254mologous to Homo sapiens unnamed protein product,accession number AK024010,Smith-Waterman Score=429.
  misc_feature (1)...(367): n = a,t,c or g
tgtcaaaaccagantccgaatacctttggctcttnacaagcatccggcccgtctncagctctgtaaacaaacttctttgcatcgaagccgccacttcaatgacgttgttgaggagggcaaacacaggtgcccaggggaaaggaggccacgaagagggtgacaaaaccaaactggatgatcatttccatgtactccggagtcagtcctgtgtatggttccaagctgtagtctaggtcccactgctctggatgtttcgaatgggcagagtcagtttctccagcttcggtctcatctttcagctttcgaaatagtttctttagcttcgggactccaatctcaaagatgttgttctggatcaactgcttcc

SEQ ID NO: 5494 - DNA, 2324 bp, Homo sapiens
  SIMILAR (13)..(78): 501254mologous to Homo sapiens hypothetical protein,accession number AJ272204,Smith-Waterman Score=47.
atggcctgggtgaactggacccagtccgaggggaaaagggatgatgaagataaacttgacctggaaggatcgtttcccaggttacctgatgaactttgcctccatcttattcatgattgccctgacattctcaatcgtctttggggtgatagtgtatcgaataacaactgcagccgctctgtctctcaataaggctacacgctccaatgtccgggtgacagtgacagcaacagcagtcatcatcaacctcgtggtcatcctcatcctggacgagatctacggcgctgtggccaagtggctcaccaaaattgatctcttgatagttgaggaggctgtgagtatacgctttgctcaccaggtgcaaacagctggtgtcaataaccccaaaaagtttaaatttattgggagagcaacaggaaacaccacaaaggttccagaagatttagaatgcagtgcactcacatatgtgaatgacaagaggtcgagtatttctggggatggggacaaccgtgtggaggttccgaaaacagaacagacttttgaagagcgcctgatcctcaaagctttcttgctcaagtttgtcaatgcctactcccccatcttctatgtggcctttttcaaagggaggtttgtgggcaggcctggaagctacgtctatgtattcgatggttaccgcatggaagaggcaagtacagccactggtgtttcatgcctggcaccccaacccagccccattcttatctccagcacagcatggcttcattcgcgcccctgcttctcagagctcccttttgttctaaccggtcctttccttatcttctccctgcagtgtgctccagggggctgtctcatggagctctgcattcagctcagcatcatcatgttggggaagcagttgatccagaacaacatctttgagattggagtcccgaagctaaagaaactatttcgaaagctgaaagatgagaccgaagctggagaaactgactctgcccattcgaaacatccagagcagtgggacctagactacagcttggaaccatacacaggactgactccggagtacatggaaatgagtgagaacccatggtcctgccttccactgggggcaggttcagacaaggggtctgtggggttgaagggggaagtcatccagtttggttttgtcaccctcttcgtggcctcctttcccctggcacctgtgtttgccctcctcaacaacgtcattgaagtgcggctcgatgcaaagaagtttgttacagagctgagacggccggatgctgtaagaaccaaagatatcggaatctggtttgacattctctctggaattggcaagttctctgttatcagcaacgcttttgtcattgcgatcacctccgacttgtatcccccgcctggcgtaccagcactcctaccgccacaatgggactctgcacggctttgtcaaccacaccctctcctttttcaacggcagccagctgaacgaggggacccagccagaaaactcacagtttgaccaagaagttcagatctgcaggataaatgatcaccgagagcctccatgggccccgaacccttatgagttttcgaaacagtactggtttattctgtccgcccgtctggcttttgtcataatcttccagaacctcgtgatgttcctgagcgtcctcgtggactggatgattccagacatccccacggacatcagcgaccagatcaagaaagagaagagcttattagtggatttcttcctgaaagaggagcatgagaagctcaagctgatggatgagccggctctgaggagcccaggagatacccctgtaaagttcttctccacgtatgtggacagcagaagtacagcacttttccatgtacgttatgtcaaaagcagactcggacacagccttctcacacattccctgctcttcaagcttcttccaccaaccccctgctgctttgcctgggcactggcagcttcagagcagagctcccactcaatggaaagggatcaagcagtagtactggtgctggctcctctcctcaaggccacatcagggctgcctggtagcctctgctccagtcatcccttcattccagggaaagatgcagaaaaagcacttggcaaaatccagcatccttttatgattaaaattctcagcacaatcggcatagaagggacatacctcaaggctgattcctcttgtggtcagaagttggctgcagtctttccaggcatcccatccagaaatgacaatgtccaaaggaagaatcttgcatctcttgtcaagaatgaagaaacaaccatggtctcccctgaagagtaa

SEQ ID NO: 5495 - DNA, 543 bp, Homo sapiens
  SIMILAR (280)..(486): 721254mologous to Homo sapiens adipocyte-derived leucine aminopeptidase,accession number AF106037,Smith-Waterman Score=224.
atgagagacagaagcaacacaatacttggtgctgagaagcttaagcggaagcatggagaaagtgtgtctggaccactgacggtcaacacagggcagcatcctcatcatcacgtcacatcagctcacaataccccatattcatccgaaccgttaccaccacacaacatcaagctcaacatcacgaacagcatcatcaccatcataatcagtgcacatcattctccaccgttgcaggcaacacttggggttcacagtggttcgggttattatggtatatccaatatggcaaacacaatggtggcacaggtgaaatctgtgactgttgctgaaggactcatagaagaccattttgatgtcactgtgaagatgagcacctatctggtggccttcatcatttcagattttgagtctgtcagcaagataaccaagagtggagtcaaggaaaaagctaaagctgaacatagagacaagcttggagaaagagatgacactatcccacctgaatacagacatctcctggatgataatggacaggtaaactga

SEQ ID NO: 5496 - DNA, 2252 bp, Homo sapiens
  SIMILAR (1433)..(1630): 961254mologous to Homo sapiens calpastatin,accession number U26724,Smith-Waterman Score=329.
atggatgctgctttggatgacttaatagatactttaggaggacctgaagaaactgaagaagaaaatacaacgtatactggaccagaagtttcagatccaatgagttccacctacatagaggaattgggtaaaagagaagtcacaattcctccaaaatatagggaactattggctaaacccatagggccagatgatgctatagacgccttgtcatctgacttcacctgtgggtcgcctacagctgctggaaagaaaactgaaaaagaggaatctacagaagttttaaaagctcagtcagcagggacagtcagaagtgctgctccaccccaagagaagaaaagaaaggtggagaaggatacaatgagtgatcaagcactcgaggctctgtcggcttcactgggcacccggcaagcagaacctgagctcgacctccgctcaattaaggaagtcgatgaggcaaaagctaaagaagaaaaactagagaagtgtggtgaggatgatgaaacaatcccatctgagtacagattaaaaccagccacggataaagatggaaaaccactattgccagagcctgaagaaaaacccaagcctcggagtgaatcagaactcattgatgaactttcagaagattttgaccggtctgaatgtaaagagaaaccatctaagccaactgaaaagacagaagaatctaaggctgctgctccagctcctgtgtcggaggctgtgtctcggacctccatgtgtagtatacagtcagcaccccctgagccggctaccttgaagggcacagtgccagatgatgctgtagaagccttggctgatagcctggggaaaaaggaagcagatccagaagatggaaaacctgtgatggataaagtcaaggagaaggccaaagaagaagacctggaaaagcttggtgaaaaagaagaaacaattcctcctgattatagattagaagagggcaaggagaaagatggaaagccactcctgccaaaagagtctaaggaacagcttccacccatgagtgaagacttccttctggatgctttgtctgaggacttctctggtccacaaaatgcttcatctcttaaatttgaagatgctaaacttgctgctgccatctctgaagtgctttcccaaaccccagcttcaacgacccaagctggagccccaccccgtgatacctcgcagagtgacaaagacctcgatgatgccttggataaactctctgacagtctaggacaaaggcagcctgacccagatgagaacaaaccaatggaagataaagtaaaggaaaaagctaaagctgaacatcgagacaagcttggagaaagagatgacactatcccacctgaatacagacatctcctggatgataatggacaggacaaaccagtgaagccacctacaaagaaatcagaggattcaaatgaaacctgccgatgaccaagaccccattgatgctctctcaggatatctggacaggtgtccctccactacagaaacctcacagaacacagcaaaggataagtgcaagaaggctgcttccagctccaaagcacctaagaatggaggtaaagcgaaggattcagcaaagacaacagaggaaacttccaagccaaaagatgactaaagaaatacaagttaaggtatctggtatctgcatgtaaaatcttcagctggtggatggtgacttttgaagaacaaaaggctttggcaacagaaaacaattgttctgggtgatttctagaatggtttttgttgagtctctgaacatcctaaatattggtttgttattcttttccagaaagaaaatgaatttgactggttcacctgtgtactgagtattgataaactttgaatttttttaattgccttcaattgggagagaaagctttatatttgtaagaaatatatttgataaagtttattaaagcaacaccaaaaaaacaaaagaaaagctaagtgaattttttgcacattctacacacagtgcctgtaaatctcatttgtattttcagtttgcccttaattttttttgttagtgtttagaaaacaatgttttaaacattcttcagtgttctgatttcttattaccccctttcctcttgggcttttgaactgtatttgatgttgctttgggataatgtttataagtgaaacataagatattgtacattgggcacatatctcctcttgggctgctaaataataaattaataacaggtaacctggacaaaccaggaagcatt

SEQ ID NO: 5497 - DNA, 933 bp, Homo sapiens
  SIMILAR (1)..(441): 651254mologous to Homo sapiens NAG13,accession number AF194537,Smith-Waterman Score=468.
atgtcaatatatgcagaaaaagcactagacaaaatccagcaacactttatgattaaaattttcaacaaaatcggcatacaagggacataccttaatgtaataaaagccatatatgacaaacccacagccaaaataatactgaatgaggaaaagttgaaagcattccctctgagagctggaacaagacaaggatgcccactttcaccactcttcttcaacataatactggaagtcctagccagggcaatcaggcaagagaaagaaagaaagggcatccaagtcagtaaagaggaagtcaaactgtcactgtttgctgatgatatgatcatttaccttgaaaaccctgaactcttccaccagcattctcaggccttggaggtgctgaccgatgctgcagccggggctgcgtatgacaaggtcaggaaagccaagaagcaggcagcagagaggactcagaaactagatgaaaaaaggaataaagtgaagcttgatctggaggcccggaagcgggagcggcagcaccaggcggagggggagggagagggggaggaggaggaggaaggggaggggggaggaggaggaggaagaggaggaggagctggaggagagcctgagcaccaggacactagagcgagagatcaaacgcctgataagaaggtaggcactgctgtggtggagtttgcgactgccaaggctgcggagctggctgtccagaatgaagttggcctggtggataaccctctgaagatttcctggttggagggacagccccagagcaccgtgggccccagccgcccagcactgtcaaagggctcagtgctgtcggtgagggaatacgagagcgtcatcgtgatgcacatgcgccatgcggccgagctgcaatggctgatctcagacatgcaccagcaagaccgagaggggcagcccacgtaa

SEQ ID NO: 5498 - DNA, 186 bp, Homo sapiens
  SIMILAR (1)..(180): 1001254mologous to Homo sapiens Rev1S,accession number AB047646,Smith-Waterman Score=323.
atgaggcgaggtggatggaggaagcgagctgaaaatgatggctgggaaacatggggtgggtatatggctgccaaggtccagaaattggaggaacagtttcgatcagatgctgctatgcagaaggatgggacttcatctacaatttttagtggagttgccatctatgttaatggatacacaggttga

SEQ ID NO: 5499 - DNA, 558 bp, Homo sapiens
  SIMILAR (1)..(555): 841254mologous to Homo sapiens E2F-related transcription factor,accession number L23959,Smith-Waterman Score=822.
atggcaaaagatgccggtctaattgaagccaatggagacctcaaggtcttcacagaccagaaccttagtcctggaaaaggcgtggtgtccctcgtggccgttcacccctccaccgtcaacccgctcggggagcagctcttggcaaaaacctctggacagtccaatgtcaacattgcccagcaagtggtagttggtacacctcagagaccggcagcgtcaaacgccctggggaaccagccttccgactcctcaccttggtctgccgggaagcgcaacagaaaaggagaggataatggcaggggcctgcggcatttctccatgaaggtctgcgagaaggtgcagaggaaagggaccacttcctacaaccaagtggcggatgagctggtcgcgaagttcagtgctgccgacaaccacatcttaccaaacgagtcagcttgtgaccagaagaacataagacggcgcgtctgcgatgccttaaacgtgctgagggccgtgagcatcatctccaaggagaaaaaggagatcaagtggattggtctgcccaccaactcggcttaa

SEQ ID NO: 5500 - DNA, 499 bp, Homo sapiens
  SIMILAR (180)..(482): 861254mologous to Homo sapiens E2F-related transcription factor,accession number L23959,Smith-Waterman Score=420.
  misc_feature (1)...(499): n = a,t,c or g
gccagggtgagccccgcgtcccggcgccactcggcccgcgcctctccgcgccgccccgcgctccgcaccgcgccctctccgcgtccccgcccgcgcggccggaccgggcagccagaaaaatcatttttcttctctgggaaggtgaacatttgtagcattgatttcccggatctggtaacatggcaaaagatgccggtctaattgaagccaacggagaactcaaggtcttcatagaccagaaccttagtcccgggaaaggcgtggtgtccctcgtggccgttcacccctccaccgtcaacccgctcgggaagcagctcttgccaaaaacctttggacagtccaatgtcaacattgcccagcaagtggtaattggtacgcctcagagaccggcagcgtcaaacaccctgggtgggtaggaagcccacacacccccagcactcactttgcctctcaagaaccagncttccgactcctcaccttgggtctgccgggaagcgca

SEQ ID NO: 5501 - DNA, 464 bp, Homo sapiens
  SIMILAR (2)..(301): 831254mologous to Homo sapiens DP2,accession number U18422,Smith-Waterman Score=434.
gctggttgcggagttcagtgctgccgacaaccacatcttaccaaacgagtcagcttatgaccagaaaaacataagacggcgcgtctacgatgccttaaacgtgctaatggccatgaacatcatctccaaggagaagaaggagatcaagtggattggtctgcccaccaactcggctcaggaatgtcagaacttagaggtggaaagacagaggagacttgaaagaataaaacagaaacagtctcaacttcaagaacttattctacagcaaattgccttcaagaacctggtgcagagaaaccgggcatgcggagcagcaggccagccggccaccgccacccaactcagtcatccacctgcccttcatcatcgtcaacaccagcaagaagacggtcatcgactgcagcatctccaatgacaaatttgagtatctgtttaattttgacaacacataaaaaaaaaaaaaa

SEQ ID NO: 5502 - DNA, 162 bp, Homo sapiens
  SIMILAR (84)..(4): 1001254mologous to synthetic construct tox/synthetic protein,accession number M21873,Smith-Waterman Score=152.
ttatgcttccggctcgtatgttgtgtggaattgtgagcggataacaatttcacacaggaaacagctatgaccatgattacgaattcgagctcggtacccgtaggttttcccgtccttgaatttccatatccgggtgcggaagtcgcctgctttctcgggcat

SEQ ID NO: 5503 - DNA, 1383 bp, Homo sapiens
  SIMILAR (966)..(196): 951254mologous to Cloning vector pZC320 SopA,accession number U26464,Smith-Waterman Score=1289.
  misc_feature (1)...(1383): n = a,t,c or g
ttatgcttccggctcgtatgttgtgtggaattgtgagcggataacaatttcacacaggaaacagctatgaccatgattacgaattcgagctcggtacccgcccgggtgtggaacaggcacagctgcagccctccgatgcggccagcgcgctgggccagatcgatgtggtgctgccgatcgtgcacgggccgggggatcctctagagaaaactgcatggcagccaaagttccattactattgctgtatttggtaagcaaaatacgtacatcaggctcgaaccctttaagatcaacgttcttgagcagatcacgaagcatatcgaaaaactgcagtgcggaggtgtagtcaaacaactcagcaggcgtgggaacaatcagcacatcagcagcacatacgacattaatcgtgccgatacncaggttaggcgcgctgtcaataactatgacatcatagtcatgagcaacagtttcaatggccagtcggagcatcaggtgtggatcggtgggcagtttaccttcatcaaatttgcccattaactcagtttcaatacggtgcagagccagacaggaaggaataatgtcaagccccggccagcaagtgggctttattgcataagtgacatcgtccttttccccaagatagaaaggcaggagagtgtcttctgcatgaatatgaagatctggtacccatccgtgatacattgaggctgttccctgggggtcgttaccttccacgagcaaaacacgtagccccttcagagccagatcctgagcaagatgaacagaaactgaggttttgtaaacgccacctttatgggcagcaaccccgatcaccggtggaaatacgtcttcagcacgtcgcaatcgcgtaccaaacacatcacgcatatgattaatttgttcaattgtataaccaacacgttgctcaacccgtcctcgaatttccatatccgggtgcggtagtcgggggatcctagttctggagactgggaagtggaagatcaaggtgctggcagatttggtgtctggcgagggctccttttctgcctcatagatagagccttgttgacaaatttctgcaggcagcttaaatttctctccagaaaatgggtttttcttttctactgcattgtcaggctgcaaattttccaaagttttatgctctgtcacctcttgaatgttttggtgcttagaaatttcttccaccagataccccaaatcatctctctcaagttcaaggttccacagatctctagggcaggggcaaaattctgccagtctctttgcatagcaagtggcctttactccaattcccaacaagttcctcatctccatctgagaccacctcagcctggattttattgtccatatcactgtcagcat

SEQ ID NO: 5504 - DNA, 1407 bp, Homo sapiens
  SIMILAR (232)..(504): 821254mologous to unidentified cloning vector 29kD protein essential for the replication of mini F plasmid,accession number AB015619,Smith-Waterman Score=371.
atggaagccatcacaaacggcatgatgaacctgaatcgccagcggcatcagcaccttgtcgccttgcgtataatatttgcccatggtgaaaacgggggcgaagaagttgtccatattggccacgagatccccttacctggcactacaggtactgcactagaaggattgggacttaaagtttatgaactcacccaaactttacaacacccacgttatggtgttccggaaagatttggtaccaagatcagaaaatctgatggcaccctacaggaacatgacggtatctgcgagatccatgttgctaaatatgctgaaatattcggattgacctatgcggaagccagtacggatatacggcaggcattgaagagtttcgcggggaaggaagtggttttttatcgccctgaagaggatgccggcgatgaaaaaggctatgaatcttttccttggtttatcaaaccctcagacattacaccgcagcctcggacattacaccgcagccacggacattacaccgcagccacggacattacaccgcagcctcgtaaattacaccgcagccacggacattacaccgcagcctcggacattacaccgcagcctcggagagtacaccgcaacctcggacattacaccgcagccacggacattacaccgcagcctcggacattacaccgcagccacggacattacaccgcagcctcggacattacaccgcagcgcctgacattacaccgcagccacggacattacaccgcagtcactgacattacaccggagccacggacattacaccgcagcctcggacattacaccgcagccacggacattacaccgcaggcactgacattacaccggaggcacggacattacaccgcagtcacggacattacaccgtggcctcggaaattacaccgtaggctagtatcttacagcggagccaccggctttacaccgcaggctcagactttacaccgaaggcggggacattacaccggaagccccggactttacaaccggaatcactgtacattacgccgggagtcgctggacattacaccgaaaggcagggacattacaccgaaggggtggtacataaaccgcaggcctcgaacttacacgggggcaatggacttccaccggaaccttggacttatcaccgaaagccgggacattaacgggacccccctcggacattacaccgcagcctcggacattacaccgcagccacggacattacaccgcagcctcggacattacaccgcagcctcggacattacaccgcagccacggacattacaccgcagcgggtaccgagctcgaattcgtaatcatggtcatagctgtttcctgtgtgaaattgttatccgctcacaattccacacaacatacgagccggaagcataa

SEQ ID NO: 5505 - DNA, 603 bp, Homo sapiens
  SIMILAR (603)..(271): 991254mologous to Cloning vector pZC320 SopA,accession number U26464,Smith-Waterman Score=566.
ttatgcttccggctcgtatgtgttgtggaattgtgagcggataacaatttcacacaggaaacagctatgaccatgattacgaattcgagctcggtacccgatcttaagcttaattaaaacttttattttcctgaactctgcctgactgacagttacctgcaggaagcggggaaggaccctatcatctggaggggcagctttcttattgccacagagggggagagaaagcccttgctgcacttttgtcatctcccacgagcaaaacacgtagcccttcagagccagatcctgagcaagatgaacagaaactgaggttttgtaaacgccacctttatgggcagcaaccccgatcaccggtggaaatacgtcttcagcacgtcgcaatcgcgtaccaaacacatcacgcatatgattaatttgttcaattgtataaccaacacgttgctcaacccgtcctcgaatttccatatccgggtgcggtagtcgccctgctttctcggcatctctgatagcctgagaagaaaccccaactaaatccgctgcttcacctattctccagcgccgggttattttcctcgcttccgggctgtcatcattaaactt

SEQ ID NO: 5506 - DNA, 2229 bp, Homo sapiens
  SIMILAR (2223)..(1861): 931254mologous to Cloning vector pBACe3.6 levansucrase,accession number U80929,Smith-Waterman Score=581.
tcactgcccgctttccagtcgggaaacctgtcgtgccagctgcattaatgaatcggccaacgcgcggggagaggcggtttgcgtattgggcgccagggtggtttttcttttcaccagtgagacgggcaacagctgattgcccttcaccgcctggccctgagagagttgcagcaagcggtccacgctggtttgccccagcaggcgaaaatcctgtttgatggtggttccgaaatcggcaaaatcctgcccgctttccagtcgggaaacctgtcgtgccagctgcattaatgaatcggccaacgcgcggggagaggcggtttgcgtattgggcgccagggtggtttttcttttcaccagtgagacgggcaacagctgattgcccttcaccgcctggccctgagagagttgcagcaagcggtccacgctggtttgccccagcaggcgaaaatcctgtttgatggtggttccgaaatcggcaaaattccttataatccactgaattaggggtggggcataagagccttcatttttaccagccactctaggtgattctgatgcctgtgttctggtgtacagaattgcaggtgtggcagggaagatgggaactggtgctccagcgtccaacacgtggcattccctcaggccggcctgcttgcccccacactcctcatcctccttccccatctggttgctcttcacaacagctctgctgacttcatgctcaatgtcttgggccttcctgctgtgggccatgggacctccagcgtccaacacgtggcattccctcaggccggcctgcttgcccccacactcctcatcctccttccccatctggttgctcttcacaacagctctgctgacttcatgctcaatgtcttgggccttcctgattaattgcgttgcgctcactgcccgctttccagtcgggaaacctgtcgtgccagctgcattaatgaatcggccaacgcgcggggagaggcggtttgcgtattgggcgccagggtggtttttcttttcaccagtgagacgggcaacagctgattgcccttcaccgcctggccctgagagagttgcagcaagcggtccacgctggtttgccccagcaggcgaaaatcctgtttgatggtggttccgaaatcggcaaaatcccttcatgggaggagccggatattctacccattttttcgtcccctttttcatttggggctggggctcagtttttccgtttttttttttgaggatggccattgtcctaatccccttgctgtccccatgggttgctccactctgttcaatttttacttttctgatcagggtaccgagctcgaattcgtaatcatggtcatagctgtttcctgtgtgaaattgatatccgctcacaattccacgcctggccctgagagagttgcataagcgggtcccgctgttttgccccatcaggcgaaaatcctggttgatggtggtttcgaaatcggggataattctctgcccgctttccagtcgggaaacctgtcgtgccagctgcattaatgaatcggccaacgcgcggggagaggcggtttgcgtattgggcgccagggtggtttttcttttcaccagtgagacgggcaacagctgattgcccttcaccgcctggccctgagagagttgcagcaagcggtccacgctggtttgccccagcaggcgaaaatcctgtttgatggtggttccgaaaatcggcaaaatccagcttcgccagtcactatggcgtgctgctagcgctatatgcgttgatgcaatttctatgcgcacccgttctcggagcactgtccgaccgctttggccgccgcccagtcctgctcgcttcgctacttggagccatgtcagctgtccttgctccaggatgctgtttttgacaacggatgttttattgcctttgatgttcattaagaagcttggcgcaaatgttgcctttttatcctcgaagaagcctctgtttgtcatgtagcttgtgataaccacattgttgcctttggcttgcggcactgcgaagtgagagtaagtgaatgtcacatcgtttggatcaagacccatttgcagcacaagccctgttttgttcagcggcttgtaagggccggttaaagagtttgatacataaccaagcatgtaaatatcgtttgagttaataccatcgatcgtcatttttgaaccgcgggaattcagtgaacaagtaccattttgccgttgcat

SEQ ID NO: 5507 - DNA, 561 bp, Homo sapiens
  SIMILAR (478)..(558): 1001254mologous to synthetic construct tox/synthetic protein,accession number M21873,Smith-Waterman Score=152.
atggcgacccggatctctgatgggcgtccctggggggttggagcttttttagcgttgctggcgagcgttgtggcgccgccgctgcgcggggtcgcggtgattgtttccgtgggcggtagagaagcaccgctcctctccgagattacgcacggcggcggtgtggggcgctggatgtggcgcgccatcgtgccgtgtaaccgagcatatcgagcgaactggcgaggagacacagaggaactgttctgtcagatagctcttacgctcatcgcacgaagagaatgcaccgtgggagaaactccacgtggaggtggaggtgttgacacaagccttgaaccctctacaaataagacaacagccacatggtgccttagatcccctgtgctggtctcgatcaccgagatcaccggcgtcagcgacaacctgatcaccacccaggagatgttccgccacgagctgcagatcgggtaccgagctcgaattcgtaatcatggtcatagctgtttcctgtgtgaaattgttatccgctcacaattccacacaacatacgagccggaagcataa

SEQ ID NO: 5508 - DNA, 495 bp, Homo sapiens
  SIMILAR (412)..(492): 1001254mologous to synthetic construct tox/synthetic protein,accession number M21873,Smith-Waterman Score=152.
atggccggagaggcctcaggaaacttagaatcttggcagaaggcagaggggaagcagagataccggcattggacccaggatgggaacgtggctgttggggagaagatgagcagagaggaaagaggccattacagagaccgtcagcaatcagcttcattctttaggagacatccacatccagggcttccagaggccatggcagggctgggtcaagccctcctgggggaggagggggatcccctggacatccgcctggagtaccaacccctgtcactcagagaccccagaaagatgaaaaacggggtggaaaatgcattggaattgtttacagggaggatgtatgtgaacaccagcattgggggtccaaacgtgccgattcttggaccgccaggagtcgggtaccgagctcgaattcgtaatcatggtcatagctgtttcctgtgtgaaattgttatccgctcacaattccacacaacatacgagccggaagcataa

SEQ ID NO: 5509 - DNA, 1055 bp, Homo sapiens
  SIMILAR (396)..(1052): 331254mologous to Streptococcus parasanguinis fimbriae- associated protein Fap1,accession number AF100426,Smith-Waterman Score=163.
aggaatccccggtaccgaactcgaattcgaatcctggtcctagcctgttcctgtggaaaatggtaacccgttacaattccacacaacatacgagccccgaagctaaagggatctgcaagtggatatttggaccactctgtggccttcgttcgaaacgggtatatcttcgcataaaatctagaggatccccgggtaccgagctcgaattcgtaatcatggtcatagctgtttcctgtgtgaaattgagggatcccgggtaccgagctcgaattcctaatcatggtcatagctgtttcctgggtaaaatgttatccgctcacaattccacccacataccaaccgggaaccttaagtggatctgcaagtggatatttggaccactctgtggccttcgttcgaaacgggtacatcttcgcataaaatctagaggatccccggatcctcgtagcagtgttctggaatcctatatgagggacaaacattcagagcccagctgcagtgttctggaatcctatgtgagtgacaaaccttcagaacttcttagcagtgttctggaatttgttttggaatcctatgtgagtgaaaaatgttcagaccctcgtagcattgttctggaatccaatatgagggacaaacactcagaatccagtaacagtgttctggaaccctccgtgagggataaacattcagaccctcatagcagtgttctggaatcctatgtgagggacaaacactcagaacccagcagcagtgttctagaatcctttgtgagggacaaacattcagaccctcgtagcagtgttctggaatcctatgtgagggacagacattcagaacccagcattagtgttctggaatcctatgtgaggaactcacattcagacccttgtaccagtgttctggaatcctctgtgggggacaacaattcagaggcttgtagcagtgttctggaatcctttgtgaaggacacatgttcagacgacagcaggagtgttcttgagtcctatgtgggggacaaacacgcagaacacagcagcagtgtcctggaatcatat

SEQ ID NO: 5510 - DNA, 1060 bp, Homo sapiens
  SIMILAR (1032)..(982): 471254mologous to Bordetella bronchiseptica pertactin (P.68),accession number AJ250092,Smith-Waterman Score=44.
atgtttgatagttctgtgtttcttgaggatgcggagagatacgggcagaggcaccctctgcaagttacagaccctcgaggggtccctgcagtcctggagatgagggtgttgggaggggacgtcttcttggtgcccatggaatgggcctgctttgtggattggggcctggtctgggacctcagtgacattgacaaggatgggcacttggatcgagatgagttcgctgtgcgtttgcctcaaacgggtcgcatcgtcttacctacacaaagatcggtagcccctcactgcacagtcccgcattccacgcacgataccgatcctggcgccgctagcggtactaggaccatccggaggtcacgtgcgtatgatccggtatggcgctcggacggcaattcgggggaacgactctctgccctgaagcccctcacgggtaccacatgtgacgtccagctgctagcttgcagctcagccgaccaaaagatgaacaaaaataccagaaagacgataaagctgatgatgacgggcccgggggcggctatggaaaccacctcattacgagtccacgagaaaagagagtatgggaggaaagagggaggcggtgccacccagcgggggccagacacaagagacagatgagctcgccagcagtgccttcccagcagcccaggggacgcgtgtgcttccacataaatccttgggactgaggacttggctgctgagaaaagaaacacatcaagcattgaacataaagaggcaagtgtggtgtttagagagcacgagcgctcactcttattccagggaggaagaggaatccatgacgtacagaggcccaggagcagaagggctccagggaggagccctgggagagagggtggcagcacggagagagctgctggaggcagcagagcaccaaggaaacatccagacatgcgcggcccggcccatccgctcccggaacagcaccaagacgaaatgggaaactacatgtccccagcgcccccccccggaggcggccactttcattctggatgtcttccggggtcggtccttcggcttttaa

SEQ ID NO: 5511 - DNA, 726 bp, Homo sapiens
  SIMILAR (133)..(513): 751254mologous to Homo sapiens Homo sapiens DH1308_1 clone secreted protein,accession number W29666,Smith-Waterman Score=452.
atgctgggaagtgaatgtgattacctgtgtcagttatccttttctagtcattcatctacgtgctgctttaaagatgctaaaaaagacctggtgtcatccaggaaccagattactcatatttatggaatttcatataatcagtgccataggaccatgagttttaagttgaatgtagacagtcattgtgctctcaaggaagctgtggaggaggaaggacaccaacttcttgagcttattgcatctcacaaagcagaaggactgaaggacatgctgcggatgattgcaagtcaatggaaggagctgcagaggcaaatcaaacggcagcacagctggattctcagggctctggataccatcaaagccgagatactggctactgatgtgtctgtggaggatgaggaagggactggaagccccaaggcagaggagaaacccatccagccctgcaatgttgagacccatgcagccagtgaaaagctcagacaatttacagcttttgaatctcaaacaacgcctttaacttatttgttggaaacagaggatagaatgatgagctcagtttcacttaaagaaacctccatgaagaaggttgcatttcaggaagtacttgaaggaaggaggagagttccatcttcattgaaatctagcaaaactgctgaaggtaaggtagtggcaatggtgcatgaaaaaagggaaaaggagtacagtgattcatggcatacttga

SEQ ID NO: 5512 - DNA, 387 bp, Homo sapiens
  SIMILAR (70)..(204): 971254mologous to Homo sapiens UDP- glucuronosyltransferase,accession number AJ005162,Smith-Waterman Score=210.
atgaaggcggctctggacatcaagccactgaaacaaaacactgaacgtaagttacatcaaatgtggctacaggaaatggaagagtttgtccagagctctggagaaaatggtgttgtggtgttttctctggggtcgatggtcagtaacacatcagaagaaagggccaatgtaattgcatcagcccttgccaagatcccacaaaagaaacaggaaacaaaagggttagtggaccctgaccctgcaagtcaattatttgagaaaccatgttgggatccatcaaaacagcagaggaacacagagagcagagaggagcaaacctgggcactgacctgtctaggcttagaacggagcaaggagaacctctccaacacgagaaaggaagagtga

SEQ ID NO: 5513 - DNA, 795 bp, Homo sapiens
  SIMILAR (197)..(448): 821254mologous to Cloning vector pCMVLacI lac repressor,accession number U64448,Smith-Waterman Score=324.
atgctgtttggttactgtacccttgcagtaaaatctgaagtccaggaaatggaagagtttgtccagagctctggagaaaatggtgttgtggtgttttctctggggtcgatggtcagtaacacatcagaagaaagggccaatgtaattgcatcagcccttgccaagatcccacaaaagggattttgccgatttcggaaccaccatcaaacaggattttcgcctgctggggcaaaccagcgtggaccgcttgctgcaactctctcagggccaggcggtgaagggcaatcagctgttgcccgtctcactggtgaaaagaaaaaccaccctggcgcccaatacgcaaaccgcctctccccgcgcgttggccgattcattaatgcagctggcacgacagtagaggaggaggaggaggaggaagaagatgaagaagcagaagaagaaggaggaggaggaggaggagaaggaggagaaggagaaggaggagaaggagaaggagaaggagaaggagaagagaacagaacagaagaaaagaagagggagagaaagaagagaagtagaaggagaagaagaagaaagaaggaggaggaggaggaggagtcaagtagaaggaagccagatgtgggggatcctctagactcaactgcgggtcatgcaacacaagtcgatattgtactgccagttcttggtctcgaggctcaaagggttgatggagagtttcttctcttggtcccagtgtgtgttgttccttgtcatatgtctgtgtcttctcatcgttcagctcccatttataaatga

SEQ ID NO: 5514 - DNA, 1859 bp, Homo sapiens
  SIMILAR (1037)..(1084): 931254mologous to Homo sapiens UDP-glucuronosyltransferase (EC 2.4.1.17),accession number J05428,Smith-Waterman Score=83.
tgcattgcaccaggatgtctgtgaaatggacttcagtaattttgctaatacaactgagcttttgctttagctctgggaattgtggaaaggtgctggtgtgggcagcagaatacagccattggatgaatataaagacaatcctggatgagcttattcagagaggtcatgaggtgactgtactggcatcttcagcttccattctttttgatcccaacaactcatccgctcttaaaattgaaatttatcccacatctttaactaaaactgagttggagaatttcatcatgcaacagattaagagatggtcagaccttccaaaagatacattttggttatatttttcacaagtacaggaaatcatgtcaatatttggtgacataactagaaagttctgtaaagatgtagtttcaaataagaaatttatgaaaaaagtacaagagtcaagatttgacgtcatttttgcagatgctatttttccctgtagtgagctgctggctgagctatttaacataccctttgtgtacagtctcagcttctctcctggctacacttttgaaaagcatagtggaggatttattttccctccttcctacgtacctgttgttatgtcagaattaactgatcaaatgactttcatggagagggtaaaaaatatgatctatgtgctttactttgacttttggttcgaaatatttgacatgaagaagtgggatcagttttatagtgaagttctaggaagacccactacgttatctgagacaatggggaaagctgacgtatggcttattcgaaactcctggaattttcagtttcctcatccactcttaccaaatgttgattttgttggaggactccactgcaaacctgccaaacccctgcctaaggaaatggaagactttgtacagagctctggagaaaatggtgttgtggtgttttctctggggtcaatggtcagtaacatgacagaagaaagggccaacgtaattgcatcagccctggcccagatcccacaaaaggttctgtgggagatttgatggggattaaaccagataccttaggtctcaatactcggctgtataagtgggataccccagaattgaccttctaggtcatccaaagaccagagcttttataactcatggtggagccaatggcatctacgaggcaatctaccatgggatccctatggtggggattccattgtttgccgatcaacctgataacattgctcacatgaaggccaggggagcagctgttagagtggacttcaacacaatgtcgagtacagacttgctgaatgcattgaagagagtaattaatgatccttcatataaagagaatgttatgaaattatcaagaattcaacatgatcaaccagtgaagcccctggatcgagcagtcttctggattgaatttgtcatgcgccacaaaggagctaaacaccttcgggttgcagcccacgacctcacctggttccagtaccactctttggatgtgattgggttcctgctggtctgtgtggcaactgtgatatttatcgtcacaaaatgttgtctgttttgtttctggaagtttgctagaaaagcaaagaagggaaaaaatgattagttatatctgagatttgaagctggaaaacctgataggtgagactacttcagtttattccagcaagaaagattgtgatgcaagatttctttcttcctgagacaaaaaaaaaaaaaagaaaaaaaaatcttttcaaaatttactttgtcaaataaaaatttgtttttcagagatttaccacccagttcatggttagaaatattttgtggcaatgaagaaaacactacggaaaataaaaaataagataaagcctt

SEQ ID NO: 5515 - DNA, 2802 bp, Homo sapiens
  SIMILAR (11)..(1597): 981254mologous to Homo sapiens UDP- glucuronosyltransferase,accession number X63359,Smith-Waterman Score=2757.
ctgcacaaggatggctctgaaatggactacagttctgctgatacaactcagtttttactttagctctgggagttgtggaaaggtgctggtatgggccgcagaatacagcctttggatgaatatgaagacaatcctgaaagaacttgttcagagaggtcatgaggtgactgtactggcatcttcagcttccattctttttgatcccaacgactcatccactcttaaacttgaagtttatcctacatctttaactaaaactgaatttgagaatatcatcatgcaattggttaagagattgtcagaaattcaaaaagatacattttggttacctttttcacaagaacaagaaatcctgtgggcaattaatgacataattagaaacttctgtaaagatgtagtttcaaataagaaacttatgaaaaaactacaagagtcaagatttgacatcgtttttgcagatgcttatttaccctgtggtgagctgctggctgagctatttaacataccctttgtgtacagtcacagcttcagtcctggctactcatttgaaaggcacagtggaggatttattttccctccttcctacgtacctgttgttatgtcaaaattaagtgatcaaatgactttcatggagagggtaaaaaatatgctctatgtgctttattttgacttttggttccaaatatttaatatgaagaagtgggatcagttttacagtgaagttttaggaagacccactacattatctgagacaatgaggaaagctgacatatggcttatgcgaaactcctggaattttaaatttcctcatccattcttaccaaatgttgattttgttggaggactccactgcaaacctgccaaacccctacctaaggaaatggaggagtttgtacagagctctggagaaaatggtgttgtggtgttttctctggggtcaatggtcagtaacatgacagaagaaagggccaacgtaattgcaacagcccttgccaagatcccacaaaaggttctttgggagattttgatggggattaaaccagatgccttaggtctcaatactcgactgtacaagtggataccccagaatgaccttctaggtcatccaaaaaccagagcttttataactcatggtggagccaatggcatctatgaggcaatctaccatgggatccctatggtgggcattccatttgtttttgatcaacctgataatattgctcacatgaaggccaagggagcagctgttagagtggacttcaacacaatgtcgagtacagacctgctgaatgcactgaagacagtaattaatgatccttcatataaagagaatattatgaaattatcaagaattcaacatgatcaaccagtgaagcccctggatcgagcagtcttctggattgaatttgtcatgcgccacaaaggagccaaacatcttcgagttgcagcccacaacctcacctggttccagtaccactctttggatgtgattgggttcctgctggcttgtgtggcaaccgtgctatttatcatcacaaagtgttgtctgttttgtttctggaagtttgctagaaaaggaaagaagggaaaaagggattagttatatctgagatttgaagctggggaattccgtttattgaagattcaggttaacctgaatcaagttaacccagtctcaaatgctcacttatcctatctccttggcacaaatctctcctctcctggattgccaaagaaaattcaaattattcttcaattagtcaggatgatttgactatcagcagttcatagtacccatcttcataactaagccacctagggatccggcagaaaaaaaagggatgcaggggagtcatcatacagggggtggatcatttaccaggatccacacttcctacaaagcggttgtaatattaaataacaaaactgttttttattccaatcttcacataaaacaggaataattgtatactttcttactaatgtgttccatggagtttttcctccaagaagtggcttaggggaaaatgagccccagtaatgctctgtggcatccaatccttctaccccgaccctttgactttctgccccagcccctcttagttctcctagaattaggactaaggttaagtgccctcttgggatatgacttccttcccttcctcttgatacaaaaagagcctattaccaaccctcatacacacaagagttcccttcctagttgcagactcttctgctccagctggactcccctagctctggactcccactagatcacacaggggtccctgcatgtcagtaaactttggatgaccttgggagaccaaaaaatggaatatcattttttgatctaaacaaaatagtttcctgatttaacactggccaggaaggtgggctgcaccctcagtctctctctcccatcatggttttcacatgatatcaaaggactctcataacagtctgattcttatgagttgggcatcctgtgtttccctttagggcctgcttccttcaaatagaggagatgggtgctatgaaacctattcactctggacttgggatggctcttctccatcttcccaagtctgagctggagcctccatgcccaactctgctctgctcttctatttcctgacagcagctaaggcatgttcctgttctgcccccaaattgaccttactaacagtgagaacttggaggagtcttcgggtcttgggaaatccaagttttcccggaaacgttttgttgtaaacagtgtccacactctttgctccaataaagctcggttccttaagggaattc

SEQ ID NO: 5516 - DNA, 2111 bp, Homo sapiens
  SIMILAR (897)..(1622): 981254mologous to Homo sapiens UDP glucuronosyltransferase 2B4 precursor,accession number AF081793,Smith-Waterman Score=1270.
agcagcaactggaaaacaagcattgcattgcatcaggatgtctatgaaatggacttcagctcttctgctgatacagctgagctgttactttagctctgggagttgtggaaaggtgctggtgtggcccacagaattcagccactggatgaatataaagacaatcctggatgaacttgtccagagaggtcatgaggtgactgtattggcatcttcagcttccatttctttcgatcccaacagcccatctactcttaaatttgaagtttatcctgtatctttaactaaaactgagtttgaggatattatcaagcagctggttaagagatgggcagaacttccaaaagacacattttggtcatatttttcacaagtacaagaaatcatgtggacatttaatgacatacttagaaagttctgtaaggatatagtttcaaataagaaacttatgaagaaactacaggagtcaagatttgatgttgttcttgcagatgctgttttcccctttggtgagctgctggccgagttacttaaaataccctttgtctacaggcctcgcttctctcctggctacgcaattgaaaagcatagtggaggacttctgttccctccttcctatgtgcctgttgttatgtcagaactaagtgaccaaatgactttcatagagagggtaaaaaatatgatctatgtgctttattttgaattttggttccaaatatttgacatgaagaagtgggatcagttctacagtgaagttctaggaagacccactacgttatctgagacaatggcaaaagctgacatatggcttattcgaaactactgggattttcaatttcctcacccactcttaccaaatgttgagttcgttggaggactccactgcaaacctgccaaacccctaccgaaggaaatggaaggagtttgtccagagctctggagaaaatggtgttgtggtgttttctctggggtcgatggtcagtaacacgtcagaagaaagggccaatgtaattgcatcagcccttgccaagatcccacaaaaggttctgtggagatttgatgggaataaaccagatactttaggactcaatactcggctgtacaagtggataccccagaatgatcttcttggtcacccaaaaaccagagcttttataactcatggtggagccaatggcatctatgaggcaatctaccatggaatccctatggtgggcgttccattgcttgcagatcaacctgataacattgcacacatgaaggccaagggagcagctgttagtttggacttccacacaatgtcgagtacagacttactcaatgcactgaagacagtaattaatgatcctttatataaagagaatgctatgaaattatcaagaattcatcatgatcaaccagtgaagccccttgatcgagcagtcttctggattgaatttgtcatgcgccataaaggagccaagcaccttcgggttgcagcccacgacctcacctggttccagtaccactctttggatgtgactgggttcctgctggcctgtgtggcaactgtgatattcatcatcacaaaatgtctgttttgtgtctggaagtttgttagaacaggaaagaaggggaaaagagattaattacgtctgaggctggaagctgggaaacccaataaatgaactcctttagtttattacaacaagaagacgttgtgatacaagagattcctttcttcttgtgacaaaacatctttcaaaacttaccttgtcaagtcaaaatttgttttagtacctgtttaaccattagaaatatttcatgtcaaggaggaaaacattagggaaaacaaaaatgatataaagccatatgaggttatattgaaatgtattgagcttatattgaaatttattgttccaattcacaggttacatgaaaaaaaatttactaagcttaactacatgtcacacattgtacatggaaacaagaacattaagaagtccgactgacagtatcagtactgttttgcaaatactcagcatactttggatccatttcatgcaggattgtgttgttttaactgttgttgaggaagctaataaataattaaattgtaaaaaaaaaaaaaaaaa

SEQ ID NO: 5517 - DNA, 228 bp, Homo sapiens
  SIMILAR (88)..(207): 971254mologous to Homo sapiens glycine decarboxylase,accession number M64590,Smith-Waterman Score=206.
atggtggataagcacaaggagaacatagcagccatcatgattacatacccatccaccaatggggtgtttgaagagaacatcagtgaccggaatgaggatgcatgtcctgtgggaaccgtcagtgcggccccatggggctccagttccatcttgaccatttcttgggcttatatcaagatgatgggaggcaagggccttaaacaagcctacggaaagtgtcgatattaa

SEQ ID NO: 5518 - DNA, 3762 bp, Homo sapiens
  SIMILAR (151)..(3210): 821254mologous to Gallus gallus glycine decarboxylase,accession number M64402,Smith-Waterman Score=4496.
cccgcgagcgtccatccatctgtccggccgactgtccagcgaaaggggctccaggccgggcgcacgtcgacccgggggaccgaggccaggagaggggccaagagcgcggctgacccttgcgggccggggcaggggacggtggccgcggccatgcagtcctgtgccagggcgtgggggctgcgcctgggccgcggggtcgggggcggccgccgcctggctgggggatcggggccgtgctgggcgccgcggagccgggacagcagcagtggcggcggggacagcgccgcggctggggcctcgcgcctcctggagcgccttctgcccagacacgacgacttcgctcggaggcacatcggccctggggacaaagaccagagagagatgctgcagaccttggggctggcgagcattgatgaattgatcgagaagacggtccctgccaacatccgtttgaaaagacccttgaaaatggaagaccctgtttgtgaaaatgaaatccttgcaactctgcatgccatttcaagcaaaaaccagatctggagatcgtatattggcatgggctattataactgctcagtgccacagacgattttgcggaacttactggagaactcaggatggatcacccagtatactccataccagcctgaggtgtctcaggggaggctggagagtttactcaactaccagaccatggtgtgtgacatcacaggcctggacatggccaatgcatccctgctggatgaggggactgcagccgcagaggcactgcagctgtgctacagacacaacaagaggaggaaatttctcgttgatccccgttgccacccacagacaatagctgttgtccagactcgagccaaatatactggagtcctcactgagctgaagttaccctgtgaaatggacttcagtggaaaagatgtcagtggagtgttgttccagtacccagacacggaggggaaggtggaagactttacggaactcgtggagagagctcatcagagtgggagcctggcctgctgtgctactgaccttttagctttgtgcatcttgaggccacctggagaatttggggtagacatcgccctgggcagctcccagagatttggagtgccactgggctatgggggaccccatgcagcattttttgctgtccgagaaagcttggtgagaatgatgcctggaagaatggtgggggtaacaagagatgccactgggaaagaagtgtatcgtcttgctcttcaaaccagggagcaacacattcggagagacaaggctaccagcaacatctgtacagctcaggccctcttggcgaatatggctgccatgtttcgaatctaccatggttcccatgggctggagcatattgctaggagggtacataatgccactttgattttgtcagaaggtctcaagcgagcagggcatcaactccagcatgacctgttctttgataccttgaagattcattgtggctgctcagtgaaggaggtcttgggcagggcggctcagcggcagatcaattttcggctttttgaggatggcacacttggtatttctcttgatgaaacagtcaatgaaaaagatctggacgatttgttgtggatctttggttgtgagtcatctgcagaactggttgctgaaagcatgggagaggagtgcagaggtattccagggtctgtgttcaagaggaccagcccgttcctcacccatcaagtgttcaacagctaccactctgaaacaaacattgtccggtacatgaagaaactggaaaataaagacatttcccttgttcacagcatgattccactgggatcctgcaccatgaaactgaacagttcgtctgaactcgcacctatcacatggaaagaatttgcaaacatccacccctttgtgcctctggatcaagctcaaggatatcagcagcttttccgagagcttgagaaggatttgtgtgaactcacaggttatgaccaggtctgtttccagccaaacagcggagcccagggagaatatgctggactggccactatccgagcctacttaaaccagaaaggagaggggcacagaacggtttgcctcattccgaaatcagcacatgggaccaacccagcaagtgcccacatggcaggcatgaagattcagcctgtggaggtggataaatatgggaatatcgatgcagttcacctcaaggccatggtggataagcacaaggagaacctagcagctatcatgattacatacccatccaccaatggggtgtttgaagagaacatcagtgacgtgtgtgacctcatccatcaacatggaggacaggtctacctagacggggcaaatatgaatgctcaggtgggaatctgtcgccctggagacttcgggtctgatgtctcgcacctaaatcttcacaagaccttctgcattccccacggaggaggtggtcctggcatggggcccatcggagtgaagaaacatctcgccccgtttttgcccaatcatcccgtcatttcactaaagcggaatgaggatgcctgtcctgtgggaaccgtcagtgcggccccatggggctccagttccatcttgcccatttcctgggcttatatcaagatgatgggaggcaagggtcttaaacaagccacggaaactgcgatattaaatgccaactacatggccaagcgattagaaacacactacagaattcttttcaggggtgcaagaggttatgtgggtcatgaatttattttggacacgagacccttcaaaaagtctgcaaatattgaggctgtggatgtggccaagagactccaggattatggatttcacgcccctaccatgtcctggcctgtggcagggaccctcatggtggagcccactgagtcggaggacaaggcagagctggacagattctgtgatgccatgatcagcattcggcaggaaattgctgacattgaggagggccgcatcgaccccagggtcaatccgctgaagatgtctccacactccctgacctgcgttacatcttcccactgggaccggccttattccagagaggtggcagcattcccactccccttcatgaaaccagagaacaaattctggccaacgattgcccggattgatgacatatatggagatcagcacctggtttgtacctgcccacccatggaagtttatgagtctccattttctgaacaaaagagggcgtcttcttagtcctctctccctaagtttaaaggactgatttgatgcctctccccagagcatttgataagcaagaaagatttcatctcccaccccagcctcaagtaggagttttatatactgtgtatatctctgtaatctctgtcaaggtaaatgtaaatacagtagctggagggagtcgaagctgatggttggaagacggatttgctttggtattctgcttccacatgtgccagttgcctggattgggagccattttgtgttttgcgtagaaagttttaggaactttaacttttaatgtggcaagtttgcagatgtcatagaggctatcctggagacttaatagacatttttttgttccaaaagagtccatgtggactgtgccatctgtgggaaatcccagggcaaatgtttacattttgtataccctgaagaactctttttcctctaatatgcctaatctgtaatcacatttctgagtgttttcctctttttctgtgtgaggttttttttttttttaatctgcatttattagtattctaataaaagcattttgatcgg

SEQ ID NO: 5519 - DNA, 2443 bp, Homo sapiens
  SIMILAR (61)..(834): 1001254mologous to Homo sapiens eukaryotic translation initiation factor eIF3, p35 subunit,accession number U97670,Smith- Waterman Score=1330.
  misc_feature (1)...(2443): n = a,t,c or g
ctccgccgtgctaactcctcgctagctctccctctcacacacgctcacacccggctcgagatggcggcggcggcggcggcggcgggggactcggactcctgggacgccgacgctttctccgtggaagacccagtgcggaaggtggggggcggcggcactgccggcggggaccgctggggaggcgaggacgaggacgaggacgtcaaggataactgggatgacgatgatgatgaaaaaaaagaggaagcagaagtaaaaccagaggtaaaaatttcagaaaagaaaaaaatagcagagaagataaaagagaaagaacggcaacagaagaaaaggcaagaagaaattaaaaagaggttagaagaacccgaagaacctaaagtgctaacaccagaagaacaattagcagataaactgcggctaaagaaattacaggaagagtcagacctcgaattagcaaaggaaacttttggtgttaataatgcagtttatggaatagatgctatgaacccatcttcaagagatgactttacagagtttggaaagttactaaaagataaaattacacaatatgaaaagtcactatattatgccagttttttggaagtcttagttcgagatgtgtgtatttcattggaaattgatgacttgaaaaaaattaccaattcactgactgtgctttgcagtgaaaaacagaagcaagaaaagcaaagcaaagccaaaaagaagaagaaaggtgtggttcctggagggggattaaaagccaccatgaaagatgatctggcagattatggtggttatgatggaggatatgtacaagactatgaagacttcatgtgacattttatcttttcttggtgtcatctttatgttgcccacaatcccttgaacatgtagcacaacttcctttcctttcagttctgccaaatgctacaatcagaagtgcagtatcttttgtgctggttaaaattgggaacctaagttgctactaaatcatagttcaaaacctaataatgttgtcgttgttgctatctgatttcatagcagcagtcactaaattggaaacaaaaggttgcaacgtgacaaaaaaaattgtgtagtatttaccagcaccattcagtaatacagccttaaccatacctccttgaactacttcataacttgtcaagaaaagcagtttgcagcaagggcatgtggtgtgcacctagtattaaaattgctttgtcttaaaattgaacatgaggatattaaaaatacattgtgaagaatactgcttatctcagagtgaagatactgcggctgaaaagcactagtttgatataaaattaaaatgaccaaaaccctccaactttgaagctaaagaaggtaaacctttccattattgcattacatgttgtggaatctctcgagtgcaaagactgtctagttatttatcaggctatttctactgatgaactgcttcaggtgggggagggaaacttatttttatttgcctgatttaagtgtctgagaaacaaatctttgttctcttaggctgcaatggaacaactttaccagggttttggcatttcctttcctttcctttataaaacatgctcagcaaactgcaccagttaactacagtttggtaaattgttatgttaacaattatgacatctgcaatgttttataaagcaactaatttaataaaatcactgttgtgaggacttaaattttgtgttacctcccaatatatactttttgagagtatagaacacagctcttgggagtacagttctctacgttctctactaaatcttaataaatgcttggacatagttacagctttaaaacatgagtgatttgccaggtccttatgttgtcaccatagagcaacaaaggtatagggctgccttcctcttatttatttggggacattattttgttatttagataccaaggcctaattaattaagtacctataagaactatttatttggagtaactgagcctgtaactcaggtttatggctgttaagtatagattggggaatctttattatgtcttctcctaagcagtttaaccaaatgtgtggttagtgtttttttattcccctaagacagaaagaacaaaaaatgttttaaatttctcttatataggaaataataggaacgtcaaagctctgtatacctactaagtggaaaacaagaccatcatctaagtgatttgagaaattaacaaaagtagtgactacacagcaataattacagtaaattaaataaagattcctttaaggcagacaagggctaagatttccttagcagtaataatgacatacactgaattgaaaatctattttattacagaaagatcagtttctaacaaatgaaaatgtatcacctgttccttaactgtgtaaataataattaaatttctttgaaactggnnnnnnnnnnnnnnnnnnnnn

SEQ ID NO: 5520 - DNA, 477 bp, Homo sapiens
  SIMILAR (243)..(389): 951254mologous to Homo sapiens Epstein-Barr virus small RNA associated protein,accession number X59357,Smith-Waterman Score= 243.
ccatggctcctgtgaaaaagcttgtggtgaaggggggcaaaaaaaaagaagcaagttctgaagttcactcttgattgcacccaccctgtagaagatggaatcatggatgctgccaattttgagcagtttttgcaagaaaggatcaaagtgtaacggaaaagctgggaaccttggtggaggggtggtgaccatcgataggagcaagagcaagatcaccgtgacatccgaggtgcctttctccaaaaggtattttgaaatatctcaccaaaaaatatttgaagaagaataatctacgtgactggttgcgggtagttgctaacagcaaagagagttacgaattacgttacttccagattaaccaggacgaagaagaggaggaagacgaggattaaatttcatttatctggaaaattttgtatgagttcttgaataaaacttgggacccaaaaaaaaaaaaaaccaaaaaaaaaaaaaaaa

SEQ ID NO: 5521 - DNA, 1317 bp, Homo sapiens
  SIMILAR (500)..(775): 971254mologous to Homo sapiens eukaryotic translation initiation factor eIF3, p35 subunit,accession number U97670,Smith- Waterman Score=465.
atggcggcggcggcggcggcggcgggggactcggactcctgggacgccgacgctttctccgtggaagacccagtgcggaaggtggggggcggcggcactgccggcggggaccgctggggaggcgaggacgaggacgaggacgtcaaggataactgggatgacgatgatgatgaaaaaaaagaggaagcagaagtaaaaccagaggtaaaaatttcagaaaagaaaaaaatagcagagaagataaaagagaaagaacggcaacagaagaaaaggcaagaagaaattaaaaagaggttagaagaacccgaagaacctaaagtgctaacaccagaagaacaattagcagataaactgcggctaaagaaattacaggaagagtcagacctcgaattagcaaaggaaacttttggtgttaataatgcagtttatggaatagatgctatgaacccatcttcaagagatgactttacagagtttggaaagttactaaaagatattaattacacaatatgaggagtcactatattatgccaggtttttggaagtcttagttcgagatgtgtgtatttcattggaaattgatgacttgaaaaaaattaccaattcactgactgtgctttgcagtgaaaaacagaagcaagaaaagcaaagcaaagccaaaaagaagaagaaaggtgtggttcctggagggggattaaaagccaccatgaaagatgatctggcagattatggtggttatgatggaggatatgtacaagactatgaagacttcatgtgacattttatcttttctttggggggcatcttattgttgcccccaattcccttgaacatgtagcacaacttcctttcctttcagttctgccaaatgctacaatcagaagtgcagtatcttttgtgctggttatttaaccccttgacacttaggtgctaatgtgcaaatgagggaacttggatcttgctgccaaggggttaaaattgggaacctaagttgctactaaatcatagttcaaaacctaataatgttgtcgttgttgctatctgatttcatagcagcagtcactaaattggaaacaaaaggtttgcaacgtgacaaaaaaaattgtgtagtatttaccagcaccattcagtaatacagccttaaccatacctcccttgaactacttcataacttgtcaagaaaagcagtttgcagcaagggcatgtggtgtgcacctagtattaaaattgctttgtcttaaaattgaacatgaggatattaaaaatacattgtgaagaagactgcttatctcagagtgaagatactgcggctgaaaa

SEQ ID NO: 5522 - DNA, 900 bp, Homo sapiens
  SIMILAR (463)..(897): 591254mologous to Homo sapiens putative p150,accession number U93564,Smith-Waterman Score=413.
atgtctttgatgaacacagatgcaaacatcctcaacgaaatactagcaaatgaatccaatagcttgacaaaaagaagtacaaaggatgcctggctttttcctccagaattgacgagccttgtcaggagcagggaggagagcgaggcccaactggagcaggcaagattacagagaggtcacttattactcaaacaaggaaaacttgatgaagcagaagatgattttaaaaaagtgagtacatacgatagaagttctccgtatatttatacagcaggctactgcaatgcaactatttatgtttcacctgacatcccaacaggggcattctttgattctctaatttgtcgaaatcagagacatagggctacatgcttctggggtaaagagactctgcccccaccctcaaggagcccatctgtctctgccccattgctcagctgtgtgatagggacaacaggaagaggccacaaaacaagtctcaataaatttaagaaagtcgagatcatatcaagtatcttctcagacaacagtggaataaaattagaaatcagctcccaaaggaactgtaaacactatacaaatacatggaaattaaataatctgctcctgaatgatttggggattaataatgaaatcaagatggaaattcaaagattctttgaaatgaatggtaatagtgacacaagttatcaaaacctctggaatacaacaaaagcagtgctaagaggaaaagtcatagcatcaaatgcctacatcagaaagtctgaaagagcacaaatagacaacctcaaggaactagagaaacaggaacaaactaaacccaaagccattgaaagaaaagaaatcacaaagatcagagcagaactaaatgaaattgaaacaaacaaaaaagaacaatga

SEQ ID NO: 5523 - DNA, 2661 bp, Homo sapiens
  SIMILAR (1)..(2658): 1001254mologous to Homo sapiens transcription factor IIIC102,accession number AF133123,Smith-Waterman Score=4551.
atgtcagggttcagtccggaactcatcgactacttggaagggaaaatctcctttgaggagttcgaacggcggagagaagagagaaaaacccgcgagaagaaaagtcttcaggaaaaaggcaagttatcagctgaagaaaatcccgatgactctgaagttccatcatcatcaggaattaactctaccaaatcccaagacaaagatgtcaatgaaggagaaacatcagatggagtgaggaagtcagttcacaaggtctttgcttccatgcttggagagaatgaagatgatgaggaggaagaggaagaagaggaggaggaggaggaggaggaagaaacacctgagcaacccactgcgggcgatgtatttgtattggagatggttctcaatcgtgaaaccaagaaaatgatgaaagagaaaaggcctcggagtaaacttcccagagctctgagaggtctcatgggtgaagccaacattcgttttgctcgaggagaacgtgaagaggcgatattgatgtgcatggaaatcataagacaagctcctctggcttatgagccattctctactctagccatgatatatgaggaccaaggtgacatggaaaaatcattgcagtttgagttgattgctgcgcatttaaatcccagtgacacagaagaatgggttagactggcagaaatgtctctggaacaagacaatattaagcaggctattttttgctatacaaaagctcttaaatatgaacctactaatgtccgttatctgtgggagcgatcaagcctttatgaacagatgggtgatcataaaatggccatggatggttataggcgtattttaaaccttttgtctccatctgatggcgaacgttttatgcagctggctagagatatggcaaagagttactatgaagccaatgatgttacttctgctattaacataattgatgaagctttctcaaagcaccagggcctagtctccatggaagatgttaacatagcagctgaactatatatttctaacaaacagtatgacaaagctttggagataattacagatttttctggaattgtgctggaaaaaaaaacttcagaagaaggcacctcagaagagaataaagctcctgagaatgttacctgcactatacctgatggcgtgccaatagatatcacagtgaagttgatggtctgccttgtacatctcaacattcttgaaccacttaatcctctcttgacaacactagtagaacagaatcctgaagatatgggagacctatacctagatgttgctgaagcttttctggatgttggtgaatataattctgcacttcccctcctcagtgctcttgtttgctctgaaagatacaaccttgcagtagtttggcttcgtcatgcagaatgtttaaaggccttaggctatatggagcgagctgctgaaagctatggcaaggtggttgatctggccccactccatttggatgcaaggatttcactttctacccttcagcagcagctgggccagcctgagaaagctctggaagctctggaaccaatgtatgatccagatactttagcacaggatgcaaatgctgcacagcaggaactgaagttattgcttcatcgttctactctgttgttttcacaaggcaaaatgtatggttatgtggataccttacttactatgttagccatgcttttaaaggtagcaatgaatcgagcccaagtttgtttgatatccagttccaagtctggagagaggcatctttatcttattaaagtatcgagagacaaaatatcagacagcaatgaccaagagtcagcaaattgtgatgcaaaagcaatatttgctgtgctcacaagcgtcttgacaaaggatgactggtggaatcttctgttgaaggccatatactccttatgtgacctatcccgatttcaagaggctgagttgcttgtagattcctcattggaatattactcattttatgatgacaggcaaaaacgcaaagaactagaatactttggtctgtctgctgcaattctggacaaaaatttcagaaaggcatacaactatatcaggataatggtaatggaaaatgtcaataaaccccagctctggaacattttcaatcaagttaccatgcactcccaagatgtacgacatcatcgcttctgtctccgtttgatgctgaaaaacccagaaaatcatgccctatgtgtcttaaatggacacaatgcatttgtatctggtagttttaagcatgcgcttggacagtatgtgcaagcctttcgcactcaccctgacgaacctctctatagcttctgtataggcctaacctttattcatatggcatctcagaagtatgtgttacggagacatgctcttattgtacagggcttttcctttcttaatcgatacctcagtttacgtgggccctgccaggaatcattctacaatttgggccgtggccttcatcagttggggctgattcatcttgcaatccactattatcagaaggccctggagctccctccacttgtggtagagggtatagaacttgaccagttagacttacgaagagatattgcctacaacttgtctctcatctatcagagcagtgggaataccggaatggctcaaacgcttttgtatacctattgttctatataa

SEQ ID NO: 5524 - DNA, 444 bp, Homo sapiens
  SIMILAR (1)..(252): 861254mologous to Homo sapiens transcription factor IIIC102,accession number AF133123,Smith-Waterman Score=359.
atggtggatcaaaacaaacaaaagtgtggttataggcgtattgtaaacctggtgtctccatctgatggcgaacgtgctatgcagctggctagagatatggcaaagagttactatgaagccaatgatgttacttctgctattaacataattgatgaagctttctcaaaacaccagggcctagtctccatggaagatgttaacatagcagctgaactatatatttctaacaaacagtttgacaaagctttggaggcaggaatgcttatgtgtgtctgtgtaaaggtttgcatgtgtagctgtgttctggaaattgttaaaaattggcagctcttcgttgtagatggctgcacacagtccataggagattcccgaagagaacagggagaattctacagcatacaggaagacagggcctctaatttgtccatgggcttgtcactttaa

SEQ ID NO: 5525 - DNA, 428 bp, Homo sapiens
  SIMILAR (3)..(83): 1001254mologous to Homo sapiens serine/threonine protein phosphatase catalytic subunit,accession number AF035158,Smith- Waterman Score=150.
atgagtgccaaaccaaatatggaaatgctaatgcctggagatactgtaccaaagtttttgacatgctcacagtagcagctcttcccgagcgagccctgcggccgccggagcagctcccgcggcggagcaggagccggatggtcagaggagcccggcagccccagcagccgcggagtcgcctggcccccagactgactggcacagtggagaaaccgcctcgaaaacggagaagcagcaaatctcccattgctgctttgaacccttctatgtggaggtgctcaggctcctactttccctgccagtcctccaccctcatgggtgccctcctcctcctccacactcggccttcaacatcctgtgcaagctggctctgcctgcgaatggcctcctcacgtagcttatattccgacaaccatgcagaaaattaa

SEQ ID NO: 5526 - DNA, 953 bp, Homo sapiens
  SIMILAR (22)..(396): 1001254mologous to Homo sapiens protein phosphatase 6,accession number X92972,Smith-Waterman Score=677.
ccgcggcttgttcttcttaaaatggcgccgctagacctggacaagtatgtggaaatagcgcggctgtgcaagtacctgccagagaacgacctgaagcggctatgtgactacgtttgtgacctcctcttagaagagtcaaatgttcagccagtatcaacaccagtaacagtgtgtggagatatccatggacagttttatgacctttgtgaactgttcagaactggaggtcaggttcctgacacaaactacatatttatgggtgattttgtagacagaggttactatagtttggagaccttcacttaccttcttgcattaaaggctaaatggcctgatcgtattacacttttgcgaggaaatcatgagagtagacagataacacaggtctatggattcctatgatgactgcctgaccaaatatggataatgctaatgcctggagatactgtaccaaagtttttgacatgctcacagtagcagctttaatagatgagcagattttgtgtgtccatggaggtttatctcctgatatcaaaacactgggatccaaattcgaaccatcgaacggaatcaggaaattcctcataaaggagcatttttgtgatctgggtttggtcagaatcctgaagatgtggataccctgggctatcaagtccccgaggagcaggttggctttttggagcaaagggtcacaaattgagtttggttcataatcaaccaacttaaaactcatctgcagagcacatcaactagtgcacgaaggctataaatttatgtttgatgagaagctggtgacagtatggtctgctcctaattactgctatcgttgtggaaatattgcttcgatcatggtcttcaaagatgtaaatacaagagaaccaaagttattccgggcagttccagattcagaacgtgttattcctcccagaacgacaacgccatatttcctttga

SEQ ID NO: 5527 - DNA, 588 bp, Homo sapiens
  SIMILAR (120)..(587): 891254mologous to Homo sapiens breast cancer nuclear receptor -binding auxiliary protein,accession number AF126008,Smith-Waterman Score=719.
tcgctcaaagctgctgagctctgccctgacggcatgcgcccccgcttctgtgagagcacgcttcctggcatgggggtcgaatcatgtcgataaaatgggctcggtttcatgaagtaccccacataacagtgagattcataggaccaaagcatggggaggaaaaggaaaaagaaaaagataagattaaggagaaggagaaagattctaaagacaaggagaaagataagaagactgtcaacgggcacactttcagttccattcctgttgtgggtcccatcagctgtagccagtgtatgaagcccttcaccaacaaagatgcctatacttgtgcaaattgcagtgcttttgtccacaaaggctgccgagaaagtctagcctcctgtgcaaaggtcaaaatgaagcagcccaaagggagccttcaggcacatgacacatcatcactgcccacggtcattatgagaaacaagccctcacagcccaaggagcgtcctcggtccgcagtccttctggtggatgaaaccgctaccaccccaatattttgcaatagacgatccccacagagtgtctcgctcttcaaagtggcttctt

SEQ ID NO: 5528 - DNA, 4290 bp, Homo sapiens
  SIMILAR (1)..(4287): 1001254mologous to Homo sapiens breast cancer nuclear receptor-binding auxiliary protein,accession number AF126008,Smith- Waterman Score=7304.
atgttgtatataaaccgagaaaactggtgtacaatagagccatgccctgatgcagcatctcttctggcttccaagcagagcccagaatgtgagaacttcctggatgttggactgggcagagagtgtacctcaaaacaaggtgtacttaaaagagaatctgggagtgattctgacctctttcactcacccagtgatgacatggacagcatcatcttcccaaagccagaggaagagcatttggcctgtgatatcaccggatccagttcatccaccgatgacacggcttcactggaccgacattcttctcatggcagtgatgtgtctctctcccagattttaaagccaaacaggtcaagagatcggcaaagccttgatggattctacagccatgggatgggagctgagggtcgagaaagtgagagtgagcctgctgacccaggcgacgtggaggaggaggagatggacagtatcactgaagtgcctgcaaactgctctgtcctaaggagctccatgcgctctctttctcccttccggaggcacagctgggggcctgggaaaaatgcagccagcgatgcagaaatgaaccaccggagttcaatgcgagttcttggggatgttgtcaggagacctcccattcataggagaagtttcagtctagaaggcttgacaggaggagctggtgtcggaaacaagccatcctcatctctagaagtaagctctgcaaatgccgaagagctcagacacccattcagtggtgaggaacgggttgactctttggtgtcactttcagaagaggatctggagtcagaccagagagaacataggatgtttgatcagcagatatgtcacagatctaagcagcagggatttaattactgtacatcagccatttcctctccattgacaaaatccatctcattaatgacaatcagccatcctggattggacaattcacggcccttccacagtaccttccacaataccagtgctaatctgactgagagtataacagaagagaactataatttcctgccacatagcccctccaagaaagattctgaatggaagagtggaacaaaagtcagtcgtacattcagctacatcaagaataaaatgtctagcagcaagaagagcaaagaaaaggaaaaagaaaaagataagattaaggagaaggagaaagattctaaagacaaggagaaagataagaagactgtcaacgggcacactttcagttccattcctgttgtgggtcccatcagctgtagccagtgtatgaagcccttcaccaacaaagatgcctatacttgtgcaaattgcagtgcttttgtccacaaaggctgccgagaaagtctagcctcctgtgcaaaggtcaaaatgaagcagcccaaagggagccttcaggcacatgacacatcatcactgcccacggtcattatgagaaacaagccctcacagcccaaggagcgtcctcggtccgcagtcctcctggtggatgaaaccgctaccaccccaatatttgccaatagacgatcccagcagagtgtctcgctctccaaaagtgtctccatacagaacattactggagttggcaatgatgagaacatgtcaaacacctggaaattcctgtctcattcaacagactcactaaataaaatcagcaaggtcaatgagtcaacagaatcacttactgatgagggagtaggtacagacatgaatgaaggacaactactgggagactttgagattgagtccaaacagctggaagcagagtcttggagtcggataatagacagcaagtttctaaaacagcaaaagaaagatgtggtcaaacggcaagaagtaatatatgagttgatgcagacagagtttcatcatgtccgcactctcaagatcatgagtggtgtgtacagccaggggatgatggcggatctgctttttgagcagcagatggatgaaaagctgttcccctgtttggatgagctgatcagtatccatagccaattcttccagaggattctggagcggaagaaggagtctctggtggataaaagtgaaaagaactttctcatcaagaggataggggatgtgcttgtaaatcagttttcaggtgagaatgcagaacgtttaaagaagacatatggcaagttttgtgggcaacataaccagtctgtaaactacttcaaagacctttatgccaaggataagcgttttcaagcctttgtaaagaagaagatgagcagttcagttgttagaaggcttggaattccagagtgcatattgcttgtaactcagcggattaccaagtacccagttttattccaaagaatattgcagtgtaccaaagacaatgaagtggagcaggaagatctagcacagtccttgagcctggtgaaggatgtgattggagctgtagacagcaaagtggcaagttatgaaaagaaagtgcgtctcaatgagatttatacaaagacagatagcaagtcaatcatgaggatgaagagtggtcagatgtttgccaaggaagatttgaaacggaagaagcttgtacgtgatgggagtgtgtttctgaagaatgcagcaggaaggttgaaagaggttcaagcagttcttctcactgacattttagttttccttcaagaaaaagaccagaagtacatctttgcatcattggaccagaagtcaacagtgatctctttaaagaagctgattgtgagagaagtggcacatgaggagaaaggtttattcctgatcagcatggggatgacagatccagagatggtagaagtccatgccagctccaaagaggaacgaaacagctggattcagatcattcaggacacaatcaacaccctgaacagagatgaagatgaaggaattcctagtgagaatgaggaagaaaagaaaatgttggacaccagagcccgagaattaaaagaacaacttcaccagaaggaccaaaaaatcctactcttgttggaagagaaggagatgattttccgggacatggctgagtgcagcacccctctcccagaggattgctccccaacacatagccctagagttctcttccgctccaacacagaagaggctctcaaaggaggacctttaatgaaaagtgcaataaatgaggtggagatccttcagggtttggtgagtggaaatctgggaggcacacttgggccgactgtcagcagccccattgagcaagatgtggtcagtcccgtttccctgccccggagagcagagacctttggaggatttgacagccatcagatgaatgcttcaaaaggaggcgagaaggaagagggaggtgatggccaagatcttaggagaacggaatcagatagtggcctaaaaaagggtggaaatgctaacctggtatttatgcttaaaagaaacagtgagcaggttgtccagagcgttgttcatctctacgagctcctcagcgctctgcagggtgtggtgctgcagcaggacagctacattgaggaccagaaactggtgctgagcgagagggcgctcactcgcagcttgtcccgcccgagctccctcattgagcaggagaagcagcgcagcctggagaagcagcgccaggacctggccaacctgcagaagcagcaggcccagtacctcgaggagaagcgcaggcgcgagcgtgagtgggaagctcgtgagagggagctgcgggacgggaggccctcctggcccagcgcgaggaggaggtgcagcaggggcagcaggacctggaaaaggagcgggaggagctccagcagaagaagggcacatagccagtatgacctggagcgactgcgtgctgcccagaaacagcttgagagggaacaggagcacgtgcgccgggaggcagagcggctcagccagcggcagacagaacgggacctgtgtcaggtttcccatccacataccaagctgatgaggatcccatcgttcttccccagtcctgaggagcccccctcgccatctgcaccttccatagccaaatcagggtcattggactcagaactttcagtgtccccaaaaaggaacagcatctctcggacacacaaagataaggggccttttcacatactgagttcaaccagccagacaaacaaaggaccagaagggcagagccaggcccctgcgtccacctctgcctctacccgcctgtttgggttaacaaagccaaaggaaaagaaggagaaaaaaaagaagaacaaaaccagccgctctcagcccggtgatggtcccgcgtcagaagtatcagcagagggtgaagagatcttctgctga

SEQ ID NO: 5529 - DNA, 510 bp, Homo sapiens
  SIMILAR (258)..(359): 371254mologous to Homo sapiens breast cancer nuclear receptor -binding auxiliary protein,accession number AF126008,Smith-Waterman Score=42.
atgtgggaacttgtattaagtgtgacccagtatcagtccttcaatttggaagcaggctatatgaaggaaaaggaaaaagaaaaagataagattaaggagaaggagaaagattctaaagacaaggagaaagataagaagactgtcaacgggcacactttcagttccattcctgttgtgggtcccatcagctgtagccagtgtatgaagcccttcaccaacaaagatgcctatacttgtgcaatgagacgggcacaactgatgtgccttcagcgcctggcccctcagaaagtcgcagcagcggtcaccctggttgtgccccagcagcgaaaatgctggttgatgagacacacacagtaccgtgacgcacgtctgattgtagtccgcaccagttctcgagcattatacatcgaggcctcgagccgcgagcaaaatagatccagtagcgagtgcctctgccgcgtgatagcgctctcacactgcctgcgcagcagggaaagagacctgcactaa

SEQ ID NO: 5530 - DNA, 1419 bp, Homo sapiens
  SIMILAR (517)..(705): 931254mologous to Homo sapiens Beta-1 integrin modulator B171,accession number W19771,Smith-Waterman Score=304.
atggtaagagaaagcatccactcttgtgatgggacggaattatgcaaagtagaaaaggtttgtcaggacctgtctccagaaaggatcaagcagaatgcattgaccaagaagatggaatttgaacatctacagaattctgccgattcggagccaccatcaaacaggattttctcctgctgcgcaaaaccagcgtggaccgcttgctccaactctctcacggccatgcgacggtggcaatccgctgctgacctgctcactggaaccactactgccgatgatacgcaactcgcgctcgatgctcggtctacacttcgggatgctggagaagtgcttgtcaagacacagcgaactctcgagccgccagtgtcgaaaaacaaacaggagaaaaaggtgagaagggccaaagaaattttacacaatgggcagaacttctgtcggagaagatatcaagggtgtagagatcttccagaaaagggaaaacccattgtagaagaaagggaaacaggccttggaagggcaggctctgggaatgtgctgaaggtgcagcagctgctccacgtttgcagcgaacactttgactccaaagagaaggaggaagacaaaggcaagaaggaaaagaaggacaaggacaaaaaggaaacccctgctgacatgggagcacatcagggagtggctgttctggggattgcccttattgctgcaggctctgggaatgtgctgaaggtgcagcagctgctccacgtttgcagcgaacactttgactccaaagagaaggaggaagacaaaggcaagaaggaaaagaaggacaaggacaaaaaggaaacccctgctgacatgggagcacatcagggagtggctgttctggggattgcccttattgcttgtgttgtgcgcgtgctcgtcgtctttgctcggataagtagagtcctcagcgaatcacgtgctttagaccgaaatcaccggtgctgtcccgtgactgcgagcacgctcttcgtatatgttcggtccgtaatgccactgccagctcggggatgtacgagagctagcagcatacttatgtcgcgttctatcgatgctgctaaaacgaaccactggggtccatggagtatctcggggatgccctgtcattacctagtcgcaggggtagagtaccttcctccttatcgggtcctgtacactaatatccaatcgggttttagaggacgagttaggctacatgtcctggctagtggagtcggttcgcccataccaacagttgttatcggaggcttatcacatttctcctgtctcagaagagggggagaagtagatattccctctccagatataaagcacttggttcacactctagcccagccagaagctgtgtccctggtgatccttctgttcacagaacttactcactacattgcctattag

SEQ ID NO: 5531 - DNA, 841 bp, Homo sapiens
  SIMILAR (617)..(841): 1001254mologous to Homo sapiens 55.11 protein,accession number X86446,Smith-Waterman Score=375.
attctgctgtgggatgtggatggtggcctcacccagattgacaagtacctgtactcctctgaggactacattaagtcaggagctcttcttgcctgtggcatagtgaactctggggtccggaatgagtgtgaccctgctctggcactgctctcagactatgttctccacaacagcaacaccatgagacttggttccatctttgggctaggcttggcttatgctggctcaaatcgtgaagatgtcctaacactgctgctgcctgtgatgggagattcaaagtccagcatggaggtggcaggtgtcacagctttagcctgtggaatgatagcagtagggtcctgcaatggagatgtaacttccactatccttcagaccatcatggagaagtcagagactgagctcaaggatacttatgctcgttggcttcctcttggactgggtctcaaccacctggggaagggtgaggccatcgaggcaatcctggctgcactggaggttgtgtcagagccattccgcagttttgccaacacactggtggatgtgtgtgcatatgcaggctctgggaatgtgctgaaggtgcagcagctgctccacatttgtagcgaacactttgacttccaaagagaaggaggaagacaaagacaagaaggaaaagaaagacaaggacaagaaggaagcccctgctgacatgggagcacatcagggagtggctgttctggggattgcccttattgctatgggggaggagattggtgcagagatggcattacgaacctttggccacttgctgagatatggggagcctacactccggagggctgtacctttagcactggccctg

SEQ ID NO: 5532 - DNA, 433 bp, Homo sapiens
  SIMILAR (109)..(387): 961254mologous to Homo sapiens prolidase,accession number J04605,Smith-Waterman Score=443.
ggcgttcggtgtcactgagccaggctgctatggtgtcatcgatgttgacactgggaagtcgaccctgtttgtgcccaggcttcctgccagccatgccacctggatgggaaaattgccagcgtcctgacgtcacagaagccctctgtcctcctcactttgcgtggcgtcaacacggacagcggcagtgtctgcagggaggcctcctttgacggcatcagcaagttcgaagtcaacaataccattcttcacccagagatcgttgagtgccgagtgtttaagacggatatggagctggaggttctgcgctataccaataaaatctccagcgaggcccaccgtgaggtaatgaaggctgtaaaagtgggaatgaaagaatatgagttggaaaggtaagccaccatgtttctccgggtaaaattaaaaggtaaaaaac

SEQ ID NO: 5533 - DNA, 1933 bp, Homo sapiens
  SIMILAR (1049)..(1540): 981254mologous to Homo sapiens prolidase,accession number J04605,Smith-Waterman Score=841.
gggggcacttcacgtgacgccggtgccgggcgaacatggcggcggccaccggaccctcgttttggctggggaatgaaaccctgaaggtgccgctggcgctctttgccttgaaccggcagcgcctgtgtgagcggctgcggaagaaccctgctgtgcaggccggctccatcgtggtcctgcagggcggggaggagactcagcgctactgcaccgacaccggggtcctcttccgccaggagtccttctttcactgggcgttcggtgtcactgagccaggctgctatggtgtcatcgatgttgacactgggaagtcgaccctgtttgtgcccaggcttcctgccagccatgccacctggatgggaaagatccattccaaggagcacttcaaggagaagtatgccgtggacgacgtccagtacgtagatgagattgccagcgtcctgacgtcacagaagccctctgtcctcctcactttgcgtggcgtcaacacggacagcggcagtgtctgcagggaggcctcctttgacggcatcagcaagttcgaagtcaacaataccattcttcacccagagatcgttgagtgccgagtgtttaagacggaatatggagctgggaggttctgcgctataccaataaaatctccagcggaggcccaccgtgaggtaaatgaaggctgttaaaagtggggaatggaaagaatatggagttgggaaagcctctttcgagcactactggttactcccgggggcggcatgcgccacagcttcctacacctggcattttgcgggcagttggttgaggaacttcagccgtgcttacatttacgggacacggccggagctcccaacgaccgaacgatccagaatggggatatgtgcctgttcgacatgggcggtgagtattactctgtcgcttccgacatcacctgctcctttccccgcaacggcaagttcactgcagaccaagaaggccgtctatgaagcagtgctgctgagctcccgtgccgtcatgggtgccatgaagccaggtgactggtggcctgacatgcaaccgcctggcttaccgcatccacctggaggagctggcccacatgggcatcctgagcggcagcgtggacgccatggtccaggctcacctgggggccgtgtttatgcctcacgggcttggccacttcctgggcattgacgtgcacgacgtgggaggctacccagagggcgtggagcgcatcgacgagcccggcctgcggagcctgcgcactgcacggcacctgcagccaggcatggtgctcaccgtggagccgggcatctacttcatcgaccacctcctggatgaggccctggcggacccggcccgcgcctccttccttaaccgcgaggtcctgcagcgctttcgcggttttggcggggtccgcatcgaggaggacgtcgtggtgatcgacagcggcatagagctgctgacctgcgtgccccgcactgtggaagagattgaagcatgcatggcaggctgtgacaaggcctttacccccttctctggccccaagtagagccagccagaaatcccagcgcacctgggggcctggccttgcaacctcttttcgtgatgggcagcctgctggtcagcactccagtagcgagagacggcacccagaatcagatcccagcttcggcatttgatcagaccaaacagtgctgtttcccggggaggaaacacttttttaattacccttttgcaggcaccacctttaatctgttttataccttgcttattaaatgagcgacttaaaatgattgaaaataatgctgtcctttagtagcaagtaaaatgtgtcttgctgtcatttatattccttttcccaggaaagaagcatttctgatactttctgtcaaaaatcaatatgcagaatggcatttgcaataaaaggtttcctaaaatg

SEQ ID NO: 5534 - DNA, 380 bp, Homo sapiens; identical to SEQ ID NO: 3705
  SIMILAR (28)..(96): 691254mologous to Homo sapiens Human secreted protein, SEQ ID NO: 8172,accession number G04091,Smith-Waterman Score=86.
  misc_feature (1)...(380): n = a,t,c or g

SEQ ID NO: 5535 - DNA, 813 bp, Homo sapiens
  SIMILAR (259)..(555): 731254mologous to Homo sapiens putative p150,accession number U93564,Smith-Waterman Score=379.
atgcctatcaataccacttgggggcattcaggtctgcacaccttgaagcttgctcacattctgcctgaagggtctattctggccttaggagtaggagaagccagcagtatgggaaagttaatgccccagaaacagctctcagccaaaggtgaatggaggggagtagataaatacccccaccttcttcacccctctgtttgggtaactccagatggctgccagaattcctcagcaagacagaccttcagctgcccagggagatggattaaggacttaaatctaagacctgaaactataaaaattccagaagataacactggaaaaacccttctagacattggcttaggcaaggatttcatgaccaagagcccaaaagcaaatgcaataaaaacaaagataaatatctgggacctaattaaactaaagagcttttgcatggcaaaaagaacagtcagcagagtaaacagacaacccacagagtgggagaaaatcttcacaatctacacatctgacaaaacactaatatccagaatctacaacgaactcaaacaaattgagtctctcactctgtcatccaagctggagttcagtggtgtgatcccagctcactgcaatctccatctcccgggttcaagagattcttgtgcccaggcaggcactgaaattgggtatggtcccgagaggaaaattagttctaaagaacatccctgtggagcaaggaggatgcggtattatcatccccagaatacagatatggaaacttcagctcaaactcagcatcatatagggagtcataagttatcaaagcactaa

SEQ ID NO: 5536 - DNA, 1761 bp, Homo sapiens
  SIMILAR (1)..(855): 671254mologous to Homo sapiens unknown protein,accession number M22334,Smith-Waterman Score=1030.
atgctgaaagaaatcatagatgacacaaacaaatggaaacacatcccatgctcatggatgggcagaatcagtattgtgaaaatgaccatactgccaaaagcaatctacaaattcaatgcagttctcatcaaaataccaccatcattcttcacagaattagaaaaaacaattctaaaattcctatgcaatgaaaaaagagccagcagagcaaaagcaagactaaacaaaaagaacaaatctggaggcatcacattacttgatttcaaacgatactatagtgccatagtcaccaaaacagtgtggtactggtataaaaataggcacatacaccaacggaacagaatagagaacccagaaataaacccaaatacttacagccaactgatcttcaacaaagcaaacaaaaatataaagtggggaaatgacacccttttcagcaaatggtgctgggataattggctagccacatgtaggagaatgaaactggatcctcatctctcacctcatacaaaaatcaactcaagatggatcaaggacttaatcctaagacctgaaactacaaaaattctagaagataacattggaaaaacccttctagacgttggcttaggcaaggatttcatgaccaagaacccaaaagcaaatgcaagaaaagcaaagataaatatctgggacctgattaaactaaagagctttttcacagcaaaaggaacagtcagcagagtaaacaggcaacccacagagtgggagaaaatcttcataatccatacatctgacgaaggactactaatatccagaatctacaacgaactcaaacaaatcagtaagaaaaaaaacaaacaatcccatcaaaaagtgggctaaggacatgaatagacaattctcaaaagaagatgtacaaatggccaacaaatatatgaaaaaatgctcaacatcactaattgcaaatttgatttgcagggaaatgcaaatcaaaaccacaatgcaataccatcttactcctgcaagaatggccataatcaaaaaatcaaaaatcagtagatgttggcatggatgtggtgatcagggaacacttctacactgctggtgggaatgtaaactagtacagccactatggaaaacagtgtggagattccttaaagaactaaaagtagaactaccatttgatccagcaatcccactactgggtacccacccagaggaaaagaagtcattatgcaaaaaagatacttgcacatgcatgcttctagcagcacaattcacaattgcaaaatcgtggaaccaacccaaatgcccatcagtcaacgagtggataaagaaactgtgccctcggtggttgctgtcaaaatgggcaagtgcatgaaacctgggaaagtggtgctggtcctggccagcagtattctggctgaacacaaagctgtcatcgtaaagaacattaatgatggcacctcagactgcccctacatccaagctctcgtggttggaattgatcgctatccctgcaaagtgacagctgccatgggcaaaaagaagattaccaggaggtcaaagatcgagtcttttgtgaaggtttataactacaatcatcttacgcctacagtgcactctgtggatatcctcttacacaaaactgtcatccacaaggatgtcttcagagatcctgctcttaaacacaaggcccaatgggaggccaaggtcaagctcaaagagagatacaaaacgggcaagaacaagcagttcttccagaagctacagttttag

SEQ ID NO: 5537 - DNA, 1727 bp, Homo sapiens; identical to SEQ ID NO: 763
  SIMILAR (656)..(868): 501254mologous to Drosophila melanogaster CG13139 gene product,accession number AE003628,Smith-Waterman Score=185.

SEQ ID NO: 5538 - DNA, 429 bp, Homo sapiens
  SIMILAR (13)..(429): 991254mologous to Homo sapiens 39 kDa encoded by N33,accession number U42349,Smith-Waterman Score=715.
cggacgcgtggggacagaacggatgttcatattcgggttttcagaccacccaactactctggtaccattgctttggccctgttagtgtcgcttgttggaggtttgctttatttgagaaggaacaacttggagttcatctataacaagactggttgggccatggtgtctctgtgtatagtctttgctatgacttctggccagatgtggaaccatatccgtggacctccatatgctcataagaacccacacaatggacaagtgagctacattcatgggagcagccaggctcagtttgtggcagaatcacacattattctggtactgaatgccgctatcaccatggggatggttcttctaaatgaagcagcaacttcgaaaggcgatgttggaaaaagacggataatttgcctagtgggattgggccctgtg

SEQ ID NO: 5539 - DNA, 1152 bp, Homo sapiens
  SIMILAR (71)..(193): 361254mologous to Homo sapiens Human secreted protein, SEQ ID NO: 4506,accession number G00425,Smith-Waterman Score=66.
atggatctctcttctaaggaaaggagtcacgacaatgaagaaacaaacaggctgcgttgtgccaggcaagctattggtaagagttttctggaatcacctactgccctgttcttggagagcttgcattccttggtataccagtcctctctgctgggggcaaaatatacagagaggaagctcctgctcctggaggtgaagattcttccaatccacttttcatcttgcattccagattttgaacagttgtcattgatgaggtctcagtgtgagtccaatcttctctctggcactagaagacagttcagaagtaaacgagcaaagcacgtcactagcgttcaacatcatttacttgatcacagagtatctggttttacaggacgcatgatggtgacaactgcttggcttctagaaggcctcaggaaggttacaatcatggcagaagaatttaaagaaagtgctatttgtgaccatctggcaagctgtcattcactaactgctgatgaaacacgcctgagaaaagatccactatgctggctgttgccggcaattgcaatcagatatgatgtagtgaccacctgtcagtcacagcatgactctggggaactcgtatctgtttgctccaaactggaccattacaccggcttgggtaacaccctggaccccagtgaaggatttggctggcaagcgtctctctctctaccttcccatcagcagtttgagcacacatgtcctgaatggctcccaacttacagctggccctgcaaagtaggccctgactacctctctgagatctgtcagccagaatgcaaacaacatttccaagaatccttgactgaatcttccaaacagaacatttatgaaacctgtgctatatatgtgtcaagccctggagaaagaattctgaaccagagatttgggccccatggagcttttattctggtgagagagtatgatgatatacgtttctcacattctgggccaccaagcacctgccctaatttccctggtcccagttactacacagctagagagagtgcctatgccctgaagctcagagccctggaaattattcaaattagccagtccacaaagatgcagagaaacctagggaaccccatactacctgccatacatcagcagcccccacagtag

SEQ ID NO: 5540 - DNA, 807 bp, Homo sapiens
  SIMILAR (619)..(702): 601254mologous to Homo sapiens Secreted protein encoded by gene 190 clone HIASB53,accession number W88723,Smith-Waterman Score =92.
atggtaaatattataggaagagagaaactgagccttttggagatggaagaaccaaatggtgggctagcagctcctaaccagagactagattcagtccacagatttttggttaactgtgaccccatgcttggtcttattcagtcccttcttcataaaaagttatctgtcctgatagtaaaatggagaaatagctctcctgatgagctttacctttattaccctgtcaataagactggtagtctaggtgttcatgactctggggaactcgtatctgtttgctccaaactggaccattacaccggcttgggtaacaccctggaccccagtgaaggatttggctggcaagcgtctctctctctaccttcccatcagcagtttgagcacacatgtcctgaatggctcccaacttacagctggccctgcaaagtaggccctgactacctctctgagatcttaagctcaggaaagaaccagtatcagaacttacaggatggtattacaagcttagaagaaaaccccagagatggcagagacagaccccaccttgattcccacttcacaacacttcaccttcttgcaaatacctacactggaagtctaggttttggggccctgggtccaaggagcacttctcagagctacattcatgggagcagccaggctcagtttgtggcagaatcacacattattctggtactgagtatccttttaagataccgacgaattgaaaagggcaaactaaagctacatgtttttaaattgacatttttcctggcagtaaatatcaagacttttaagagacattaa

SEQ ID NO: 5541 - DNA, 1995 bp, Homo sapiens; identical to SEQ ID NO: 4263
  SIMILAR (1266)..(1370): 681254mologous to Mus musculus Pro-Pol-dUTPase polyprotein,accession number Y12713,Smith-Waterman Score=132.

SEQ ID NO: 5542 - DNA, 1131 bp, Homo sapiens
  SIMILAR (724)..(1128): 801254mologous to Mus musculus Pro-Pol-dUTPase polyprotein,accession number Y12713,Smith-Waterman Score=567.
atggcctccgctgaggcagtttccaggcaaggtaatgttgattctcctcagtactcaccctcaacacccctgattgcttctagacctataagtagactaaagtcccagcaggcccctagagatgaggttcagagtgtgacccatgaagaggtgtactacactcaaaaagaactacttgagttttctggtttatataagcagaaatctgtagaacagggtgaaggctattatggtggaaaggccgaatggaagacaatagagctgcctctacctagaaaaacagtgaatcaaaaacaatatcgcatccctggagggattgcagagattagtaccaccatcaaggaactgaacaatgcagggatggtaattcccaccacatccccattcaactctcctatttggcctgtgcagaagatagatggatcttggagaatgacagtggattattgtaagcttaaccaagtagtgactccaattgcagctactgtaccatatgtggtttcatcacttgagcaaattaaccatctcctggtacctgaacaggaaaaggttctgcaacaggtccaggctgctgcacaagctgctctgccacttgggccatatgacccagcagatctaatgtttcttgaggtgtcagtggcacatagggatgctctttggtccagagatatgtggatgtacctctctgagtggtcaaaaactgtgaagatatttgtatcccatgctgccagttttgagtggagtccagaacaggaaaaggctctgcaacaggtccaggctgttgtgcaagctgctctgccacttgggccatatgacccagcagatccagtgttgcttgagatgtcagtggcagacagggatgctgtttggatcctttggcaggcccccataagtgaatcacagtggaggcctccaggattttggagcaaggccctgccatcttctgctgataactactctccttttgagagacagctcttggcctgctactggactttggtggaaactgaacgtttgactatgggtcatcaagtcaccataccacctgaactgcctatcatgaactgggtgttttctgacctatccagccctaaaatgtgtcatccacagcagcattccatcataaaatag

SEQ ID NO: 5543 - DNA, 1413 bp, Homo sapiens
  SIMILAR (610)..(1143): 781254mologous to Mus musculus Pro-Pol-dUTPase polyprotein,accession number Y12713,Smith-Waterman Score=723.
atgattatctcaatagatgcagaaaaggccttcgataaaattcaacagcctttcatgctaaaaacactcagtaaactagaagaaacagcatccccatccccagtagtggcaacatacactccgcaacctatgctaccatcagcctttccacctttgtctgaggagataaatcctgtgctgcctgagacaacagtgatggcctcccctgaggcagttaccaggcaagataatgttgattctcctcagaagccaccccctacacccatgtttgcttctagacctataactagactaaagccccggagagcccctagtgaggaagggatccaaaggcttaaaaagattgggatggtggagtggattagtcactttagacctactcctctcagcatggaaggtccagaacatatactcttgaccaacaccttgttaaatagatatgtgaaggcagcacctgcatctttgaagagccctttaactgctcttctctttatgtcagatctaactgtgggaaccacattctctcaactacaaaatttaaatacaatgggaatatttgggtcctcatgtgacaggagccaagtggcagcactcaaccatcaaaggcaagtgccagaatgcaaaattgtcatagatatacttaacatctggcggattccccacattggctcactgactggtagggtgagggaaattatggtgggaaaggccaaatggaagccattagagcagcctccacctagaaaaatagtaattcaaaaacaatatcacatccctggagctattacagagattagtgccaccattgaggacttgaaagaaacaggggtggtgattctcaccacatccccattcaaatcaagcatttggcctttgcagaagacagatggatcttggagaatgacagtgaattatcataagcttaaccaagtggagactccaattgcagctgctgtaccagatgtggtttcattgcttgagcaaattaacacatctcctggtacctggtatgcggccattgacttggtaaatgtctttttctccattcctgtctataaagctcaccagaagcaatttgccttcagctggcaaggccagcaatatacttttactttcctacctcaggggtatatcaactctccggatatcacactggttcactacattgacgacattatgcttattggatccagtgagcaagaagtagcaaacacactggatttactgcctgccagagtggcctcatggggagttccctatgatcagttgacagaggaagagaagactagggcctgcttcacagatggtcctgcaggatatgcaggcaccacccgtaagtggacagctgcagtactacagccactttctaggacatccctgaaggagagtggtgaagggaaatcttcccagtag

SEQ ID NO: 5544 - DNA, 693 bp, Homo sapiens
  SIMILAR (382)..(693): 841254mologous to Mus musculus Pro-Pol-dUTPase polyprotein,accession number Y12713,Smith-Waterman Score=453.
aaaaatagtaaatcaaagcaatatcacatccgtggaggaattgcggagattagtgccaccatcaaggactcgaaagacacaggggtggtgattcccaccacatccccattcaactctcccatttggcctgtttggaagacagatggatcttggacaataacagtggattatcataagcttgaccaagtggtgactccaattgcagctgctgtaccagatgtggtttcattgcttgagcaaattaacacatctcctggtacctgttatgcagccattaacttggaaaatgcctttttctccattcctgtccataaggccaaccagagcaatttgccttcagctggcaaggccagcaatataccattgctgtcctaccacagggtaaaatttctagggatccattgttttgtggcctgtcaagatattccttctaagataaaggataagttgctacatttggcccctcctacaaacaagaaagaggcacaatgcctggtcggcctatttggattctggaggcaacacattcctcatttgcgtgtgttactccagcccatttatcaagtgaccctaaaggctgccatttttgagtggggtccagaacaggagaaggctctgcaacaggtccaggctgctgtgcaagctgctctgccacttggaccatatgacccaacagatccaatggtgcttgag

SEQ ID NO: 5545 - DNA, 1011 bp, Homo sapiens
  SIMILAR (1)..(936): 671254mologous to Mus musculus Pro-Pol-dUTPase polyprotein,accession number Y12713,Smith-Waterman Score=1181.
atggtctccactcctgccaccctgccttctctccccaagcctgcactgatggcctcatggggagttccctatgatcagttgacaaaggaagagaagactagggtctggttcacagatggttctgcacgatatgcaggcaccacccaaaagtggacagctgtagcactacagcccctttctaggacatccctaaaggacagcagtgaagggaaatcttcccagtgggcagaacttcaagcagtgtacctggttgtgcactttgcatggaaggagaaatggccagatgtaggattatatactgattcatgggctgtagccaatggtttggctggatggtcagagacttgggagaagcaagattggaaaattggtgacaaagaaatttggggaagaggtatgtggatggacctctctgagtggtcaaaagctgtgaagatatttgtgtctcatgttagtgctcatcaacgggtgacctcagcagaggaggagtttaataatcaagtggataggccacttctgtcttcacccaatgggcccatgaacaaagtggccatagtggcagggatggaggttactcatgggctcagcaaacttggacttccattcaccaaggctgacctggctatggccactgctgagtgcccaatttgccagcagcagagaccaacactgagccctttatatagcaccattcctcagggtgatcagccagccacctggtggcagattgattatattggacctcttccatcatggaaagggcagaagtttgtcctcactgtaatagacacttactccagatataggtttgcctatcctgcacacaatgcttctgccaagactaccatccatggactaatagaatgccttatccattgttatggtattccacacagcattgcctctgaccaaagcattcactttagaccaaagaagtgcagtgatgggctcatgctcatggaattcactggtcttaccatgtttcccatcatcctgaagcagctggattga

SEQ ID NO: 5546 - DNA, 278 bp, Homo sapiens
  SIMILAR (92)..(277): 801254mologous to Mus musculus Pro-Pol-dUTPase polyprotein,accession number Y12713,Smith-Waterman Score=285.
ccataaagtgcgtcgtgcacagcagcattccatcatcaaatggaagtggtatatacaagatcgggctcaagcaggtcctgaaggcacaaccatccctgtcattgcccaatgggactatgaccataatggccatggtggcagggatggaggttacccatgggctcagcaacatgagcttccactcaccaaggctgacctggctacggccactgctgagtgcccaatttgccagcaacagagaccatcactgagccctcgatgtggcaccattcctcggg

SEQ ID NO: 5547 - DNA, 237 bp, Homo sapiens
  SIMILAR (1)..(147): 831254mologous to Mus musculus Pro-Pol-dUTPase polyprotein,accession number Y12713,Smith-Waterman Score=213.
atggattatcataagcttaatcaagtggtgactccaattgcagctgctgtacctgatatggtttcattgcttgagctaattaacacatctcctggtagctggtatgcagccattaacttggcaaatgactttttctccattcctgtctccataaagtgggtcgtgcacagcagcattccatcatcaaatggaagtggtatatatgtgatcaggctcgagcaggtcctgaaggcacaa

SEQ ID NO: 5548 - DNA, 225 bp, Homo sapiens
  SIMILAR (224)..(33): 431254mologous to Mus musculus Pro-Pol-dUTPase polyprotein,accession number Y12713,Smith-Waterman Score=125.
ctctgccatttccatgacagaagagttctaatataatcaacctgccaccaggtagctgactgatgccccaagaaatggtgccataccgaaggctcagtattggtctctgctgctgaaattgggcactcagcagtggttgtgccttcaggacctgctcaagcctgatcacatatacaccacttccatttgatgatggaatgctgctgtgcacaacccactttatgg

SEQ ID NO: 5549 - DNA, 740 bp, Homo sapiens
  SIMILAR (84)..(737): 781254mologous to Mus musculus Pro-Pol-dUTPase polyprotein,accession number Y12713,Smith-Waterman Score=933.
ccataaaatgggtcatgcacagcagcattccatcatcaaatggaagtgatatatatgtgattgggctcgagcaggtcctaaaggcacaacctgcaccgatggcctcatggggagttctctatgatcagttgacagaggaagagaagactagggcctggttcacagatggttctgcacgatatgcaggcaccacccaaaagtggacagctgcagcactacagcccctttctaggacatcactgaagggcagtggtgaagggaaatcttcccagtgggcagaacttcaagcagtgcacctggttgtgcacttttcatggaaggataaatggccagatgtgcgattatatattgattcatgggctgtagccaatggtttggctggatggtcagggacttggaagaagcatgattggaaaattggtgacaaagaaatttggggaagaggtatgtggatggacctctctgagtggccaaaacctgtgaagatatttggatcccatgtgagtgctcaccaatgggtgatctcagcagaggaggattttaataatcaagtggataagatgacctgttctgtggacatcactcagcctctttccccagccacccctgttatcacccaatgggcccataaacaaagtggccatggtggcagggatggaggttatacatgggctcagcaacatggacttccactcaccaaaactggcctggctatggctacagctgagtgcccaatttga

SEQ ID NO: 5550 - DNA, 354 bp, Homo sapiens; identical to SEQ ID NO: 4261
  SIMILAR (139)..(354): 841254mologous to Mus musculus Pro-Pol-dUTPase polyprotein,accession number Y12713,Smith-Waterman Score=346.

SEQ ID NO: 5551 - DNA, 593 bp, Homo sapiens
  SIMILAR (186)..(590): 801254mologous to Mus musculus Pro-Pol-dUTPase polyprotein,accession number Y12713,Smith-Waterman Score=567.
aacaggaaaaggttctgcaacaggtccaggctgctgcacaagctgctctgccacttgggccatatgacccagcagatctaatgtttcttgaggtgtcagtggcacatagggatgctctttggtccagagatatgtggatgtacctctctgagtggtcaaaaactgtgaagatatttgtatcccatgctgccagttttgagtggagtccagaacaggaaaaggctctgcaacaggtccaggctgttgtgcaagctgctctgccacttgggccatatgacccagcagatccagtgttgcttgagatgtcagtggcagacagggatgctgtttggatcctttggcaggcccccataagtgaatcacagtggaggcctccaggattttggagcaaggccctgccatcttctgctgataactactctccttttgagagacagctcttggcctgctactggactttggtggaaactgaacgtttgactatgggtcatcaagtcaccataccacctgaactgcctatcatgaactgggtgttttctgacctatccagccctaaaatgtgtcatccacagcagcattccatcataaaatag

SEQ ID NO: 5552 - DNA, 798 bp, Homo sapiens
  SIMILAR (798)..(316): 991254mologous to Leishmania major probable levansucrase precursor,accession number AL160371,Smith-Waterman Score=844.
tcaatatttcgaatattgagcatactcagaaactttctttgagtctaggttcaagtgggtccctggactcatgcagttgtcatttccccagtgccggaatgcataatgggcacagacatacttagcagctggcagaacctccacattggctccctgactgaaagggtgctggttttgagtggggtccagaacagaagaaggctctgcaataggtccaggctgctgtgcaagctgctctgccacttgggccatatgacccagcagatccaatggtgcttgtggtgtcagtggcagataaggatgctgtttggatctttcatctttcaggatcggatcgttggcgtcgaacttatcgctgtctttaaagacacggcccgcgtttttccagctgtcgattgagttgtcgccgaccttttgataaaacatgtagattgatgtgtcatcagcgtctttcgggcttcccgcaagagcaaacacaacgtgatagccgttgtattcagctactgttccgtcagcgttttgcagcggccagctgtcccacacatcaagtccttttgcagactcaatatttttaatcgttgattgatcgaattgaggcacttggtatttttcgttttgctgctgtttagggatctgcagcatatcatggcgtgtaatatgagagacgccgtacgtttctttgtatgctttttggttattttctttcgcgaaggcttgagtcgctcctcctgccagaagtgcagtcgtaaaagtcagaactgtggcttgttttacaatttttttgatgttcatgttcat

SEQ ID NO: 5553 - DNA, 486 bp, Homo sapiens; identical to SEQ ID NO: 5197
  SIMILAR (220)..(483): 821254mologous to Mus musculus Pro-Pol-dUTPase polyprotein,accession number Y12713,Smith-Waterman Score=382.

SEQ ID NO: 5554 - DNA, 1911 bp, Homo sapiens; identical to SEQ ID NO: 5198
  SIMILAR (982)..(1761): 751254mologous to Mus musculus Pro-Pol-dUTPase polyprotein,accession number Y12713,Smith-Waterman Score=1036.

SEQ ID NO: 5555 - DNA, 1569 bp, Homo sapiens
  SIMILAR (1282)..(1566): 731254mologous to Mus musculus Pro-Pol-dUTPase polyprotein,accession number Y12713,Smith-Waterman Score=381.
aaaagaaaaatctcattttctgaggagaaatggaagcaggctgcagaaattcgcctaagtaacgagaagccaaatgttaatcctcaagacaacggggaaaatgtctccagggtctcagttaactcttttggtcttctcaggaagcatcttcttcgtgaaatcatcatcaataaaaatcttcaatgcttagcttcaagtttgcaggtagccagagtgatccctgcagaacatgaatcaggccaggtgcttccctcctcagaattccataaagatttagcatacttagaacaaaatcctccacctccaaattgttccccattcttcacagatattcgaattggctctctcccctccgatgcctcagtttgtggtgataactgtgtgtttgaaagctggattggagacatcatattggacatggacaatgagtttagtgactctatacataatacctttggccatatgtggagaaccaaggaacataatgaagctggttggttgctcctaagttcagtggacaaagtaatgaaagaaaatgatgaactcagggattctatctcctggcttcagaagcagatactgagtctcaaatctgctaagattgccctgagtgagagtcttatctcctgcagggaaagagctgaaattgtggaaaaacagacacaagctgttatcatgcgaatggctgacccgcaaggaaaggtgcatgcgcagcctcaacaggtgtctactgttaaagggaggacattgattggaaaagaatgggaccccgcaacttggaatggggacgtgtgggaggaccctgatgaagctggggacactgagtttgtaaactctgatgaaccttttttgccagaagtaacagcttccccatccccaagagacctctggccttttaccagggtaactttgcactggggaaagggaaatgatcagacattttggggactactggacactggctctgagctggtgatgattccaggggacccaaaatgtcattgtggtcctccagttaaaataggggtttatggtggtcagaagacacatggatcttggggaatgacagtggattatcagaagtttaaccaagtggtgactccaattgtagctgctgtaccagatgtggtttcattgcttgagcatattaacacatctcctggtatctgcctgcaccgatggcctcatggggagttccctatgatccagttgacagaggaagagaagactagggcctggttcacagatggttctgcacgatatgcaggcactacccgaaaaggtagggaagagtatgtacggaatacagcgaatccattagggcgactcttagtattaccatgccctgtgattaaggtcaatgggaaactacaacagcccaatccaggcaggactacaaatggtccagacccttcaggaatgaaggtttgggtcactccaccaggaaaaaaaccacaacctgctgaggtgcttgctgaaggcaaagggaaaacagaatgggtagcagaagagggcagtcaacaataccagttacgactacatgaccagctgcagaaacaaagactgtaa

SEQ ID NO: 5556 - DNA, 1866 bp, Homo sapiens
  SIMILAR (6)..(701): 741254mologous to Mus musculus Pro-Pol-dUTPase polyprotein,accession number Y12713,Smith-Waterman Score=911.
tgcgtccagtgggtccccggactcatcctgtggtcatttccccagtgccagaatgcataattagcatagacatacttcgaagctggcagaacccccacattggcaccctgactggtagggtgagggctgttatggtgagaaaggccaaatggaagccattagagctgtctctacctagaaaaatagtaaaccaaaaacaatattgtgtccctggagggattgtggagattagtgccaccaccaaggacttgaaagatgcaaaggtggtgattcccaccatatccctgttcaactatcctatttggcttgtgcagaagaatgatggatcttggagaatggcagtggattatcataagcttacccaaggggtgactccaattgcagctgctgtaccaaatgtgatttcattgcttgagcaaattaacacatcttctggtacctggtatgcagccatttacttggtaaatgtctttttctccattcctgtccataaggccctcaagaaacaatttgccttcagctggcaaggtcaaccatatacctttaccattctaccttgggggcatatcaactctccgactttgtgttataatctcatttggagagaacttgatcacttttcgcttccacaagatatcacactggttcattacattgatgacattatgctaattggatccaggacttcaaaggctgccagttttgagtggggtctagaacaggagaagggtctgcaacagattcagtctgctgtgcaagctgctctgccacttgggccatatgacccagcagatccaatggtgcttgaggtgtcagtggcagcagatagggatgctgtttggagcctttggcaggctcccataggtgaatcacagcagaggcctctaggattttggagtaaggccctgccatcttatgcagataactactcttcttttgagagacagctcttggcctgttactgggctttggtggaaactgaatgtttgactctgggtcatcaagtcaccatatgacctgaactgcctatcatgaactgggtgctttctgacccatctagccataaagttggtcatgaacagcagcattccatcatcaaatggaagtggtatatacgtgatcgggcttgagcaggtcctgaaggcacaagttaagttacatgaggaagtggctcaaatgcccatggtctccactcctgccaccctgcctcctctcccctagcctgcaccagtggcttcatggggagttccctatgattagttgacagaggaagagaagactaaggcctggttcacagatgattctgcatgatatgcaggcaccatccgaaggtggacagctgcagcactacagcccctttctaggacatccctgaaggagagcggtgaagggaaatcttcccagtgggcagaagttcgagcagtgcaccttgttgtgcattttacatggaaggagaaatggccagatctgatggtttggctggatgatcaaggacttggaagaagcatgattggaaaattggtgacaaataaatttggggaagagatgtgtggatggacctctctgagtgagtggccaaaaactgtgaaaatattggtatcccgtgtgagtgctcaccaacgggtgacctcagcagaggagaattttaataatcaggtggatgagataagccattctgtggacaccactcagcctctttccccagccacccctgtcattgcccaatgggcccatgaacaaagtggccatggtggcagagatagaggttacgaatgggctcagcaacatgtacttccactcaccaaggctgacctggctacagccactgctgatgcccaatttgccagcagcagagaccaacaatga

SEQ ID NO: 5557 - DNA, 448 bp, Homo sapiens
  SIMILAR (300)..(446): 931254mologous to Mus musculus sid2057p,accession number AB025407,Smith-Waterman Score=246.
cggtactgcgccggaatttttcggtcgacccacccgtccgaggggctctgcgttctgtagtggcgcttcttgggcccgtggcggattgtaagctgctggttttgcggctgggaagagcggcgagagggttcggcatttttcgtcgggatccccgcaaggatgagtgctgccagagagtctcacccgcatggggtgaagcgttcagcctccccagacgacgatctgggatctagcaattgggaggcagcatacttgggtaatgaagagagaaaacaaaagttcttgagacttatgggtgccggaaaggggaagaagaccagaaaattaatgaagaactggagtctcaatatcagcatagtatggacagtaaattatcaggaagatatcggcgacattgtggacttggcttcagtgaggtagaagaccatgatggagaaggtgatgtggg

SEQ ID NO: 5558 - DNA, 404 bp, Homo sapiens
  SIMILAR (293)..(403): 971254mologous to Homo sapiens small acidic protein,accession number U51678,Smith-Waterman Score=194.
ccgtggcggattgtaagctgctggttttgcggctgggaagagcggcgagagggttcggcatttttcgtcgggatccccgcaaggatgagtgctgccagagagtctcacccgcatggggtgaagcgttcagcctccccagacgacgatctgggatctagcaattgggaggcagcagacttgggtaatgaagagagaaaacaaaagttcttgagacttatgggtgcaggaaagaaagaacatactggtcgtcttgttataggagatcacaaatcaacatctcacttccgaaccggtagaagaccatgatggagaaggtgatgtggctggagatgatgatgatgacgatgatgattcacctgatccctgaagtccagatgattctgaaagcgattcagagtcagaga

SEQ ID NO: 5559 - DNA, 434 bp, Homo sapiens
  SIMILAR (242)..(430): 901254mologous to Gallus gallus small acidic protein,accession number AF245016,Smith-Waterman Score=304.
cttgggcccttggcggattgtaagctgctggttttgcggctgggaagagcggcgagagggttcggcatttttcgtcgggatccccgcaaggatgagtgctgccagagagtctcacccgcatggggtgaagcgttcagcctccccagacgacgatttttttctctttgccattatgaatggaaaatgaaaaattgtgaattcccatcggtgttcagtgaaagctaaaagtagacaacagctgggatctagcaattgggaggcagcagacttgggtaatgaagagagaaaacaaaagttcttgagacttatgggtgcaggaaagaaagaacatactggtcgtcttgttataggagatcacaaatcaacatctcacttccgaaccggggaagaagactagaaaattaatgaagaactggagtctcaatatcagcact

SEQ ID NO: 5560 - DNA, 1096 bp, Homo sapiens
  SIMILAR (544)..(338): 501254mologous to Homo sapiens Human disease associated acidic protein,accession number B14961,Smith-Waterman Score=122.
  misc_feature (1)...(1096): n = a,t,c or g
caatcatttntagggaaatttgaggaatgntaaatngcttcaccaacaaaaggagcattcccccataaggtgaattagagggttgatgatgctaatatgaaaggaagttgagtactggatttatttcttattttatacaactcttactctttaccaaaaatggttatagtcatgccccataaaaagtgtaaccccatggcatttgaaagcaaacactctttgtaattatttaaaagggcctttttaaaaaattataatacaaaggtctgtgctctataaagcagtcctcccactgtgcattgtaacaataaaggcttaacttttaaatacaaagactaagcggtttgggagttaatgaaccactggatttaacaaacatcaattttataattgcttttttgcatcttttttgtttttgggatcctccacttcatcagggtgctcagcaggcttggagttcttcagcagattcttctttctctgacttctgaatcggctttcaagaatcatctgggactttcagggatcagggtgaatcatcatccgtcatcatcatcatctccagccacatcaccttctccatgcatggtcttctacctcactgaaagccaagtcccacaatgtcgccggatatcttccctggaaaatttactggtccaataactttggctggatattgaggactccaagttcttcagttaattttctttgtcttctttccccgggttcgggaagtgagatgttgatttgtgatctcctataacaagacggaccagtatgttctttctttcctgcacccataagtctcaagaacttttgttttctctcttcattacccaagtctgctgcctcccgaattgctagatcccaagatcgtcgttctggggaaggctgaacggcttcaccccatgcgggtgaagaactctctggcagcactcgatccttgcggggatcccgacgaaaaaatgccgaaccctctcgccgctcttcccagccgcaaaakccagcagcttacaatrccgccaagggccccaagcagcgcacactacagaacgcagagcccctccgggccttctctgccacagtcgtcaccgtt

SEQ ID NO: 5561 - DNA, 504 bp, Homo sapiens
  SIMILAR (16)..(285): 521254mologous to Rattus norvegicus phosphoglycerate mutase B isozyme,accession number M76591,Smith-Waterman Score=203.
ccccagcctgccgccatggccgcatacatctgggtgctgatccggcacggcgagagcgcatggaacctggagacatccttcagcggctggtacgacgcgaccctgagtctggcgggccacaaggaggcgaagcgcggcgggcaggcgctacgaggtctttttcaggttcccttagcgccagaagcggttggtacagtctggtgctcctggaggacgccctgtgccttaaagcagctgtaaccaaggcctctcaagaggcggctacggatcctagcggatcgacacgccacacagcctcgtccccagcagtaggtggaggccctgggggtgcctaacaagcctcagaacaccaagaaatccgcgtggttgtgcaggtctttgctgttcagtagcattccacaaatagtgtgtccaaaacgcatctgtagatgtaacttgagtgaatgaatgaatgattcgagttgctccttctacccaataaagtagataagattttaaaaaaaa

SEQ ID NO: 5562 - DNA, 1827 bp, Homo sapiens
  SIMILAR (597)..(908): 761254mologous to Drosophila melanogaster phosphoglycerate mutase,accession number AF186594,Smith-Waterman Score=421.
  misc_feature (1)...(1827): n = a,t,c or g
atttgggcgagaacttgcgcgggagccggactgagcggtgcgagcgcgcatgcgcggccgacggagcgggctgctactccggaatctgctaatcccagtcggtgccgcatccccagcccgccgccatggccgcctacaaacatggtgctgggggcggcacggcgagagcgcatggaacctggagaaccgctttagcggttgtgacgacgccgacctgagcccggcgggccagcgaggaggcgaacggctngccgngcaggcgctacaagatgctggctatgagtttgacatctgcttcacctcagttgcagaagagagcgatccggaccctctgggacagtgctagaatgcctttgatcagatgtggcttgccagtggtgaaggactttggggcttcaatgagcggcactattgggggtcttaacccggtctcaattaaaagcagaaacttgctgcaaagattgggtgagggcccaggttgaagatcttggaggcgctcctatggattgtcccaccacctccgatggagcccgaccatcctttctacagcaacatcagtaaggatcgcaggtatgcagacctcacagaagatcagctaccctcctgttgagagtctgaaggatactattgccagagctctgcccttctggaatgaagaaatagttccccagatcaaggaggggaaacgtgtactgattgcagcccatggcaacagcctccggggcattgtcaagcatctggagggtctctctgaagaggctatcatggagctgaacctgccgactggtattcccattgtctatgaattggacaagaacttgaagcctatcaagcccatgcagtttctgggggatgaagagacggtgcgcaaagccatggaagctgtggctgcccagggcaaggccaagaagtgaaggccggcggggaggatactgtccccaggagcaccctccctgcccgtcttgtccctctgcccctcccacctgcacatgtcacactgaccacatctgtagacatcttgagttgtagctgcagacggggaccagtggctcccattttcattttagccattttgtcgcctgcacccactcccttcatacaatctagtcagaatagcagttctagagcacaggttctcagtctaagctatggaaaagctccccttatccaacagagtttaaaagtagtgacttgggtttttgcgagtgctttgtttactaaggactttggggaggaaccatgctaagccatgaccagtgaggagaagcaacagagcctgtctgtccccatgagcggagtctgtcctctgctcttctgcagtcaggtcactgcctactgcctgggggctctagtcattccagtggaagacgaatgtaacctgcgtggtgatgtgacaactgtttcctccctgaccccagaggatctggctctaggttgggatcaatcctgaatttcgttatgtgttaatttacttttattaaaaaagtatagtatatataatacaaaacaataacccttctggggtttcttgtggcggttgaaatagtcccacatgtggtcatcagaaatagcattcctcataccaatataggatcagctccttgacctctgaggggtcaggagtgcttcctggtgtgtgtattagaatcccttcctgccttgtttcatggcagtgaaatgcctcttggtcctgtccagtgtatctttcactgatttctgaatcatgttctagttgcttgaccctgccacatgggtccagtgttcatctgagcataactgtactaaatcctttttccatatcagtataataaaggagtgatgtgcaat

SEQ ID NO: 5563 - DNA, 450 bp, Homo sapiens
  SIMILAR (2)..(67): 811254mologous to Homo sapiens PTD009,accession number AF078862,Smith-Waterman Score=92.
  misc_feature (1)...(450): n = a,t,c or g
ggtgaacaaagctggcggcttgatttaccagttggacagctacgcgccacggntgaggctgagaaaactttcagttatccgctggatctgctgctcaagctacacgatgagcgtgtgttggttgctttcggccagcgggacggcatccgagtgggtcatgcagtgctggccatcaatggcatggacgtgaatggcaggtacacggccgacgggaaagaggtgctggagtatctgggtaaccctgctaattacccggtgtccattcgatttggccggccccgcctcacttctaatgagaagcttatgctggcctccatgttccactcggatcaagtttgtggttctagcagatcctaaggcaagctggaatagattctcttctccgaaagatttatgagatttactcagactttgccctcaagaatccattctattccttagaaatgccta

SEQ ID NO: 5564 - DNA, 666 bp, Homo sapiens
  SIMILAR (1)..(570): 841254mologous to Homo sapiens PTD009,accession number AF078862,Smith-Waterman Score=791.
atggcgatttttagtgtgtatgtggtgaacaaagctggcggcttgatttaccagttggacagctacgcgccacgggctgaggctgagaaaactttcagttatccgctggatctgctgctcaagctacacgatgagcgtgtgttggttgctttcggccagcgggacggcatccgagtgggtcatgcagtgctggccatcaatggcatggacgtgaatggcaggtacacggccgacgggaaagaggtgctggagtatctgggtaaccctgctaattacccggtgtccattcgatttggccggccccgcctcacttctaatgagaagcttatgctggcctccatgttccactcgctctttgccatcggctcccagctgtctcctgaacagggaagctcaggcattgagatgctggagacagacacattcaaattgcactgctaccagacactgacagggttttccaagcccctcaacaaagtggtcatccttgtccagaccaaccaaactgggctggtgtcagctgcccacttacaagcctctgttcacctagatgaaggtaacagtggcccttcggctggccacgtcactcccgtgactcatcttaagcttgtaggtgacaaactcccaagtctttctgacgaactgttgttacctggtcctccctaa

SEQ ID NO: 5565 - DNA, 2037 bp, Homo sapiens
  SIMILAR (31)..(387): 851254mologous to Homo sapiens 150 kDa oxygen-regulated protein ORP150,accession number U65785,Smith-Waterman Score=497.
atgaagaagacagaagacaacaacgcacttgtgttcactgtgaatgttaaagccaacaagcaccagaagaagctctatgacactgatgtggccaaggcctggaagaatgcaactctggccgagcaggctaagctgcccgccacagagaagcctgtgttgctctcaaaagacattgaagctaagatgatggccctggaccgagaggtgcagtatctgctcaataaggccaagtttaccaagccccggccccggcctaaggacaagaatgggacccgggcagagccacccctcaatgccagtgccagtgaccagggggagaaggtcatccctccagcaggccagactgaagatgcagagcccatttcagaacctgagaaagtagagactgtccaggccgagaggccggcggccctgaaggtgagtgaggccctcggcagctgcagccggggtgtctggtacccccccggcgtggtgcttagcccaggactttcagacgcggccgctggccgggaggctttgttaatgggcatcgttaagctgccgtgcaacatccaggatgtttttggctcctttgctcagcaacaagttggccaggctgatgcccaagttctgggcagccaactggggccctcgtggaatgttacgagcagtgatgcctaccaactgtgggtcatcctcagggccatcttcatgctgtatgagggaaggaggtgggatttggtggagcacaggccctaccaggtgcctcaggaaggccctttcagcgatgcagcgaagcagagtctcgggatcgtgcagcacacccaccagatccaagatgtcctggtccttggctcgcacttccacgcccaaggccccctgatggaaaaacatcctaggacatcaggcctgatctttccccaaccaatggcgcaaagcatgggaccacctctatctacttgctccccagcgccttttggaccggtagcatcccaaggtctgcccctccctgagaatgctattctggggaagcagatgcagaaggttaatatcatgttctatgacatgggctcaggcagcaccgtatgcaccattgtgacctaccagatggtgaagactaaggaagctgggatgcagccacagctgcagatccggggagtaggatttgaccgtaccctggggggcctggagatggagctccggcttcgagaacgcctggctgggcttttcaatgagcagcgcaagggtcagagagcaaaggatgtgcgggagaacccgcgtgccatggccaagctgctgctgggtcatgcagtgctggccatcaatggcatggacgtgaatggcaggtacacggccgacgggaaagaggtgctggagtatctgggtaaccctgctaattacccggtgtccattcgatttggccggccccgcctcacttctaatgagaagcttatgctggcctccatgttccactcgctctttgccatcggctcccagctgtctcctgaacagggaagctcaggcattgagatgctggagacagacacattcaaattgcactgctaccagacactgacagaccacagaacaactctggatgaccagctaaaccaaagaggcgcgcggcacggacccctccgacaaacagatttcatcctaactcgatctcttcgggatcccggggagggaaaagacagctccaaacgaaggatatctccaaagaccaggctccctcggcctgagtcgcagacagtgatgccaggagggaggcaaaggaacttggaagcagcggatccagaagcaggtgtggccccgggagcggccccatcattgctcagcggctccttcaccagctccttgtcgaagaaaacgaagcgccgccactgcagtgctccagccggtgaggagtaccagctggagaatccttttgtcctagtaaccccggcaacgggatgcctaatctcagacccccagcagccccaaaggttccacccagaacttgtggctgcccagagctcagctccgaatcccaacctggaacctccgctgggggaatga

SEQ ID NO: 5566 - DNA, 1390 bp, Homo sapiens
  SIMILAR (413)..(1105): 471254mologous to Homo sapiens PTD009,accession number AF078862,Smith-Waterman Score=309.
cggcccccattgacgccgcattagaggcctgaagtaccgggtcgacccacgcgtccgggcggaagacaggaagcggattctagttcccaagccgcaccgcctaaatactgccggagtctgcgctagttgtgacgcagtactatagcgctgttttcctgcactgataaacgaaaagcaatccaccaggtctcggcagctaactttccggcactacttatgcccgagcgtgtcgctcccagtgcgcaagtgcagcaggtggctgcacggagggcgcgggaggaggaggaggagaatgaggaggaggatggctgggtggggccggcggcaagtgctgtgatgcggttccggggaggggccgtcgggtagaggctgaataccagtttccgagcggcaaggcagcgattggcgattttttagtgtgtatgtggtgaacaaagctggcggcttgatttaccagttggacagctacgcgcccacgggcttgaggcttgagaaaactttcaagttatccgctggatcttgctggctcaagctaacacgatgagcgtgtgttggttgctttcggccagcggggacggcatcccgagtggggtcatgcagtgctgggccatcaatggcatgggacgtgaatggcaggtacacggccgacggggaaagaggtgctggagtatctggggtaacccctgcttaattacccggtgtccattcgattttggccggccccgcctcaacttctaatgaagaagcttatgctgggcctcccatgtttccactcgctctttgccatcgggctcccaagcttgtcttcctggaacaagggaagcctcaaggcatttgaagatccttggaagacaagacacattcaaatttgcactggctaccagacactgacaagggatcaagtttgtggttctaagcagatcctagggcaagctgggattagattctcttctccgaaagatttatgaggatttacttcagactttgccctcaagaatcccattctaattccttagaaatgcctatcaggtgtgagctctttgaccagaacctgaagctagctctggaggtggcagagaaggctggaacttttggacctgggtcataggctgaacctgttatggacctccaaattctgagagttcctgcaacaagaatactgctgttggacactccagtggaaatcccagcagccttgttagtgcacttgaaagtgggagaatgctgaccctggatgacttgtactgattcctgagccttaacactgtgctctttccttctgtatataccatggtcttactttccaactctgtacagatttatttatggaggagctaggtccataaatgttgtaataaatattcctttgatcttggtgtttgcaaaaaaa

SEQ ID NO: 5567 - DNA, 339 bp, Homo sapiens
  SIMILAR (250)..(327): 1001254mologous to Xenopus laevis Meis3 homeoprotein,accession number AF072895,Smith-Waterman Score=142.
atggaagtagggaaattgagtaaaggagtctgggaggaaccagctctgcctgatgagagaaagacatttgcaagtgcacgaggtccagtgagaaaggctgacacccctgtccacagagctgcagcggggacagcatggaggaaggttcagtgtttgacaaaagacgatgcagtgtggtgcgtgaaagagaacgggctggacatcagcagcttgggtctaattccagctcaaacaacttgtgtgatcttgcatccgtacccttccgaagagcagaagaaacagttagcgcaagacacaggacttacaattctccaagtaaacaactggaaggctcattaa

SEQ ID NO: 5568 - DNA, 2229 bp, Homo sapiens
  SIMILAR (766)..(1047): 1001254mologous to Homo sapiens TALE homeobox protein Meis2c,accession number AF179897,Smith-Waterman Score=530.
cgtggtagagggccgtatgaccgggccgacccacgcgtccgagctgtttgaaggggaaaatgcccatcgacctcgtcattgatgaaagagactgcagctccaagtcagatcatgaagaactttcaggctcctccacaaatctcgctgaccataacccttcttcttggcgagaccacgatgatgcaacctcaacccactcagcaggcaccccagggccctccagtgggggccatgcttcccagagcggagacaacagcagtgagcaaggggatggtttagacaacagtgtagcttcacctggtacaggtgacgatgatgatccggataaggacaaaaaacgccagaagaaaagaggcattttgcccatagtattccctatatatcatgagagcatggctcttccagcatctcacacatcctgtacccttccgaagagcagaatatacagttagcgcatgacacaggacttacaatttttcaagtaaacaactggtttattaatgccagaataggaatagtacagcccatgattgaccagtctaatcgagcaggttttcttcttgatccttcagtgagccaaggagcagcatatagtccagagggtcagcccatggggagctttgtgtttggatggtcagcaacacatgggggatccggcctgcagggacctatgagtgggatggggcatgaatatgggcatggatggggcaatggcactacatgttaaccttcatcatgtaaagcaatcgcaaagcaaggggaagtttgcagagcatgccaggggactacgtttctcagggtggtcctatgggaatgagtatggcacagccaagttacactcctccccagatgaccccacaccctactcaattaagacatggacccccaatgcattcatatttgccaagccatccccaccacccagccatgatgatgcacggaggaccccctacccaccctggaatgactatgtcagcacagagccccacaatgttaaattctgtagatcccaatgttggcggacaggttatggacattcatgcccaatagtataagggaactcaagggaaaaggaaacacacgcaaaaactattttaagactttctgaactttgaccagatgtgacacttaatatgaaattccagacagctgtgattattttttacttttgtcatttttcatcaagcaacagaggaccaatgcaacaagaacacaaatgtgaaatcatgggctgactgagacaattctgtccatgtaaagatcctctggaaaaagactccgagagttataactactgtagtataaatataggaactaagttaaacttgtacatttctgttgatcacgccgttatgttgcctcaaatagttttagaagagaaaaaaaaatatatccttgttttccacactatgtgtgttgttcccaaaagaatgactgttttggttcatcagtgaattcaccatccaggagagactgtggtatatattttaaacctgttgggccaatgagaaaagaaccacactggagatcatgatgaacttttggctgaacctcatcactcgaactccagcttcaagaatgtgttttcatgcccggcctttgttcctccataaatgtgtcctttagtttcaaacagatctttatagttcgtgcttcataagccaattcttattattatttttgggggactcttcttcaaagagcttgccaatgaagatttaaagacagagcaggagcttcttccaggagttctgagccttggttgtggacaaaacaatcttaagttgggcagctttcctcaacacaaaaaaagttattaatggtcattgaaccataactaggactttatcagaaactcaaagcttgggggataaaaaggagcaagagaatactgtaacaaacttcgtacagagttcggtctattaattgtttcatgttagatattctatgtgtttacctcaattgaaaaaaaaaagaatgtttttgctagtatcagatctgctgtggaattggtattgtatgtccatgaattcttcttttctcagcacgtgttcctcactagaagaaaatgctgttacctttaagctttgtcaaatttacattaaaatacttgtatgaggactgtgacgttatgttaaaaaaaaaaggtgttaagtcacaaaaagcggtaataaatatttcatttttgatttttaaaaaaaaaaaaaaaaaattcctgcggccgcaagg

SEQ ID NO: 5569 - DNA, 293 bp, Homo sapiens
  SIMILAR (8)..(142): 911254mologous to Homo sapiens myosin X,accession number AF132021,Smith-Waterman Score=211.
tcttcacagccccatcatggaagctttcgtcaatgttaagaccgtgtacaacaacaactctagtcgctttgggaagtttgttcagctgaacatctgtcagaaaggaaatattcagggcgggagaattgtagattgtatcctctttcatttatttttatctatagtaattgattctctaagtggaaactgttctcactaattataaggattgaaaaagaatgtgaaacatttctttctctggttctttaacgaattagacagttagttattgctctaatgttagtatacctgtt

SEQ ID NO: 5570 - DNA, 449 bp, Homo sapiens
  SIMILAR (1)..(447): 1001254mologous to Homo sapiens myosin X,accession number AF132021,Smith-Waterman Score=761.
accgaaagcactaaattgatcctcaagtttctgtcagtcatcagtcaacagtctttggaattgtccttaaaggagaagacatcctgtgttgaacgagctattcttgaaagcagccccatcatggaagctttcggcaatgcgaagaccgtgtacaacaacaactctagtcgctttgggaagtttgttcagctgaacatctgtcagaaaggaaatattcagggcgggagaattgtagattatttattagaaaaaaaccgagtagtaaggcaaaatcccggggaaaggaattatcacatattttatgcactgctggcagggctggaacatgaagaaagagaagaattttatttatctacgccagaaaactaccactacttgaatcagtctggatgtgtagaagacaagacaatcagtgaccaggaatcctttagggaagttattacggcaat

SEQ ID NO: 5571 - DNA, 774 bp, Homo sapiens
  SIMILAR (316)..(600): 941254mologous to Homo sapiens myosin X,accession number AF247457,Smith-Waterman Score=442.
atgaggaaaccgacctacatcggctccatcctggcctctgtgaacccctaccagcccatcgccgggctgtacgagcctgccaccatggagcagtacagccggcgccacctgggcgagctgcccccgcacatcttcgccatcgccaacgagtgctaccgctgcctgtggaagcgccacgacaaccagtgcatcctcatcagccttgttaactgtgtttgggacctggccaccgcgggcctaaacaacggcagcagctggtctcccgagggacccttcggtccttctagagcttttcctccagagctgcgtttcctacaggtggccttgatgagtggtgaaagtggggcaggtaaaaccgaaagcactaaattgatcctcaagtttctgtcagtcatcagtcaacagtctttggaattgtccttaaaggagaagacatcctgtgttgaacgagctattcttgaaagcagccccatcatggaagctttcggcaatgcgaagaccgtgtacaacaacaactctagtcgctttgggaagtttgttcagctgaacatctgtcagaaaggaaatattcagggcgggagaattgtagattgtatcctctttcatttatttttatctatatttacaaatgtgggtcctcaggtccggaaccgcattgctgcttgcgagagggctggaatgatggaatacagaagtgcttccctctctctgctgaatgcctcggtggctgaaggatatgtacgggaagcctgtcgctacaaagtagttagatga

SEQ ID NO: 5572 - DNA, 736 bp, Homo sapiens
  SIMILAR (539)..(736): 711254mologous to Caenorhabditis elegans contains similarity to Pfam family PF00687 (Ribosomal_L1 L1P family of ribosomal proteins), score=233.0, E=4.3e-66, N=1,accession number AC024200,Smith-Waterman Score=236.
ggcggaattcggcgtgagaagccatgagcagcaaagtctctcgcgacaccctgtacgaggcggtgcgggaagttctgcacgggaaccagcgcaagcgccgcaagttcctggagacggtggagttgcagatcagcttgaagaactatgatccccagaaggacaagcgcttctcgggcaccgtcaggttggcaccgttctgatcccacccagccctcagtgcccccgtgcttgcccctcccctgcaggctcccgctgagccggaggcgggcacgtcggtactgatgtgctagggtagttcagaccccctgctccgggcaggcgcggctggacggacccccaccctgggtcttaaaacatgaggggaggcgtgggtaggcctcggccgagcccgccggccagcctgagaagccaggctggctgctggtgaatgtgaacgctccgggtaaggctcgggtggctgctgcggtcccagacccttcaccgggcccttgggaccccagggctaggcgtaacctgttggtgctgtcccccaaaacgcaggcttaagtccactccccgccctaagttctctgtgtgtgtcctgggggaccagcagcactgtgacgaggctaaggccgtggatatcccccacatggacatcgaggcgctgaaaaaactcaacaagaataaaaaactggtcaagaagctggccaagaagtatgatgcgtttttggcctcagagtctctgatcaagcag

SEQ ID NO: 5573 - DNA, 746 bp, Homo sapiens
  SIMILAR (301)..(696): 651254mologous to Rattus norvegicus ribosomal protein L10a,accession number X93352,Smith-Waterman Score=379.
cgtggtgcaattccgcggcgtgagaagccatgagcagcaaagtctctcgcgacaccctgtacgatgcggtgcgggaagtcctgcacgggaaccagcgcaagcgccgcaagttcctggagacggtggagttgcagatcagcttgaagaactatgatccccagaaggacaagcgcttctcgggcaccgtcaggcttaagtccactccccgccctaagttctctgtgtgtgtcctgggggaccagcagcactgtgacgaggctaaggccgtggatatcccccacatggacatcgaggcgctgaaaaaactcaacaagaataaaaaaactggttcaagaagctggcccaagaagtatgatgcgtttttggccttcagagtcctctgattcaagcagattcccccaaatccctcggcccacagtttaaataaaggcaggaaaagttccccttccctgctcacacacaagcaaaaacatggtggccaaagtggatgaggtgaagtccacaatcaagtttccaaattggagaaggtgtttatgtctggctgtagctgttggtcacgtgaagatgacagacgatgagcttgtgtataacattcacctggctgtcaactttttggtgtcattgctcaagaaaaactggcagaatgtccgggccttatatatcaagagccccatgggcaagccccagcgcctatattaaggcacatttgaataaattttattaccagtaaaaaaaaaaaaaaaaaa

SEQ ID NO: 5574 - DNA, 846 bp, Homo sapiens
  SIMILAR (295)..(573): 981254mologous to Homo sapiens proteasome subunit p42,accession number D78275,Smith-Waterman Score=478.
atggccattcccggcatcccctatgagagacggcttctcatcatggcggaccctagagataaggcgcttcaggactaccgcaagaagttgcttgaacacaaggagatcgacggccgtcttaaggagttaagggaacaattaaaagaacttaccaagcagtatgaaaagtctgaaaatgatctgaaggccctacagagtgttgggcagatcgtgggtgaagtgcttaaacagttaactgaagaaaaattcattgttaaagctaccaatggaccaagatatgttgtgggttgtcgtcgacaggtgatagaattacctcttacaaacccagagttatttcagcgtgtaggaataatacctccaaaaggctgtttgttatatggaccaccaggtacgggaaaaacactcttggcacgagccgttgctagccagctggactgcaatttcttaaaggttgtatctagttctattgtagacaagtacattggtgaaagtgctcgtttgatcagagaaatgtttaattatgctagagatcatcaaccatgcatcatttttatggatgaaatagatgctattgatattgatttgccaaatgaacaagcaagattagacatactgaaaatccatgcaggtcccattacaaagcatggtgaaatagattatgaagcaattgtgaagctttcggatggctttaatggagcagatctgagaaatgtttgtactgaagcaggtatgttcgcaattcgtgctgatcatgattttgtagtacaggaagacttcatgaaagcagtcagaaaagtggctgattctaagaagctggagtctaaattggactacaaacctgtgtaa

SEQ ID NO: 5575 - DNA, 1595 bp, Homo sapiens
  SIMILAR (12)..(1085): 701254mologous to Homo sapiens proteasome subunit p42,accession number D78275,Smith-Waterman Score=1112.
ggcttctcatcatggcggaccctagagataaggcgcttcaggactaccgcaagaagttgcttgaacacaaggagatcgacggccgtcttaaggagttaagggaacaattaaaagaacttaccaagcagtatgaaaagtctgaaaatgatctgaaggccctacagagtgttcgggcagatcagtgggtgaagtgcttaaacagttaacctgaagaaaaattcattgttaaagctaccaatggaccaagatatgttgtgggttgtccgtcgacagctttgacaaaaagtaagcctgaagccaggaaccaggagttgctttgggatatgactacactaactattcatggaggatattttgccgaggagaggtggatccactggtttataacatgtcttcatgaggaccctggggaatgtttcttattctgagattggagggctatcagaaccagatccggggaatttaaggagaggtgataggattacctctttacaaaccccagagttattttcagcgtgtagggataatacctcccaaaaggctgtttgttatatgggaccaccaggtaccgggaaaaacactccttggcacgagccgttgctagccagctggactgcaatttcttaaaggttgtatctagttctattgtagacaagtacattggtgaaagtgctcgtttgatcagagaaatgtttaattatgctagagatcatcaaccatgcatcatttttatggatgaaatagatgctattggtggtcgtcggttttctgagggtacttcagctgacagagagattcagagaacgttaatggagttactgaatcaaatggatggatttgatactctgcatagagttaaaatgaccatggctacaaacagaccagatacactggatcctgctttgctgcgtccaggaagattagatagaaaaatacatattgatttgccaaatgaacaagcaagattagacatactcgaaaatccatgcaggtcccattacaaagcatgggtgaaatagattatgaagcaattgtgaagctttcggatgggctttaatggagcagatctgagaaatgtttgtacttgaagcaggtatgttcgcaattcgtgctgatcatgattttgttagtacagggaagacttcattgaaagcagtccagaaaagtggctgattctaagaagctggagtctaaattggactacaaacctgtgtaatttactggtaagatttttgatggctgcatgacagatgttggcttattggtaaaaataaagtttaaagaaaataatggtatgtattggcaatgatgtccattaaaagtatatgaataaaaatatgagtaacatcataaaaattagtaattcaacttttaagatacagaagaaatttgtatgtttgttaaagttgcatttattgcagcaagttacaaagggaaagtgttgaagcttttcatatttgctgcgtgagcattttgtaaaatattgaaagtggtttgagatagtggtataagaaagcatttcttatgacttattttgtatcatttgttttcctcatctaaaaagttgaataaaatctgtttgattcagttctcct

SEQ ID NO: 5576 - DNA, 487 bp, Homo sapiens
  SIMILAR (3)..(482): 981254mologous to Homo sapiens Human secreted protein encoded by gene 45 clone HTTDS54,accession number W75159,Smith-Waterman Score=847.
caggagtctactatgcaactgcatactggatgcctgctgattagacagttcaagtcaaaaatgtaatggacaagaatggggacgcctatggcttttacaataactctgtgaaaaccacaggctggggcatcctggagatcagagctggctatggctctcaaaccctgagcaatgagatcatcatgtttgtggctggctttttggagggttacctcactgccccacacatgaatgaccactacacaaacctctacccacagctgatcacgaaaccttccatcatggataaagtgcaggattttatggagaagcaagataagtggacccggaaaaatatcaaagaatacaagactgattcattttggagacatacaggctatgtgatggcacaaatagatggcctctatgtaggagcaaagaagagggctatattagaagggacaaagccaatgaccctgttccagattcagttcctgaatagtgacga

SEQ ID NO: 5577 - DNA, 1143 bp, Homo sapiens
  SIMILAR (1)..(282): 671254mologous to Mus musculus Pro-Pol-dUTPase polyprotein,accession number Y12713,Smith-Waterman Score=313.
atggacctctttaagtggtcaaaaactgtgaaggcatttgtatcccctgtgaatgctcaccaatgggtaacctcagcagaggaggatattaataatcaagtccataggatgacccgttctgtggacaccattcggcctctatccgcagccacccgtgtcatcgcccaatgggctcatgaacatagtagccatggtggcagtaatggaggtgatgcctgggctcagcaacatggacttccacttaccaaggctgacgtgactatggctaatgccgagaagcaagataagtggacccggaaaaatatcaaagaatacaagactgattcattttggagacatacaggctatgtgatggcacaaatagatggcctctatgtaggagcaaagaagagggctatattagaagggacaaagaaatccttaggtgctcagatcctctgtgtaaactatccctcacctaacccctgccaaaagggtgaaagagccctgtgcatagctgtaaatatgctcccctggtcacagctgattggaataagactcaacggctgcagacctgggcctaccaggctccacagaacaggcaggcaggagcctgagacaagcagaagccccacgccttccgagttgcacccttcagagttagcgcaggacccaagagtctttgcagcctgcacccctgggaccccggtgaccagggcctgtagaaagagtggaggacttctgcgacagggcataatgccagtgcccagggcagtgcctggactgctcacaccaagaggttcccgctggaggttctactccgttgttggctgcttgcttgattccatgcctaaagagtacagaggggattgttgggaacctgctgctatcataaagcaattggagggcctggtggcacacgctgctacaatcttgatgaacaagaacaaagtcacagaaactgttgaaggatctgctttattgaaagcaatgagactaacaaaaattctaggagggcctatatcagatatggagaaatttctaatgacctggactgaagaccagacacagaagtatatccctctcagcaactatagtcaaagcaaatctcttcaggacaatcggtcaaagcaaaaggtttgcaatgttgaaagaaaatattag

SEQ ID NO: 5578 - DNA, 531 bp, Homo sapiens
  SIMILAR (1)..(132): 771254mologous to Mus musculus TIS,accession number D86728,Smith-Waterman Score=172.
atgaatgggccgtcctgtcctaaagagccggaacagctgcggaagctcttcatgggagggctgagctttgaaacaaccgatgagagcctgaggagcccttctgagcagtggagaaggctcacagattgtgtggatgccactgtggaattaagaattaatgaattagagatatttcctgtggaattggatccaaaaagtacaaaaggaaggagcatgcagcttgctcgttcttgggagcataaccggctgagggcaagtgcctttataggaggcaggcagaagggcagtttgacacaagcacagaagagaaggctagggaaaggaggagtagatcgtgatttgaaaatggaagccttgaagactggagtaatggatgcggtcacaagtcaaagaatgttggctgccaccggaagctggaagaggcaggagcagattctccctctagagcttctggagggagcacaatcctgtcgacatcttgatctcaaccctgtgaaactgatttcagaatttctacgtgcagaattgtga

SEQ ID NO: 5579 - DNA, 1086 bp, Homo sapiens
  SIMILAR (142)..(741): 931254mologous to Homo sapiens Amino acid sequence of hSlo3- 1,accession number Y13442,Smith-Waterman Score=971.
atgccagccagctcttccagattttgctcctccaacccaatgaaaaatgtacagctcttctcagaattatctttcattcctacccgactcactgaacagtgtcagtcagagccctggcatcagaaagtagtcatcttgcgagttggtttaaggttcctaagagccttgcgcctgctagaactccctcaaatcttgcaaattttacgagccatcaagaccagtaactcagtgaagttttccaaactgctgtcaataattctcagtacctggttcacagctgcgggattcattcacctggtggaaaattctggtgatccctggctcaaaggtagaaattcacagaatatatcatattttgagtcaatttacctggtcatggcaacaacgtcaaccgttggatttggagatgtggtagccaagacatccttaggacggaccttcatcatgtttttcacactggggagtttgatattatttgcgaactatatacctgaaatggtggaactgtttgctaacaagaggaaatacaccagttcctatgaagcactcaaaggaaagaagtttattgtggtctgtggaaacatcactgtggacagtgtgaccgctttcctgaggaatttcctccgcgacaaaacccctccttctttggaacttgaaaccatatttaaatgctacttggcatacacaacgttcatttctggatctgcaatgaagtgggaggatctgaggcgagttgcggtttatctgccaaagattcccagctggaactgggacaccggagacaacatcatctgctttgctgaattaaaacttggatttatcgcccaaggctgtttggtgccaggcttgtgtaccttcctaacatctctatttgtggagcaaaacaaaaaggttatgcctaaacagacctggaagaaacacttcttgaatagcatgaaaaacaaaattctgacccaacgtctctctgatgactttgctggaatgagctttcctgaagttgcccggctctgctttctgaagatgcacctcctgttgatagccatcgaatacaagtccctctttacggatggtttctggtaccaataa

SEQ ID NO: 5580 - DNA, 474 bp, Homo sapiens
  SIMILAR (73)..(369): 951254mologous to Homo sapiens Human secreted protein vc54_1, SEQ ID NO:48,accession number Y95004,Smith-Waterman Score=506.
atgttcggccggacgcggtggctcacgcctgtaatcccagcactttgggaggccgaggcgggcgaatcacgagaaacgtactacccgacggtctggtgctgggagggtcgaggacagaccctgcttagacctttcatcacttcgaagcccccggtgcagtacaggaatgaacttattaaaactgcagatggaggacagatttcactggactggtttgataatgataacagtacgtgttatatggatgccagcaccagacctactatcttattgttgcctggcctcacgggaacaagcaaggagtcatatatccttcatatgatccatcttagtgaagaattaggatacagcaggggtttcaatgggaggttgcaggaagaggcagaggaagaggaagaggaagaggacgtggccgtggcagaggaagagggggtcctaggcgataatgtctctcaagatttcaaagtcatatga

SEQ ID NO: 5581 - DNA, 2325 bp, Homo sapiens
  SIMILAR (7)..(1416): 1001254mologous to Cloning vector pBACe3.6 levansucrase,accession number U80929,Smith-Waterman Score=2472.
atgaacatgaacatcaaaaaaattgtaaaacaagccacagttctgacttttacgactgcacttctggcaggaggagcgactcaagccttcgcgaaagaaaataaccaaaaagcatacaaagaaacgtacggcgtctctcatattacacgccatgatatgctgcagatccctaaacagcagcaaaacgaaaaataccaagtgcctcaattcgatcaatcaacgattaaaaatattgagtctgcaaaaggacttgatgtgtgggacagctggccgctgcaaaacgctgacggaacagtagctgaatacaacggctatcacgttgtgtttgctcttgcgggaagcccgaaagacgctgatgacacatcaatctacatgttttatcaaaaggtcggcgacaactcaatcgacagctggaaaaacgcgggccgtgtctttaaagacagcgataagttcgacgccaacgatccgatcctgaaagatcagacgcaagaatggtccggttctgcaacctttacatctgacggaaaaatccgtttattctacactgactattccggtaaacattacggcaaacaaagcctgacaacagcgcaggtaaatgtgtcaaaatctgatgacacactcaaaatcaacggagtggaagatcacaaaacgatttttgacggagacggaaaaacatatcagaacgttcagcagtttatcgatgaaggcaattatacatccggcgacaaccatacgctgagagaccctcactacgttgaagacaaaggccataaataccttgtattcgaagccaacacgggaacagaaaacggataccaaggcgaagaatctttatttaacaaagcgtactacggcggcggcacgaacttcttccgtaaagaaagccagaagcttcagcagagcgctaaaaaacgcgatgctgagttagcgaacggcgccctcggtatcatagagttaaataatgattacacattgaaaaaagtaatgaagccgctgatcacttcaaacacggtaactgatgaaatcgagcgcgcgaatgttttcaaaatgaacggcaaatggtacttgttcactgattcacgcggttcaaaaatgacgatcgatggtattaactcaaacgatatttacatgcttggttatgtatcaaactctttaaccggcccttacaagccgctgaacaaaacagggcttgtgctgcaaatgggtcttgatccaaacgatgtgacattcacttactctcacttcgcagtgccgcaagccaaaggcaacaatgtggttatcacaagctacatgacaaacagaggcttcttcgaggataaaaaggcaacatttgcgccaagcttcttaatgaacatcaaaggcaataaaacatccgttgtcaaaaacagcatcctggagcaaggacagctgacatggctccaagtagcgaagcgagcaggactgggcggcggccaaagcggtcggacagtgctccgagaacgggtgcgcatagaaattgcatcaacgcatatagcgctagcagcacgccatagtgactggcgatgctgtcggaatggacgatatcccgcaagaggcccggcaggtgcagaagctgccaatgtgactggcccggatggagttcctgtggaagggagtcgttacgctgcagatcggcgccgttacagacgtggctactatggaaggcgccgtggccctccccggaattacgctggggaggaggaggaggaagggagcggcagcagtgaaggatttgacccccctgccactgataggcagttctctggggcccggaatcagctgcgccgcccccagtatcgccctcagtaccggcagcggcggttcccgccttaccacgtgggacagacctttgaccgtcgctcacgggtcttaccccatcccaacagaatacagagttacccctggtctctcccttacccgttacctcaccaacaacttctaaagccattaaatgggcagatcaaggctggtgagattggagagatgaaggatggagtcccagagggagcacaacttcagggaccggttcatcgaaatccaacttaccgcccaaggtaccgtagcaggggacctcctcgcccacgacctgccccagcagttggagaggctgaagataaagaaaatcagcaagccaccagtggtccaaaccagccgtctgttcgccgtggataccggcgtccctacaattaccggcgtcgcccgcgtcctcctaacgctccttcacaagatggcaaagaggccaaggcaggtgaagcaccaactgagaaccctgctccacccacccagcagagcagtgctgagtaa

SEQ ID NO: 5582 - DNA, 681 bp, Homo sapiens
  SIMILAR (325)..(534): 981254mologous to Homo sapiens DNA-binding protein A,accession number M24069,Smith-Waterman Score=378.
atgcccaggcagaagtttgctgcaggttcgggtccctcatggagaacttctgctagggcagtgtggaaaggaaatgtggggttggagcccccacacagagttcctactggtgcactacctagtggagctgtgagaatagggccaccatcctccagaccccagaatggtagatctaccgacagcttgctccatgtgcctggaaaagtcacagacactcaacaccagcccatgaaagcagccaggaatgggactataccctgcaaagccacaggggcggagctgcccaaggccatgggagcccactttttgcatcagcatgacctggattacgctggggaggaggaggaggaagggagcggcagcagtgaaggatttgacccccctgccactgataggcagttctctggggcccggaatcagctgcgccgcccccagtatcgccctcagtaccggcagcggcggttcccgccttaccacgtgggacagacctttgaccgtcgctcacgggtcttaccccatcccaacagaatacagcaatcctcacccttccgtccttctctgcctcctcttcctcctcctcctccaacatcagctgccagaaaccttgcttatggcttcctgatgctacaaaagctgaggcaaggccttcagtctgttttttcaaagcagtcattccggtaa

SEQ ID NO: 5583 - DNA, 1590 bp, Homo sapiens
  SIMILAR (27)..(608): 911254mologous to Homo sapiens Cellular DNA-binding protein RS1,accession number R14163,Smith-Waterman Score=905.
gaattcgggcgggggagcccaaggagcgagcgcgccagacgaagctcgagccgcctccgccagcgcgaccccacctcggccgccgccgcctgcgccgcgagatccgccccggcctccccgagagcgagccccggccgccgcgaccaccagccgcgctaaccgccgaccaaccgccaccgaggcgcctgagcgagagcagaggaggaggaggcatgagtgaggcgggcgaggccaccaccaccaccaccaccaccctcccgcaggctccgacggaggcggccgccgcggctccccaggaccccgcgcccaagagcccggtgggcagcggtgcgccccaggccgcggccccggcgcccgccgcccacgtcgcaggaaaccccggtggggacgcggcccccgcagccacgggcaccgcggccgccgcctctttagccaccgccgccggcagcgaagacgcggagaaaaaagttctcgccaccaaagtccttggcactgtcaaatggttcaacgtcagaaatggatatggatttataaatcgaaatgacaccaaagaagatgtatttgtacatcagactgccatcaagaagaataacccacggaaatatctcgcgcagtgtaggagatggagaaactgtagagtttgatgtggttgaaggagagaagggtgcagaagctggccaatgtgactggcccggatggagttcctgtggaagggagtcgttacgctgcagatcggcgccgttacagacgtggctactatgggaaggcgccgtggccctccccggaatttcctttgggaagaagaagaagaaagggagcggcaccagttgaaggatttgaccccccctgccactgataggcagttctctggggccccggaatcatctggcgccgcccgcagtatcgccctcagtagcggcgagcggcggtgtccgcgtttaccacgtgggacagacctttgaccgtcgctcacgggtcttaccccatcccaacagaatacaggctggtgagattggagagatgaaggatggagtcccagagggagcacaacttcagggaccggttcatcgaaatccaacttaccgcccaaggtaccgtagcaggggacctcctcgcccacgacctgccccagcagtttggagaggctgaagataaaagaaaatcagcaagccaccagtggtccaaaccagccgtcttgttcgccgttgataaccggggtccctaacaattaccgggcgtcgcccgcgttccttcctaacgctcctttacaagattggcaaaaaaggccaaggcaggtgaagcaccaactgagaaccctgctccacccacccagcagagcagtgctgagtaacaccaggctcctcaggcaccttcaccatcggcaggtggacctaaagaattagatgaccattcagaaataaagcaaaaagcaggccacataccttaaccaacaccaaagaaacatccaagcaataaagtggaagactaaccaagatttggacattggaatgtttactgttattctttaagaaacaactacaaaaagaaaatgtcaacaaatttttccagcaagctgagaacctggaattc

SEQ ID NO: 5584 - DNA, 431 bp, Homo sapiens
  SIMILAR (76)..(96): 711254mologous to Homo sapiens Polypeptide fragment encoded by gene 107,accession number W88917,Smith-Waterman Score=37.
attcggtctgcacaagtggggcctagggctggaagcttcttctccgtgcggaccgctgactccctcttaccttgggttccctcggccccaccctggaacgctgggccttggcagattctggcccttcctggcccttcagtcgctgtcagaaaccccatctcatgctcggatgccccgagtgactgtggctcgcacctctccggaaacattggaaatctctcctctacgcgcggccacctgaaaccacaggagctcgggacacacgtgctttcgggagagaatgctgagagtctcttgccgactctctcttgacttgagttcttcgtgggtgcgtggttaagacgtagtgagaccagatgtattaactcaggccgggtgctggtcgtcacgcctgtaaccccaacactttgggaggccgaggccgtaggatc

SEQ ID NO: 5585 - DNA, 786 bp, Homo sapiens
  SIMILAR (193)..(636): 641254mologous to Homo sapiens Human homologue of S. pombe nuc2+ and A. nidulans bimA,accession number U00001,Smith-Waterman Score=441.
atggcggccgtgtgtcccgagctcctgtggtttcaggtgaccacgcgtagaggagagatttccaatgtttccagagaggcgcgagccgcagtcattcggggcatccgagcacgagatggggtttctgacagcgacttaagggccaggaagggccagaatctgccaaggcccatgtcccagggtggggtcgatggaacccaaggaacttccatattatctaaacaggttcaaaataaaccaaaaactggtcgaagtttattaggaggaccaggagatcttagtccattaaccccaagttttgggattttgccattagaaaccccaagtcctggagatggatcctatttacaaaactacactaatataccttctgaaattgaggtgccatccaccggagccccttcaaaaaagtctgttgccagaattggccaaactggagcaaagtctgtcttctcacagagtggaaatagacgagagtggggacccttgtgtgtggaagtctccatcccttttctacttaagccgatgaaggccgggttctcaagagtctccccggagtcagggccttggcgcagggctcacaagatgctgacggctggtgacggtgatattctacaaaaaagtgtttcaaaattgttcaacaatagaaaggttcaactctgtgtgaatgaatgcatacatcgcaaagatgtttctcagaatgcttctgtgtaccttttatctgaagatattcgcttttccacagcaggcctcaaagggctccaaatatccacttgcagattctaa

SEQ ID NO: 5586 - DNA, 2747 bp, Homo sapiens
  SIMILAR (426)..(2393): 631254mologous to Homo sapiens H-NUC=nuclear DNA binding protein,accession number S78234,Smith-Waterman Score=1821.
cggaattcgcggccgcgtttaaatgagctggggctggccgggccggagccgctacagggggggcctgaggcactgcagaaagtgggcctgagcctcgaggatgacggtgctgcaggaacccgtccaggctgctatatggcaagcactaaaccactatgcttaccgagatgcggttttcctcgcagaacgcctttatgcagaagtacactcagaagaagccttgtttttactggcaacctgttattaccgctcaggaaaggcatataaagcatatagactcttgaaaggacacagttgtactacaccgcaatgcaaatacctgcttgcaaaatgttgtgttgatctcagcaagcttgcagaaggggaacaaatcttatctggtggagtgtttaataagcagaaaagccatgatgatattgttactgagtttggtgattcagcttgctttactctttcattgttgggacatggacatgtgcagacagagcgcgctgccaaagggaccgcattctcaccaaagcgcctgtgtttacacacctttccctcggactcccctggaaccattagtggaaataggggaaaggccactcccgcaccaaacattcaattctcacttcttgacggaactttgcaaactgtctgcacacctctggcacaaaacaagtcactaatcgatgttttctctcacagacagcctgagacagttcttacggaaacaccccagggacacaattgaattaaacagattgaatttagaatcttccaattcaaagtactccttgaatacagattcctcagtgtcttatattgattcagctgtaatttcaccctgatactgtcccactgggaacagggaacttccatattatctaaaccggttcaaaaataaaccaaaaactggtcgaagtttattaggaggaccagcagctcttagtccattaacccccaagttttggggatttttgcccattaggaaacccccaaagtcctggacgatggatcctaatttacaaaactacactaatacacctcctgtaattgatgtgccatccaccggagccccttccaaaaagacttttcgtgttttacagtctgttgccagaatcggccaaactggaacaaagtctgtcttctcacagagtggaaatagccgagaggtaactccaattcttgcacaaacacaaagttctggtccacaaacaagtacaacacctcaggtattgagccccactattacatctcccccaaacgcactgcctcgaagaagttcacgactctttactagtgacagctccacaaccaaggagaatagcaaaaaattaaaaatgaagtttccacctaaaatcccaaacagaaaaacaaaaagtaaaactaataaaggaggaataactcaacctaacataaatgatagcctggaaattacaaaattggactcttccatcatttcagaagggaaaatatccacaatcacacctcagattcaggcctttaatctacaaaaagcagcagcagaaggtttgatgagccttcttcgtgaaatggggaaaggttatttagctttgtgttcatacaactgcaaagaagctataaatattttgagccatctaccttctcaccactacaatactggttgggtactgtgccaaattggaagggcctattttgaactttcagagtacatgcaagctgaaagaatattctcagaggttagaaggattgagaattatagagttgaaggcatggagatctactctacaacactttggcatcttcaaaaagatgttgctctttcagttctgtcaaaagacttaacagacatggataaaaattcgccagagtcagggactcagagaggaagagaaagtcctagaatgtgtggtgcagattcacaaatagaaaaatcacaaagcagctatttcattcaggatttatcgagatttgactacgttaaatttgctgttgtcaccaagattagggcctggtgtgctgcagggaactgtttcagtctgcaacgggaacatgatattgcaattaaattcttccagagagctatccaagttgatccaaattacgcttatgcctatactctattagggcatgagtttgtcttaactgaagaattggacaaagcattagcttgttttcgaaatgctatcagagtcaatcctagacattataatgcatggtatggtttaggaatgatttattacaagcaagaaaaattcagccttgcagaaatgcatttccaaaaagcgcttgatatcaaccctcaaagttcagttttactttgccacattggagtagttcaacatgcactgaaaaaatcagagaaggctttggataccctaaacaaagccattgtcattgatcccaagaaccctctatgcaaatttcacagagcctcagttttatttgcaaatgaaaaatataagtctgctttacaagaacttgaagaattgaaacaaattgttcccaaagaatccctcgtttacttcttaataggaaaggtttacaagaagttaggtcaaacgcacctcgccctgatgaatttctcttgggctatggatttagatcctaaaggagccaataaccagattaaagaggcaattgataagcgttatcttccagatgatgaggagccaataacccaagaagaacagatcatgggaacagatgaatcccaggagagcagcatgacagatgcggatgacacacaacttcatgcagctgaaagtgatgaattttaa

SEQ ID NO: 5587 - DNA, 752 bp, Homo sapiens
  SIMILAR (562)..(431): 341254mologous to Aquifex aeolicus ser/thr protein kinase,accession number AE000696,Smith-Waterman Score=64.
ccttttttttttttttttttttttgcatagccaaacatctttatttttcacaacctgaatactaaagatacaactcaactagtcccagaacatttctagatatttctgtgtattaaccaaaccaaacaaagtttttaaaaagaacctctgcaacaacaacaataataatttaacaatcaaagttggcttcaccatttcttggcttctccatacatttatccaagttctccgtctttatttcttcttcctttttatatagggtgaattcagtatctttttctgggtttggaactgattgctcctttggcatcaagaaacattcagcatttaaaacttgttcagcagtcattgaacttctataacatatcaagctacagaggagggatttgactttatcatccagatgaaactgatccactttggggattccatctttatttatctcaaactcctgattttgaacagaaagccataataagaggcagccataagcatataagtctgaacctggagaagcaggttttcccattttcaactcaggtgacatcaaactcaagtcaccaaccattcatggttcaccgaggctcgctgactcacagatttggtgaagtcaaaatctccaacaattccttgttcacggtttaaagcaaatacattgttctgatgaagtgatccatgaattatgtcagccttatgcaatgtatgcagaccctgggcaacacctttcatgacctttaaagtttcttctgaat

SEQ ID NO: 5588 - DNA, 1455 bp, Homo sapiens
  SIMILAR (1021)..(1452): 811254mologous to Homo sapiens NAG13,accession number AF194537,Smith-Waterman Score=613.
aaatggttccctgagctgcctctgcttcatcctgaaataggattactcaaatacatgaactctgggggtctccttacaatgagcttggaacgagatcttcttgatgctgagcccatgaaggaacttatcagcaagcgtcctttggtacgttctgaggttaatgggcagataattctgttaaagggctattctgtggatgttgacacagaagccaaggtgattgagagagcagccacctaccatagagcttggagagaagctgaaggagactcagggttactgccattgatattcctgtttttatgtaagtctgatcctatggcttatctgatggtcccatactaccctagggcaaacctgaatgctgttcaagccaacatgcctttaaattcagaagaaactttaaaggtcatgaaaggtgttgcccagggtctgcatacattgcataaggctgacataattcatggatcacttcatcagaacaatgtatttgctttaaaccgtgaacaaggaattgttggagattttgacttcaccaaatctgtgagtcagcgagcctcggtgaacatgatggttggtgacttgagtttgatgtcacctgagttgaaaatgggaaaacctgcttctccaggttcagacttatatgcttatggctgcctcttattatggatacccgaaaatgtggaagcagctttggaactgcgtcatgggcagaggttggagggctcagaagaggacaggaagatgtgggaaagtttggaacttcctagagacttgttgaatggctttgagcaaaatgctgatagtgatatggccagtgaagtccaggttgaggacaatggggaaagtatctccagggcatgtcagaaagcttcgcagcagcccttcccatcacaggcacagaggcctaggaggaaaaaatggtttcatgggctgggccagcggtccccctgctgtgtgcagccttcagacatggtgccctgtgtcccacctgctccagtcatggctaaaaggggccaagaaatccaagctaccgtcacagaatgcaataaacacctctatgcaaatcaactagaaaatctagaagaaatggaaaaattcctggacacatacaccctcccaagactaaatcagcaagaagtcgaatccctgaatagaccaacaataagttctgaaattgaggcagttattaatagcctaccaaccaaaaaaagtccaggaccagacagatacacagtcgaattccaccagaggtacaaagaggagctagtaccattctttctgaaactgttccaaacagtagaaaaagagggaatcctccctaactcattttatgaggccggcatcatcctggtaccaaaacgtgccagagacacaacaaaaaaagaaaatttcaggccaatatccctgatgaacattgatgcaaaaatcctcaataaaatactggcaaactga

SEQ ID NO: 5589 - DNA, 1637 bp, Homo sapiens
  SIMILAR (86)..(1561): 1001254mologous to Homo sapiens GABAA receptor alpha3,accession number A28102,Smith-Waterman Score=2572.
gaattccttgtttcagttcattcatccttctctcctttccgctcagactgtagagctcggtctctccaagtttgtgcctaagaagatgataatcacacaaacaagtcactgttacatgaccagccttgggattcttttcctgattaatattctccctggaaccactggtcaaggggaatcaagacgacaagaacccggggactttgtgaagcaggacattggcgggctgtctcctaagcatgccccagatattcctgatgacagcactgacaacatcactatcttcaccagaatcttggatcgtcttctggacggctatgacaaccggctgcgacctgggcttggagatgcagtgactgaagtgaagactgacatctacgtgaccagttttggccctgtgtcagacactgacatggagtacactattgatgtattttttcggcagacatggcatgatgaaagactgaaatttgatggccccatgaagatccttccactgaacaatctcctggctagtaagatctggacaccggacaccttcttccacaatggcaagaaatcagtggctcataacatgaccacgcccaacaagctgctcagattggtggacaacggaaccctcctctatacaatgaggttaacaattcatgctgagtgtcccatgcatttggaagattttcccatggatgtgcatgcctgcccactgaagtttggaagctatgcctatacaacagctgaagtggtttattcttggactctcggaaagaacaaatccgtggaagtggcacaggatggttctcgcttgaaccagtatgaccttttgggccatgttgttgggacagagataatccggtctagtacaggagaatatgtcgtcatgacaacccacttccatctcaagcgaaaaattggctactttgtgatccagacctacttgccatgtatcatgactgtcattctgtcacaagtgtcgttctggctcaacagagagtctgttcctgcccgtacagtctttggtgtcaccactgtgcttaccatgaccaccttgagtatcagtgccagaaattccttacctaaagtggcatatgcgacggccatggactggttcatagccgtctgttatgcctttgtattttctgcactgattgaatttgccactgtcaactatttcaccaagcggagttgggcttgggaaggcaagaaggtgccagaggccctggagatgaagaagaaaacaccagcagccccagcaaagaaaaccagcactaccttcaacatcgtggggaccacctatcccatcaacctggccaaggacactgaattttccaccatctccaagggcgctgctcccagtgcctcctcaaccccaacaatcattgcttcacccaaggccacctacgtgcaggacagcccgactgagaccaagacctacaacagtgtcagcaaggttgacaaaatttcccgcatcatctttcctgtgctctttgccatattcaatctggtctattgggccacatatgtcaaccgggagtcagctatcaagggcatgatccgcaaacagtagatagtggcagtgcagcaaccagagcactgtataccccgtgaagcatccaggcacccaaaccccggggctcccc

SEQ ID NO: 5590 - DNA, 447 bp, Homo sapiens
  SIMILAR (43)..(285): 881254mologous to Homo sapiens GABAA receptor alpha3,accession number A28102,Smith-Waterman Score=375.
atgagtgaaggaatccgtcatacagctctagaagctgaaaaaggtgtcaccactgtgcttaccatgaccaccttgagtatcagtgccagaaattccttacctaaagtggcatatgcgacggccatggactggttcatagccgtctgttatgcctttgtattttctgcactgattgaatttgccactgtcaactatttcaccaagcggagttgggcttgggaaggcaagaaggtgccagaggccctggagatgaaggataaaagtgaaacttctgctagccgtgaagcattagaagcattagatccacagaggcaagggacagggaaatcacaaatcggcatcaacagaggaccggaggttcccgatatggtgggagaaaagtgcctgggccagggtgtggaatgtggagtgtatggaaggaagaatttgactttcatctgccagtag

SEQ ID NO: 5591 - DNA, 345 bp, Homo sapiens
  SIMILAR (2)..(343): 921254mologous to Rattus norvegicus heat shock factor 2,accession number AF172640,Smith-Waterman Score=530.
tttgaatgataacatcaatcttttgggaaaggttgagctgttggattatcttgacagtattgactgcagtttagaggacttccaggccatgctatcaggaagacaatttagcatagacccagatctcctggttgattctgagaataaaggattagaaactaccaagaacaatgtagttcagccagtttcggaagagggaagaaaatctaaatccaaaccagataagcagcttatccagtataccgcctttccacttcttgcattcctcgatgggaaccctgcttcttctgttgaacaggcgagtacaacagcatcatcagaagttttgtcctctgtagataaacc

SEQ ID NO: 5592 - DNA, 2468 bp, Homo sapiens
  SIMILAR (1188)..(1340): 581254mologous to Mus musculus heat shock transcription factor 2,accession number X61754,Smith-Waterman Score=154.
gcgttctcgggaagctgctgccgtagctgccgccgccgctaccaccgcgttcgggtgtagaatttggaatccctgcgccgcgttaacaatgaagcagagttcgaacgtgccggctttcctcagcaagctgtggacgcttgtggaggaaacccacactaacgagttcatcacctggagccagaatggccaaagttttctggtcttggatgagcaacgatttgcaaaagaaattcttcccaaatatttcaagcacaataatatggcaagctttgtgaggcaactgaatatgtatggtttccgtaaagtagtacatatcgactctggaattgtaaagcaagaaagagatggtcctgtagaatttcagcatccttacttcaaacaaggacaggatgacttgttggagaacattaaaaggaaggtttcatcttcaaaaccagaagaaaataaaattcgtcaggaagatttaacaaaaattataagtagtgctcagaaggttcagataaaacaggaaactattgagtccaggctttctgaattaaaaagtgagaatgagtccctttggaaggaggtgtcagaattacgagcaaagcatgcacaacagcaacaagttattcgaaagattgtccagtttattgttacattggttcaaaataaccaacttgtgagtttaaaacgtaaaaggcctctacttctaaacactaatggagcccaaaagaagaacctgtttcagcacatagtcaaagaaccaactgataatcatcatcataaagttccacacagtaggactgaaggtttaaagccaagggagaggatttcagatgacatcattatttatgatgttactgatgataatgcagatgaagaaaatatcccagttattccagaaactaatgaggatgttatatctgatccctccaactgtagccagtaccctgatattgtcatcgttgaagatgacaatgaagatgagtatgcacctgtcattcagagtggagagcagaatgaaccagccagagaatccctaagttcaggcagtgatggcagcagccctctcatgtctagtgctgtccagctaaatggctcatccagtctgacctcaggaagatccagttgaccatggatgggttcccttttggaatggataacattcaatctttttggggaagggttgagctgtttggattatccttgacagtattgactgcagtttagaggacttccaggccatgctatcaggaagacaatttagcatagacccagatctcctggttgatcttttcactagttctgtgcagatgaatcccacagattacatcaataatacaaaatctgagaataaaggattagaaactaccaaggaacaatgtagttcagccagtttcggaagaggggaaggaaaatcttaaatccaaaccaggataaggcagcttatccagtataccgcctttccacttcttgcattcctcgatggggaaccctgcttcttctgtttgaacagggcgaggtacaacagcatcattcaggaagttttgtcctctgtaggataaacccatagaagttgatgagcttctggatagcagcctagacccagaaccaacccaaagtaagcttgttcgcctggagccattgactgaagctgaagctagtgaagctacactgttttatttatgtgaacttgctcctgcacctctggatagtgatatgccacttttagatagctaaatccccaggaagtggactttacatgtatatattcatcaaaatgatgaactatttattttaaagtatcatttggtactttttttgtaaattgctttgttttgtttaatcagatactgtggaataaaagcaccttttgcttttctcactaaccacacactcttgcagagctttcaggtgttactcagctgcatagttacgcagatgtaatgcacattattggcgtatctttaagttggattcaaatggccatttttctccaattttggtaaattggatatcttttttttacaaatacgaccattaacctcagttaaatttttgtttgttttcctgtttgatgctgtctatttgcattgagtgtaagtcatttgaactaatggtataactcctaaagctttctctgctccagttatttttattaaatatttttcacttggcttatttttaaaactgggaacataaagtgcctgtatcttgtaaaacttcatttgtttcttttggttcagagaagttcatttatgttcaaagacgtttattcatgttcaacaggaaagacaaagtgtacgtgaatgctcgctgtctgatagggttccagctccatatatatagaaagatcgggggtgggatgggatggagtgagccccatccagttagttggactagttttaaataaaggttttccggtttgtgtttttttgaaccatactgtttagtaaaataaatacaatgaatgttgagtactagtg

SEQ ID NO: 5593 - DNA, 253 bp, Homo sapiens
  SIMILAR (44)..(244): 671254mologous to Mus musculus channel interacting PDZ domain protein,accession number AF060539,Smith-Waterman Score=221.
tgctcttatattcaaaaagcaacaggcaatggcgatggcagagaggaggaaaaatgatgtaggaaatgaagtgacctatccaagccccaaagctaaggaagcggaggaagagctcagtgatgcccttggaatcagtattgctggaggaagaggaagtcccttaggagatatccccgtatttattgccatgattcaggctagcggagtggccgcacggacacagaagcttaaagtaaacgagagaactggttga

SEQ ID NO: 5594 - DNA, 413 bp, Homo sapiens
  SIMILAR (105)..(413): 601254mologous to Mus musculus hematopoietic zinc finger protein,accession number AF118566,Smith-Waterman Score=302.
acggtactgcagggacaccagcaatatcaacgacgacaactgtggaaatccgcaaaagcagtgttatgacaactgagatcacctctaaagtggaaaaaagcccaacgacagccactggcaatagctcatgtccttctactgagaccgaggaagaaaaggcaaaacggcttctttactgttcgctatgcaaggttgctgtcaactctgcctcgcagctggaggcgcacaacagtggtactaagcacaaaaccatgttagaagcccggaatggaagtggcactatcaaagcctttcctagggcaggagtgaaaggcaaaggacctgttaataaaggaaacacaggcctccaaaataaaacatttcactgtgaaatctgtgatgtgcacgtcaactcggaaacgcaacttaaacag

SEQ ID NO: 5595 - DNA, 986 bp, Homo sapiens
  SIMILAR (772)..(638): 441254mologous to Homo sapiens MHC ClassII HLA-DR-beta 1 chain,accession number D63586,Smith-Waterman Score=81.
ggcttggaccttttagtgggttcctggctcctgaactgcagaagtaccaaaaacaaattaaagagccaaatgaggagcagagtctgagatctaataacattgcagagctgagtccaggagcaatcaattcctgtcgaagtgaataccatgcagcttttaacagtatgatgatggaacgcatgaccacagatatcaatgcactgaagcggcagtactctcgaattaaaaagaagcaacagcagcaggttcatcaggtgtacatcagggcaggaaagaagatgaaaatgactaacagagctgccaagaatgctgtcatccacatccctggtcacacaggagggaaaatatctcctgtcccctacgaagaccttaagacgaagctcaactccccgtggcgaactcacatccgagtccacaaaaagaacatgccaaggaccaagagtcatccgggctgtggggacaccatagggctgatagatgagcagaacgaggccagcaagaccaatgggctgggggcagcagaggcattcccctctggttgtacagcgacagctgggagagaaggcagcagccctgaaggcagtaccaggaggacgatcgaggggcagtctccggagccggtgttcggagatgctgatgtggatgtgtctgcagttcaggcgaagttgggagccctggaactgaaccagagggatgctgcagctgaaactgagctcagggtgcacccaccctgccagcggcactgcccagagccgccgagtgcacccgaagaaaacaaagccaccagcaaagctccccaaggcagcaactcaaaaacccccatctttagcccttttcccagcgtcaagcccctgcggaaatctgctactgccaggaacttgggattatatggccctacagaaagaaccccaactgtgcactttcctcaaatgagtaggagcttcagcaaacccggcggtggaaacagtggcactaaaaaacgatga

SEQ ID NO: 5596 - DNA, 3504 bp, Homo sapiens
  SIMILAR (1789)..(3501): 911254mologous to HERV-H/env62 envelope protein,accession number AJ289709,Smith-Waterman Score=2697.
atggttggatactttcgcctttggatacctggttttgccatcctaacaaaaccattatataaactcacaaaaggaaacttagctgaccccatagatcctaaatcctttccccactcctctttctgttccttgaagacagctttagaaactgcccccactctagctctccctgactcatcccaacctgcttcattacacacagccgaagtgcagggctgtgcagtcggaattcttacacaaggaccaggatcgcgtcctgtagcctttttgtccaaacaacttgatcttactgttttaggctggccatcatgtctccgtgcagccgctgctgctgccctaatacttttagaggccctcaaaatcacaaactatgctcaactcactctctacagctctcataatttccaaaatctattttcttcctcacacctgacacatatactttctgctcccggactccttcagctatacttacactttgttgagtctcccacaattaccattgttcctggcccggacttcaatccggcctcccacattattccggataccacacctgaccctcatgactgcatctctctgatccacctgacattcaccccatttccccacatttccttcttccctgtttctcaccctgatcacacttggtttattgatggcagttccaccaggcctaatcgccactcaccagcgaaggcaggctatgctatagtatcttccacatctatcattgaggctactgctctgcctccctccactacctctcagcaagctgaactagttgccttaactcaagccctcactcttgcaaaaggactatgcgtcaatatctatactgattctaaatatgccttccatatcctgcaccaccatgcagtcatatgggctgaaagaggtttcctcactacacaagggtcctccatcattaatgcctctttaataaaaactctgctcaaagccgctttacttccaaaagaagctggggtcattcactgcaaggggcatcaaaaggcatcagatcccattgctctaggcaatgcttatgttgataaagtggctagacaagcagctagctctccaacttctgtccctcacggccagtttttctccttcacttcagtcactcccacctactcccccactgaaacttccacctatcaatctcttcccacacaaggcaaatggttcttagaccaaggaaaatatcttcttccagcctcacaggcccattctattctgtcatcatttcataacctcttctatgtagacataattcctcggtttggccttcccacctctatacagtctgataacggaccagcctttactagccaaatcacccaagtagtttctcaggctcttggtattcagtggaaccttcataccccttaccgtcctcaatcttcaggaaaggtggaacggactaatggtcttttaaaggcacacctcaccaagtttagcctccaacttacaaaggattggacagcacttttacctcttgctcttctcaaaatcagagcctgtcctcgagatgctacaggatacagtccatttgaacttttatatggacgcactttcttgcttggccccaacctcatcccagacaccagccctctaggcgactatcttccagtactccagcaggctagacaggaaattcgccaggctgctaatcttctcttgcctactccagatccccagccatatgaagacaacctagctggacgatcagttcttgttaagaatctgacccctcaaactctacaacctcgatggaccggaccctacttagtcatctatagtaccccgactgccgtctgcctgcagaatcctccccactgggttcaccattccagaataaagctgtgtccatcggacagccagcctaatccctcctcttcctcctggaagtcgcaagtactctcccccacttcccttaaactcactcatatttctgaagaacatgcctacacagctgtccccgccttacagacagactgggcaacatctcccatctccctacacctccgaacttcctttaacagccctcacctttaccctcctgaagaactcatttactttctagacaggtccagcaagacttccccagacatttcacatcagcaagctgccgccctccttcgcacttatttaaaaaacctttctccttatatcaactctactccccccatatttggacctctcacaacacaaactactattcctgtggccgctcctttgtgtatctcttggcaaagacccactggaattcccctaggtaatctttcaccttctcgatgttcctttactcttcatctccgaagtccaactacaaacatcaatgaaacaattggagccttccagctccatattacagacaagccctctatcaatactgacaaacttaaaaacattagcagtaattattgcttaggaagacacttgccctgtatttcactccatccttggctatcttccccttgctcatcagactctcctcccaggccctcttcttgtttacttatacccagccccgaaaataacagtgaaagattgctcgtagatactcgacgttttctcatacaccatgaaaatcgaaccttcccctctacgcagttaccccatcagtccccattacaacctctgacagctgccgccctagctggatccctaggagtctgggtacaagacacccctttcagcactccttctcacctttttactttacatctccagttttgcctcgcacaaggtctcttcttcctctgtggatcctctacctacatgtgcctacctgccaattggacaggcacatgtacactagtcttccttacccccaaaattcaatttgcaaatgggaccgaagagctccctgttcccctcatgacaccgacacaacaaaaaagagttattccactaattcccttgatggtcggtttaggactttctgcctccactgttgctctcggtactggaatagcaggcatttcaacgtctgtcatgaccttccgtagcctgtctaatgacttctctgctagcatcacagacatatcacaaactttatcagtcctccaggcccaagttgactctttagctgcagttgtcctccaaaaccgccgaggccttgacttactcactgctgaaaaaggaggactctgcatattcttaaatgaggagtgttgtttttacctaaatcaatctggcctggtgtatgacaacattaaaaaactcaaggatagagcccaaaaacttgccaaccaagcaagtaattacgctgaacccccttgggcactctctaattggatgtcctgggtcctcccaattgttagtcctttaatacccatttttctccttcttttatttggaccttgtatcttccgtttagtttctcaattcatccaaaaccgtatccaggccatcaccaatcattctatacgacaaatgtttcttctaacatccccacaatatcaccccttaccacaagacctcccttcagcttaa

SEQ ID NO: 5597 - DNA, 1755 bp, Homo sapiens
  SIMILAR (1)..(1752): 991254mologous to HERV-H/env62 envelope protein,accession number AJ289709,Smith-Waterman Score=3072.
atgatctttgctggcaaggcaccctccaatacttccaccctgatgaagttctattctttacttttatactcactcttattctcattcccattcttatgtcatcctctacctctccccagctatctccaccacactatcaaccttacccattctctcctagccgcttctaatccctccttagtgaacaactgctggctttgcatttccctttcttccagtgcctacacagctgtccccgccgtacagacagactgggcaacatctcccatctccctacacctccgaacttcctttaacagccctcacctttaccctcctgaagaactcatttactttctagacaggtccagcaagacttccccagacatttcacatcagcaagctgccgccctccttcgcacttatttaaaaaacctttctccttatatcaactctactccccccatatttggacctctcacaacacaaactactattcctgtggccgctcctttgtgtatctcttggcaaagacccactggaattcccctaggtaatctttcaccttctcgatgttcctttactcttcatctccgaagtccaactacaaacatcaatgaaacaattggagccttccagctccatattacagacaagccctctatcaatactgacaaacttaaaaacattagcagtaattattgcttaggaagacacttgccctgtatttcactccatccttggctatcttccccttgctcatcagactctcctcccaggccctcttcttgtttacttatacccagccccgaaaataacagtgaaagattgctcgtagatactcgacgttttctcatacaccatgaaaatcgaaccttcccctctacgcagttaccccatcagtccccattacaacctctgacagctgccgccctagctggatccctaggagtctgggtacaagacacccctttcggcactccttctcacctttttactttacatctccagttttgcctcgcacaaggtctcttcttcctctgtggatcctctacctacatgtgcctacctgccaattggacaggcacatgtacactagtcttccttacccccaaaattcaatttgcaaatgggaccgaagagctccctgttcccctcatgacaccgacacaacaaaaaagagttattccactaattcccttgatggtcggtttaggactttctgcctccactgttgctctcggtactggaatagcaggcatttcaacgtctgtcatgaccttccgtagcctgtctaatgacttctctgctagcatcacagacatatcacaaactttatcagtcctccaggcccaagttgactctttagctgcagttgtcctccaaaaccgccgaggccttgacttactcactgctgaaaaaggaggactctgcatattcttaaatgaggagtgttgtttttacctaaatcaatctggcctggtgtatgacaacattaaaaaactcaaggatagagcccaaaaacttgccaaccaagcaagtaattacgctgaacccccttgggcactctctaattggatgtcctgggtcctcccaattgttagtcctttaatacccatttttctccttcttttatttggaccttgtatcttccgtttagtttctcaattcatccaaaaccgtatccaggccatcaccaatcattctatacgacaaatgtttcttctaacatccccacaatatcaccccttaccacaagacctcccttcagcttaa

SEQ ID NO: 5598 - DNA, 1064 bp, Homo sapiens
  SIMILAR (175)..(783): 901254mologous to HERV-H/env62 envelope protein,accession number AJ289709,Smith-Waterman Score=932.
atggatgaggagaaaagggaacacttaaatgctcttggtcgaagggcactgggtgaaggtccaatgtatcagtgcacacgggggagtggggcggggaattatctcaccacctacgtacgggagcccgaacaaaaggctctggccattttatggacccaggggtggggatggggccctgtaaataacagtgaaaggttgctcgtagatactcaacgttttctcatacaccatgaaaatcgaacctcctcctctgtgcagttacctcatcagtccccattacaacctctgatggctgtggccctagctggatccctaggagtctgggtacaagacacccctttcagcactccttctcatctttttactttgcatctccagttttgcctcgcacaaggtgtcttcttcctctgtgtatcctctacctacatgtgtctacctgctaattggacaggcacatgcacactagttttccttactcccaaaattcaatttgcaaataggaccgaagagctccctgttcccctcatgacaccaacacgacaaaaaagagttattccactaattcccttgcttgttggtttaggactttctgcctccactattgctctcggtactggaataggaggcatttcaacctctgtcacgaccttccatagcctctctagtgtcttctctgctagcatcacagacatatcacaaactttatcagtcctccaggcccaagttgactctttagctgcagttatcctccaaaaccaccgaggccttgacttactcactgctgtctggtctgcagatctcgaagcacaaaggtccttattacttatatttcttcttgtgccattattcacttttagatctccagtgtcctcatactgagtggcatttgaacaacttcctttttggcattttagcaatactccctgagaaaccaacaggatcaaggagatcaaagtcaaagtgagaataccattcacggttccagatattcccagtaagattttataccagtgcaacgtcactgaataatcctccaccttcaagtaggctccggtgtctgtcat

SEQ ID NO: 5599 - DNA, 1751 bp, Homo sapiens
  SIMILAR (136)..(750): 631254mologous to Homo sapiens haemopoietic progenitor homeobox HPX42B,accession number AF068006,Smith-Waterman Score=617.
atggaagcgtttgatgctaattacacattccagtcaggaccctcagctgcaggtttgttggtgtttgctggaggtccactccaggccctgtgtgcctgggtatcagcagtggaggctgcagaacagtggatattgcagccctccagctttggctccgtggactggctctgcctgagcagctgctcagggtcgacccacacccccaggcctgccgacgtctcccccgggagcctccctggcccgggccagacgttcggcacccgggagccccctcaggctgtcagtaccaaggaggctagctcgtcaaatctgcatgcgccggagaggactgtggctgggttgaccttcaccacggagcaggtccgtgccttggagggcgtcttccggcaccaccagtacctgggccctctggagcggaattggctggccagggagatgcagctctcagaggtccagataaaaacctggtttcaaaatcgccggatgaaacacaaacggcaaatgcaggactcccagctaaacggcccccttatgggttcttttccaggggccccctggctttccactcaccattttttggcccttgccaaaggcctgcaagttgctgtgcccttgggcaacccctgcctgggtcccctggctgcccccttggctccttctggggtaccccgacaaatggatcaagaggccctggcctcttcttgggctggctgctgcgggccagcctctggcataccaccccccacgcccaggaagtgggatagatcttccaaaaggaactcagttgtcattaaggctcttccaagacatctcatcaaccaggggagatcacaggagtggagactaactacagtacaagaaacaacaatggaaaaacaaggtgtgcctctagtggaaaatattgcaggaaagccgtggaagagaagattggaaagcagtaagtcaaggtctcggcggttttggaggacaactgcagctaaagagtcaaaatgggcctggaggactgataaagtttgtgatatgtctgtgatgctagcagagaggtcattaaaaaggctacggaaggtcgtgacagaagtcgaaatgcctgctattccagtactgagagcaatagtggaggcagaaagtcctaaaccgacaagcaagggaattagtggaataactcttttttgtcgtgtcggtgtcatgaggggatctgggagctcttcggtcctatttgcaatttgaattttgggagtaaggaaaactagtgtgcatgtgcctgtccaattagcaggtagacacatgtaggtagaggatctttcagggtctagggctgtaaatcgtgtcagggttgctgccaaacaaaccatgaactgggctgggtttttatattcgatgaaaaagagcctaaatgctaactgattttgggagaggtcagataaagaaagaggagcattaaccttgactatgactttagcttcagccactgcccagggctggtggagctggccggctgctctgagggtggggtccaccaagcccacgcccacccagaactcatgctggcccacaagcgccatatgcagccccgttcctgtctgcgcctctccctccacacctccccgcaagctgagggagccagcttcggccttggccagcccagaaaggggctcccacagtgcagtggcaggctgaagggctcggccagagtgggcgccaaggccgaagaggcgctgagagcaagcaagggctgcaagggctgccagcat

SEQ ID NO: 5600 - DNA, 2402 bp, Homo sapiens
  SIMILAR (219)..(2399): 981254mologous to Homo sapiens KIAA0984 protein,accession number AB023201,Smith-Waterman Score=3743.
tttcgtgccggtcagccgcagacactcacccagctccgcgagctcagccgctcagcgagtggggtagcggggaccgagacggacggtagccgtgccagagcccggggcgctctcggatgcggcaggacaagctgaccgggtctctgaggcgcggggggagatgcctgaagcggcagggcggcggcgtgggcaccatcctgagcaatgtgctcaagaagcgcagctgcatttcccggaccgcgccccggctgctgtgcaccctggagccgggagttgataccaagttgaaattcactcttgagccatctttaggtcaaaatggttttcagcagtggtacgatgctctcaaggcagttgccaggctatccacaggaataccaaaggaatggaggagaaaggtttggttgaccttggcagatcattatttgcacagtatagccattgactgggacaaaaccatgcgcttcactttcaatgaaaggagtaatcctgatgatgactccatgggaattcagatagtcaaggaccttcaccgcacaggctgtagttcttactgtggccaggaggctgagcaggacagggttgtgttgaagcgggtgctgctggcctatgcccgatggaacaaaactgttgggtactgccaaggctttaacatcctggctgcactaattctggaagtgatggaaggcaatgaaggggatgccctgaaaattatgatttaccttattgataaggtacttcccgaaagctatttcgtcaataatctccgggcattgtctgtggatatggctgtcttcagagaccttttaagaatgaagctgccggaattatctcagcacctggatactcttcagagaactgcaaacaaagaaagtggaggtggatatgagcccccacttacaaatgtcttcacgatgcagtggtttctgactctctttgccacatgcctccctaatcagaccgttttaaagatctgggattcagtcttctttgaaggttcagaaatcatcctaagggtgtcgctggctatctgggcaaaattaggagagcagatagaatgttgtgaaacagcagatgaattctacagcaccatggggcgccttacccaggagatgctagagaatgatcttctgcaaagccatgaactcatgcagactgtttattccatggctccgttccctttcccacaattggcagagttgagggaaaaatacacctacaacattacaccgttcccagccacagttaaacccacctcagtttctggacgacatagtaaggccagagacagtgatgaagagaatgacccagacgatgaggatgctgtcgttaatgcagtggggtgtcttggaccttttagtgggttcctggctcctgaactgcagaagtaccaaaaacaaattaaagagccaaatgaggagcagagtctgagatctaataacattgcagagctgagtccaggagcaatcaattcctgtcgaagtgaataccatgcagcttttaacagtatgatgatggaacgcatgaccacagatatcaatgcactgaagcggcagtactctcgaattaaaaagaagcaacagcagcaggttcatcaggtgtacatcagggcagacaaagggccagtgaccagcattctcccgtctcaggtaaacagttctccagttataaaccaccttcttttaggaaagaagatgaaaatgactaacagagctgccaagaatgctgtcatccacatccctggtcacacaggagggaaaatatctcctgtcccctacgaagaccttaagacgaagctcaactccccgtggcgaactcacatccgagtccacaaaaagaacatgccaaggaccaagagtcatccgggctgtggggacaccgtagggctgatagatgagcagaacgaggccagcaagaccaatgggctgggggcagcagaggcattcccctctggttgtacagcgacagctgggagagaaggcagcagccctgaaggcagtaccaggaggacgatcgaggggcagtctccggagccggtgttcggagatgctgatgtggatgtgtctgcagttcaggcgaagttgggagccctggaactgaaccagagggatgctgcagctgaaactgagctcagggtgcacccaccctgccagcggcactgcccagagccgccgagtgcacccgaagaaaacaaagccaccagcaaagctccccaaggcagcaactcaaaaacccccatctttagcccttttcccagcgtcaagcccctgcggaaatctgctactgccaggaacttgggattatatggccctacagaaagaaccccaactgtgcactttcctcaaatgagtaggagcttcagcaaacccggcggtggaaacagtggcactaaaaaacgatga

SEQ ID NO: 5601 - DNA, 1449 bp, Homo sapiens
  SIMILAR (1)..(657): 1001254mologous to synthetic construct chloramphenicol acetyltransferase,accession number A02739,Smith-Waterman Score= 1206.
atggagaaaaaaatcactggatataccaccgttgatatatcccaatggcatcgtaaagaacattttgaggcatttcagtcagttgctcaatgtacctataaccagaccgttcagctggatattacggcctttttaaagaccgtaaagaaaaataagcacaagttttatccggcctttattcacattcttgcccgcctgatgaatgctcatccggagttccgtatggcaatgaaagacggtgagctggtgatatgggatagtgttcacccttgttacaccgttttccatgagcaaactgaaacgttttcatcgctctggagtgaataccacgacgatttccggcagtttctacacatatattcgcaagatgtggcgtgttacggtgaaaacctggcctatttccctaaagggtttattgagaatatgtttttcgtctcagccaatccctgggtgagtttcaccagttttgatttaaacgtggccaatatggacaacttcttcgcccccgttttcaccatgggcaaatattatacgcaaggcgacaaggtgctgatgccgctggcgattcaggttcatcatgccgtttgtgatggcttccatgtcggcagaatgcttaatgaattacaacagtactgcgatgagtggcagggcggggcaggttgggatgacattactgggctcaaagccccagtccttgaattacatgacggtactgcagggacaccagcaatatcaacgacgacaactgtggaaatccgcaaaagcagtgttatgacaactgagatcacctctaaagtggaaaaaagcccaacgacagccactggcaatagctcatgtccttctactgagaccgaggaagaaaaggcaaaacggcttctttactgttcgctatgcaaggttgctgtcaactctgcctcgcagctggaggcgcacaacagtgaacattttgaggcatttcagtcagttgctcaatgtacctataaccagaccgttcagctggatattacggcctttttaaagaccgtaaagaaaaataagcacaagttttatccggcctttattcacattcttgcccgcctgatgaatgctcatccggagttccgtatggcaatgaaagacggtactaagcacaaaaccatgttagaagcccggaatggaagtggcactatcaaagcctttcctagggcaggagtgaaaggcaaaggacctgttaataaaggaaacacaggcctccaaaataaaacatttcactgtgaaatctgtgatgtgcacgtcaactcggaaacgcaacttaaacaggagaaacaggcatttaacccttcttatggcagtgacataagtgctacgatgcagacatacctaagactacatggagaaggtggcatcccaacatctaccaggcaagtacaggtgctccaggcagagggaactctttatacaagggcttaa

SEQ ID NO: 5602 - DNA, 1296 bp, Homo sapiens
  SIMILAR (941)..(735): 881254mologous to Homo sapiens putative envelope protein,accession number U88902,Smith-Waterman Score=294.
atggaagagcccttgggctttaagcaaacattggtagtggcccagcagaaccccctatggactagtggtggtggtggccacagtcccagtggtagtggccacaggggtgtttgcatcaccacactcccagttccagagggctcatcacagaaagagactccacatgtttcagagaaattaaaggaaaagaatgagtctctgcctggtaatccagagaattcttccagatcttctgaaagaccaccaagacgacatagtaaggccagagacagtgatgaagagaatgacccagacgatgaggatgctgtcgttaatgcagtggggtgtcttggaaaaaatagtgggttcctggctcctgaactgcagaagtaccaaaaacaaattaaagacggtactgcagggacaccagcaatatcaacgacgacaactgtggaaatccgcaaaagcagtgttatgacaactggagatcaccttttaagtgggaaaaaagcccaacgaccagcccctggccatagctcatgtccttctactgagaccgaggaagaaaagggcaaacggcttctttactgggtcgtttggcaggttgctgtcaactcagcctcgcagctggaggcgcacaacagtgagaacccggtcagcttgtcctgccgcatccgagagcgccccgggctctggcacggctaccgtccgtctcggtccccgctaccccactcgctgagcggtagttactcactctgggccttgaggactgatacagtttgtgatatgtctgtgatgctagcagagatgtcattagaaaggctacggaaggtcgtgacagaagtcgaaatgcctgctattccagtactgagagcaatagtggaggcagaaagtcctaaaccgacaagcaagggaattagtggaataactcttttttgtcgtgtcggtgtcatgaggggaacagagccaaatgaggagcagagtctgagatctaataacattgcagagctgagtccaggagcaatcaattcctgtcaaagtgaataccatgcagcttttaacagtatgatgatggaacgcatgaccacagatatcaatgcactgaagcggcagtactctcgaattaaaaagaagcaacagcagcaggttcatcaggtgtacatcagggcaggacaaggaatgtctctcattctgcatcctgagcaccaagcactgtgtctgatgcaggggtcagtggggctgccgccagccgtctgcagtgttagccagggaaatcaactcacagtcctcctggcatctactgctggacttgggtaa

SEQ ID NO: 5603 - DNA, 1260 bp, Homo sapiens
  SIMILAR (445)..(1239): 711254mologous to Homo sapiens putative p150,accession number U93567,Smith-Waterman Score=984.
atggacttaaactataccttagaacaaatgaacttaacagatatttgcagaacattctacctaacaactgcagaatatacattctattcatcagtacatggaacattcttcaagacagaccatatgacaggccacaaaacaagtctcaataaatttaagaaaatcaaaattgtatcaagtactctctcagaccacagtggaataaaactggaaatcaactccaaaaggaaccctcaaaaccatgcgaatacatggaaattaagtaacctgctcctgaatgcacactgggtcaacaatgaaatcaagaggaaagttaaaaatttctttgaattgaacgataatagtgacacaatctatcaaaatttctcggatacagcaaaagcggtgctagaagaaaagttcctaggactaaatgcctacaccaaaaaacctgaaagagcacagatagagaaagagagaatcctccctaaatcattctatgaagccagtatcaccctaatacccaaaccacgcaaggacataacaaaaaaagaaaactacaaaccaatatccctgatgaacatagaggcaaaaatcctcaacaaaataatagttaaccaaatccaacagcatatcaaaaagataatccaccatgataaactgagtttcataccagggatgcaggggtggtttaatatatgtaagccagtaaatgtgattctccacataaacataattaaaaacaaaaatcatatgatcatctcaatagacacagaaaaagcatttggcaaaatgcagcatccctttatgattaaaaccttcagcaaaattggcacagaagggacataccttaaggtaatagaagccatctatgatagacccacagccaacattatactgaatggggaaaacttgaaagcactccccctgagaactagaccaagacaaggatgcccactttcaccacttttattcaacttagtactggcagtcctagccagagcaatcagacaagagaaagaaataaagggcatccaagtcagtaaagaggaagttaaactgtctctgtttgctgatgatatgattgtatacctagaaaaccctaaagcctcacccaaaaagcttccagaactagtaactgaattcagcaaagtttcaggacacaaaattaatgcacatgattcagtaactctgctatatactatcagtgaccaaactgagaatcaaatcaagagctcaacccctttgaccatagctgcaaacacaaaagcggactcataa

SEQ ID NO: 5604 - DNA, 4841 bp, Homo sapiens
  SIMILAR (734)..(4840): 1001254mologous to Homo sapiens A-T,accession number X91196,Smith-Waterman Score=7090.
ccgcgtccgcgcttacccaatacaagccgggctacgtccgagggtaacaacatgatcaaaaccacagcaggaaccacaataaggaacaagactcaggttaaagcaaacacagcgacagctcctgcgccgcatctcctggttccagtggcggcactgaactcgcggcaatttgtcccgcctctttcgcttcacggcagccaatcgcttccgccagagaaagaaaggcgccgaaatgaaacccgcctccgttcgccttcggaactgtcgtcacttccgtcctcagacttggaggggcggggatgaggagggcggggaggacgacgagggcgaagagggtggttgagagccccggagcccgagccgaagggcgacccgcaaacgctaagtcgctggccattggtggacatggcgcaggcgcgtttgctccgacgggccgaatgttttggggcagtgttttgagcgcggagaccgcgtgatactggatgcgcatgggcataccgtgctctgcggctgcttggcgttgcttcttcctccagaagtgggcgctgggcagtcacgcagggtttgaaccggaagcgggagtaggtagctgcgtggctaacggagaaaagaagccgtggccacgggaggaggcgagaggagtcgggatctgcgctgcaaccaccgccgcggttgatactactttgaccttccgagtgcagtgacagtgatgtgtgttctgaaattgtgaaccatgagtctagtacttaatgatctgcttatctgctgccgtcaactagaacatgatagagctacagaacgaaagaaagaagttgagaaatttaagcgcctgattcgagatcctgaaacaattaaacatctagatcggaattcagattccaaacaaggaaaatatttgatttgggatgctgtttttagatttttacagaaatatattcagaaagaaacagaatgtctgagaatagcaaaaccaaatgtatcagcctcaacacaagcctccaggcagaaaaagatgcaggaaatcagtagtttggtcaaatacttcatcaaatgtgcaaacagaagagcacctaggctaaaatgtcaagaactcttaaattatatcatggatacagtgaaagattcatctaatggtgctatttacggagctgattgtagcaacatactactcaaagacattctttctgtgagaaaatactggtgtgaaatatctcagcaacagtggttagaattgttctctgtgtacttcaggctctatctgaaaccttcacaagatgttcatagagttttagtggctagaataattcatgctgttaccaaaggatgctgttctcagactgacggattaaattccaaatttttggactttttttccaaggctattcagtgtgcgagacaagaaaagagctcttcaggtctaaatcatatcttagcagctcttactatcttcctcaagactttggctgtcaactttcgaattcgagtgtgtgaattaggagatgaaattcttcccactttgctttatatttggactcaacataggcttaatgattctttaaaagaagtcattattgaattatttcaactgcaaatttatatccatcatccgaaaggagccaaaacccaagaaaaaggtgcttatgaatcaacaaaatggagaagtattttaaacaacttatatgatctgctagtgaatgagataagtcatataggaagtagaggaaagtattcttcaggatttcgtaatattgccgtcaaagaaaatttgattgaattgatggcagatatctgtcaccaggtttttaatgaagataccagatccttggagatttctcaatcttacactactacacaaagagaatctagtgattacagtgtcccttgcaaaaggaagaaaatagaactaggctgggaagtaataaaagatcaccttcagaagtcacagaatgattttgatcttgtgccttggctacagattgcaacccaattaatatcaaagtatcctgcaagtttacctaactgtgagctgtctccattactgatgatactatctcagcttctaccccaacagcgacatggggaacgtacaccatatgtgttacgatgccttacggaagttgcattgtgtcaagacaagaggtccaacctagaaagctcacaaaagtcagatttattaaaactctggaataaaattgggtgtattacctttcgtggtataagttctgagcaaatacaagctgaaaactttggcttacttggagccataattcagggtagtttagttgaggttgacagagaattctggaagttatttactgggtcagcctgcagaccttcatgtcctgcagtatgctgtttgactttggcactgaccaccagtatagttccaggaacggtaaaaatgggaatagagcaaaatatgtgtgaagtaaatagaagcttttctttaaaggaatcaataatgaaatggctcttattctatcagttagagggtgacttagaaaatagcacagaagtgcctccaattcttcacagtaattttcctcatcttgtactggagaaaattcttgtgagtctcactatgaaaaactgtaaagctgcaatgaattttttccaaagcgtgccagaatgtgaacaccaccaaaaagataaagaagaactttcattctcagaagtagaagaactatttcttcagacaacttttgacaagatggactttttaaccattgtgagagaatgtggtatagaaaagcaccagtccagtattggcttctctgtccaccagaatctcaaggaatcactggatcgctgtcttctgggattatcagaacagcttctgaataattactcatctgagattacaaattcagaaactcttgtccggtgttcacgtcttttggtgggtgtccttggctgctactgttacatgggtgtaatagctgaagaggaagcatataagtcagaattattccagaaagccaagtctctaatgaaatgtgcaggagaaagtatcactctgtttaaaaataagacaaatgaggaattcagaattggttccttgagaaatatgatgcagctatgtacacgttgcttgagcaactgtaccaagaagagtccaaataagattgcatctggctttttcctgcgattgttaacatcaaagctaatgaatgacattgcagatatttgtaaaagtttagcatccttcatcaaaaagccatttgaccgtggagaagtagaatcaatggaagatgatactaatggaaatctaatggaggtggaggatcagtcatccatgaatctatttaacgattaccctgatagtagtgttagtgatgcaaacgaacctggagagagccaaagtaccataggtgccattaatcctttagctggagaatatctgtcaaagcaagatctacttttcttagacatgctcaagttcttgtgtttgtgtgtaactactgctcagaccaatactgtgtcctttagggcagctgatattcggaggaaattgttaatgttaattgattctagcacgctagaacctaccaaatccctccacctgcatatgtatctaatgcttttaaaggagcttcctggagaagagtaccccttgccaatggaagatgttcttgaacttctgaaaccactatccaatgtgtgttctttgtatcgtcgtgaccaagatgtttgtaaaactattttaaaccatgtccttcatgtagtgaaaaacctaggtctaagcaatatggactctgagaacacaagggatgctcaaggacagtttcttacagtaattggagcattttggcatctaacaaaggagaggaaatatatattctctgtaagaatggccctagtaaattgccttaaaacttggcttgaggctgatccttattcaaaatgggccattcttaatgtaatgggaaaagacttccctgtaaatgaagtatttacacaatttcttgctgacaatcatcaccaagttcgcatgttggttgcagagtcaatcaatagattgttccaggacacgaagggagattcttccaggttactgaaagcacttcctttgaagcttcagcaaacagcttttgaaaatgcatacttgaaagctcaggaaggaatgagagaaatgtcccatagtgctgagaaccctgaaactttggatgaaatttataatagaaaatctgttttactgacgttgatagctgtggttttatcctgtagccctatctgcgaaaaacaggctttgtttgccctgtgtaaatctgtgaaagagaatggattagaacctcaccttgtgaaaaaggttttagagaaagtttctgaaacttttggatatagacgtttagaagactttatggcatctcatttagattatctggttttggaatggctaaatctccaagatactgaatacaacttatcttcttttccttttattttattaaactacacaaatattgaggatttctatagatcttgttataaggttttgattccacatctggtgattagaagtcattttgatgaggtgaagtccattgctaatcagattcaagaggactggaaaagtcttctaacagactgctttccaaagattcttgtaaatattcttccttattttgcctatgagggtaccagagacagtgggatggcacagcaaagagagactgctaccaaggtctatgatatgcttaaaagtgaaaacttattgggaaaacagattgatcacttattcattagtaatttaccagagattgtggtggagttattgatgacgttacatgagccagcaaattctagtgccagtcagagcactgacctctgtgacttttcag

SEQ ID NO: 5605 - DNA, 13088 bp, Homo sapiens
  SIMILAR (328)..(9585): 991254mologous to Homo sapiens 08-APR-1996 ATM mutant G9170C coding sequence,accession number T68784_cd1,Smith-Waterman Score= 16011.
agtgggcgctgggcagtcacgcagggtttgaaccggaagcgggagtaggtagctgcgtggctaacggagaaaagaagccgtggccacgggaggaggcgagaggagtcgggatctgcgctgcagccaccgccgcggttgatactactttgaccttccgagtgcagtggcactgtaagcatgtatatgggtccttaaagggactcatagagaggcatacatcacaatttggaattatgcattggtttatcaatttacttgtttattgtcaccctgctgcccagatatgacttcatgaggacagtgatgtgtgttctgaaattgtgaaccatgagtctagtacttaatgatctgcttatctgctgccgtcaactagaacatgatagagctacagaacgaaagaaagaagttgagaaatttaagcgcctgattcgagatcctgaaacaattaaacatctagatcggcattcagattccaaacaaggaaaatatttgaattgggatgctgtttttagatttttacagaaatatattcagaaagaaacagaatgtctgagaatagcaaaaccaaatgtatcagcctcaacacaagcctccaggcagaaaaagatgcaggaaatcagtagtttggtcaaatacttcatcaaatgtgcaaacagaagagcacctaggctaaaatgtcaagaactcttaaattatatcatggatacagtgaaagattcatctaatggtgctatttacggagctgattgtagcaacatactactcaaagacattctttctgtgagaaaatactggtgtgaaatatctcagcaacagtggttagaattgttctctgtgtacttcaggctctatctgaaaccttcacaagatgttcatagagttttagtggctagaataattcatgctgttaccaaaggatgctgttctcagactgacggattaaattccaaatttttggactttttttccaaggctattcagtgtgcgagacaagaaaagagctcttcaggtctaaatcatatcttagcagctcttactatcttcctcaagactttggctgtcaactttcgaattcgagtgtgtgaattaggagatgaaattcttcccactttgctttatatttggactcaacataggcttaatgattctttaaaagaagtcattattgaattatttcaactgcaaatttatatccatcatccgaaaggagccaaaacccaagaaaaaggtgcttatgaatcaacaaaatggagaagtattttatacaacttatatgatctgctagtgaatgagataagtcatataggaagtagaggaaagtattcttcaggatttcgtaatattgccgtcaaagaaaatttgattgaattgatggcagatatctgtcaccaggtttttaatgaagataccagatccttggagatttctcaatcttacactactacacaaagagaatctagtgattacagtgtcccttgcaaaaggaagaaaatagaactaggctgggaagtaataaaagatcaccttcagaagtcacagaatgattttgatcttgtgccttggctacagattgcaacccaattaatatcaaagtatcctgcaagtttacctaactgtgagctgtctccattactgatgatactatctcagcttctaccccaacagcgacatggggaacgtacaccatatgtgttacgatgccttacggaagttgcattgtgtcaagacaagaggtcaaacctagaaagctcacaaaagtcagatttattaaaactctggaataaaatttggtgtattacctttcgtggtataagttctgagcaaatacaagctgaaaactttggcttacttggagccataattcagggtagtttagttgaggttgacagagaattctggaagttatttactgggtcagcctgcagaccttcatgtcctgcagtatgctgtttgactttggcactgaccaccagtatagttccaggaacggtaaaaatgggaatagagcaaaatatgtgtgaagtaaatagaagcttttctttaaaggaatcaataatgaaatggctcttattctatcagttagagggtgacttagaaaatagcacagaagtgcctccaattcttcacagtaattttcctcatcttgtactggagaaaattcttgtgagtctcactatgaaaaactgtaaagctgcaatgaattttttccaaagcgtgccagaatgtgaacaccaccaaaaagataaagaagaactttcattctcagaagtagaagaactatttcttcagacaacttttgacaagatggactttttaaccattgtgagagaatgtggtatagaaaagcaccagtccagtattggcttctctgtccaccagaatctcaaggaatcactggatcgctgtcttctgggattatcagaacagcttctgaataattactcatctgagattacaaattcagaaactcttgtccggtgttcacgtcttttggtgggtgtccttggctgctactgttacatgggtgtaatagctgaagaggaagcatataagtcagaattattccagaaagccaagtctctaatgcaatgtgcaggagaaagtatcactctgtttaaaaataagacaaatgaggaattcagaattggttccttgagaaatatgatgcagctatgtacacgttgcttgagcaactgtaccaagaagagtccaaataagattgcatctggctttttcctgcgattgttaacatcaaagctaatgaatgacattgcagatatttgtaaaagtttagcatccttcatcaaaaagccatttgaccgtggagaagtagaatcaatggaagatgatactaatggaaatctaatggaggtggaggatcagtcatccatgaatctatttaacgattaccctgatagtagtgttagtgatgcaaacgaacctggagagagccaaagtaccataggtgccattaatcctttagctgaagaatatctgtcaaagcaagatctacttttcttagacatgctcaagttcttgtgtttgtgtgtaactactgctcagaccaatactgtgtcctttagggcagctgatattcggaggaaattgttaatgttaattgattctagcacgctagaacctaccaaatccctccacctgcatatgtatctaatgcttttaaaggagcttcctggagaagagtaccccttgccaatggaagatgttcttgaacttctgaaaccactatccaatgtgtgttctttgtatcgtcgtgaccaagatgtttgtaaaactattttaaaccatgtccttcatgtagtgaaaaacctaggtcaaagcaatatggactctgagaacacaagggatgctcaaggacagtttcttacagtaattggagcattttggcatctaacaaaggagaggaaatatatattctctgtaagaatggccctagtaaattgccttaaaactttgcttgaggctgatccttattcaaaatgggccattcttaatgtaatgggaaaagactttcctgtaaatgaagtatttacacaatttcttgctgacaatcatcaccaagttcgcatgttggctgcagagtcaatcaatagattgttccaggacacgaagggagattcttccaggttactgaaagcacttcctttgaagcttcagcaaacagcttttgaaaatgcatacttgaaagctcaggaaggaatgagagaaatgtcccatagtgctgagaaccctgaaactttggatgaaatttataatagaaaatctgttttactgacgttgatagctgtggttttatcctgtagccctatctgcgaaaaacaggctttgtttgccctgtgtaaatctgtgaaagagaatggattagaacctcaccttgtgaaaaaggttttagagaaagtttctgaaacttttggatatagacgtttagaagactttatggcatctcatttagattatctggttttggaatggctaaatcttcaagatactgaatacaacttatcttcttttccttttattttattaaactacacaaatattgaggatttctatagatcttgttataaggttttgattccacatctggtgattagaagtcattttgatgaggtgaagtccattgctaatcagattcaagaggactggaaaagtcttctaacagactgctttccaaagattcttgtaaatattcttccttattttgcctatgagggtaccagagacagtgggatggcacagcaaagagagactgctaccaaggtctatgatatgcttaaaagtgaaaacttattgggaaaacagattgatcacttattcattagtaatttaccagagattgtggtggagttattgatgacgttacatgagccagcaaattctagtgccagtcagagcactgacctctgtgacttttcaggggatttggatcctgctcctaatccacctcattttccatcgcatgtgattaaagcaacatttgcctatatcagcaattgtcataaaaccaagttaaaaagcattttagaaattctttccaaaagccctgattcctatcagaaaattcttcttgccatatgtgagcaagcagctgaaacaaataatgtttataagaagcacagaattcttaaaatatatcacctgtttgttagtttattactgaaagatataaaaagtggcttaggaggagcttgggcctttgttcttcgagacgttatttatactttgattcactatatcaaccaaaggccttcttgtatcatggatgtgtcattacgtagcttctccctttgttgtgacttattaagtcaggtttgccagacagccgtgacttactgtaaggatgctctagaaaaccatcttcatgttattgttggtacacttataccccttgtgtatgagcaggtggaggttcagaaacaggtattggacttgttgaaatacttagtgatagataacaaggataatgaaaacctctatatcacgattaagcttttagatccttttcctgaccatgttgtttttaaggatttgcgtattactcagcaaaaaatcaaatacagtagaggacccttttcactcttggaggaaattaaccattttctctcagtaagtgtttatgatgcacttccattgacaagacttgaaggactaaaggatcttcgaagacaactggaactacataaagatcagatggtggacattatgagagcttctcaggataatccgcaagatgggattatggtgaaactagttgtcaatttgttgcagttatccaagatggcaataaaccacactggtgaaaaagaagttctagaggctgttggaagctgcttgggagaagtgggtcctatagatttctctaccatagctatacaacatagtaaagatgcatcttataccaaggcccttaagttatttgaagataaagaacttcagtggaccttcataatgctgacctacctgaataacacactggtagaagattgtgtcaaagttcgatcagcagctgttacctgtttgaaaaacattttagccacaaagactggacatagtttctgggagatttataagatgacaacagatccaatgctggcctatctacagccttttagaacatcaagaaaaaagtttttagaagtacccagatttgacaaagaaaacccttttgaaggcctggatgatataaatctgtggattcctctaagtgaaaatcatgacatttggataaagacactgacttgtgcttttttggacagtggaggcacaaaatgtgaaattcttcaattattaaagccaatgtgtgaagtgaaaactgacttttgtcagactgtacttccatacttgattcatgatattttactccaagatacaaatgaatcatggagaaatctgctttctacacatgttcagggatttttcaccagctgtcttcgacacttctcgcaaacgagccgatccacaacccctgcaaacttggattcagagtcagagcactttttccgatgctgtttggataaaaaatcacaaagaacaatgcttgctgttgtggactacatgagaagacaaaagagaccttcttcaggaacaatttttaatgatgctttctggctggatttaaattatctagaagttgccaaggtagctcagtcttgtgctgctcactttacagctttactctatgcagaaatctatgcagataagaaaagtatggatgatcaagagaaaagaagtcttgcatttgaagaaggaagccagagtacaactatttctagcttgagtgaaaaaagtaaagaagaaactggaataagtttacaggatcttctcttagaaatctacagaagtataggggagccagatagtttgtatggctgtggtggagggaagatgttacaacccattactagactacgaacatatgaacacgaagcaatgtggggcaaagccctagtaacatatgacctcgaaacagcaatcccctcatcaacacgccaggcaggaatcattcaggccttgcagaatttgggactctgccatattctttccgtctatttaaaaggattggattatgaaaataaagactggtgtcctgaactagaagaacttcattaccaagcagcatggaggaatatgcagtgggaccattgcacttccgtcagcaaagaagtagaaggaaccagttaccatgaatcattgtacaatgctctacaatctctaagagacagagaattctctacattttatgaaagtctcaaatatgccagagtaaaagaagtggaagagatgtgtaagcgcagccttgagtctgtgtattcgctctatcccacacttagcaggttgcaggccattggagagctggaaagcattggggagcttttctcaagatcagtcacacatagacaactctctgaagtatatattaagtggcagaaacactcccagcttctcaaggacagtgattttagttttcaggagcctatcatggctctacgcacagtcattttggagatcctgatggaaaaggaaatggacaactcacaaagagaatgtattaaggacattctcaccaaacaccttgtagaactctctatactggccagaactttcaagaacactcagctccctgaaagggcaatatttcaaattaaacagtacaattcagttagctgtggagtctctgagtggcagctggaagaagcacaagtattctgggcaaaaaaggagcagagtcttgccctgagtattctcaagcaaatgatcaagaagttggatgccagctgtgcagcgaacaatcccagcctaaaacttacatacacagaatgtctgagggtttgtggcaactggttagcagaaacgtgcttagaaaatcctgcggtcatcatgcagacctatctagaaaaggcagtagaagttgctggaaattatgatggagaaagtagtgatgagctaagaaatggaaaaatgaaggcatttctctcattagcccggttttcagatactcaataccaaagaattgaaaactacatgaaatcatcggaatttgaaaacaagcaagctctcctgaaaagagccaaagaggaagtaggtctccttagggaacataaaattcagacaaacagatacacagtaaaggttcagcgagagctggagttggatgaattagccctgcgtgcactgaaagaggatcgtaaacgcttcttatgtaaagcagttgaaaattatatcaactgcttattaagtggagaagaacatgatatgtgggtattccgactttgttccctctggcttgaaaattctggagtttctgaagtcaatggcatgatgaagagagacggaatgaagattccaacatataaatttttgcctcttatgtaccaattggctgctagaatggggaccaagatgatgggaggcctaggatttcatgaagtcctcaataatctaatctctagaatttcaatggatcacccccatcacactttgtttattatactggccttagcaaatgcaaacagagatgaatttctgactaaaccagaggtagccagaagaagcagaataactaaaaatgtgcctaaacaaagctctcagcttgatgaggatcgaacagaggctgcaaatagaataatatgtactatcagaagtaggagacctcagatggtcagaagtgttgaggcactttgtgatgcttatattatattagcaaacttagatgccactcagtggaagactcagagaaaaggcataaatattccagcagaccagccaattactaaacttaagaatttagaagatgttgttgtccctactatggaaattaaggtggaccacacaggagaatatggaaatctggtgactatacagtcatttaaagcagaatttcgcttagcaggaggtgtaaatttaccaaaaataatagattgtgtaggttccgatggcaaggagaggagacagcttgttaagggccgtgatgacctgagacaagatgctgtcatgcaacaggtcttccagatgtgtaatacattactgcagagaaacacggaaactaggaagaggaaattaactatctgtacttataaggtggttcccctctctcagcgaagtggtgttcttgaatggtgcacaggaactgtccccattggtgaatttcttgttaacaatgaagatggtgctcataaaagatacaggccaaatgatttcagtgcctttcagtgccaaaagaaaatgatggaggtgcaaaaaaagtcttttgaagagaaatatgaagtcttcatggatgtttgccaaaattttcaaccagttttccgttacttctgcatggaaaaattcttggatccagctatttggtttgagaagcgattggcttatacgcgcagtgtagctacttcttctattgttggttacatacttggacttggtgatagacatgtacagaatatcttgataaatgagcagtcagcagaacttgtacatatagatctaggtgttgcttttgaacagggcaaaatccttcctactcctgagacagttccttttagactcaccagagatattgtggatggcatgggcattacgggtgttgaaggtgtcttcagaagatgctgtgagaaaaccatggaagtgatgagaaactctcaggaaactctgttaaccattgtagaggtccttctatatgatccactctttgactggaccatgaatcctttgaaagctttgtatttacagcagaggccggaagatgaaactgagcttcaccctactctgaatgcagatgaccaagaatgcaaacgaaatctcagtgatattgaccagagtttcaacaaagtagctgaacgtgtcttaatgagactacaagagaaactgaaaggagtggaagaaggcactgtgctcagtgttggtggacaagtgaatttgctcatacagcaggccatagaccccaaaaatctcagccgacttttcccaggatggaaagcttgggtgtgatcttcagtatatgaattaccctttcattcagcctttagaaattatattttagcctttatttttaacctgccaacatactttaagtagggattaatatttaagtgaactattgtgggtttttttgaatgttggttttaatacttgatttaatcaccactcaaaaatgttttgatggtcttaaggaacatctctgctttcactctttagaaataatggtcattcgggctgggcgcagcggctcacgcctgtaatcccagcactttgggaggccgaggtgagcggatcacaaggtcaggagttcgagaccagcctggccaagagaccagcctggccagtatggtgaaaccctgtctctactaaaaatacaaaaattagccgagcatggtggcgggcacctgtaatcccagctactcgagaggctgaggcaggagaatctcttgaacctgggaggtgaaggttgctgtgggccaaaatcatgccattgcactccagcctgggtgacaagagcgaaactccatctcaaaaaaaaaaaaaaaaaacagaaacttatttggatttttcctagtaagatcactcagtgttactaaataatgaagttgttatggagaacaaatttcaaagacacagttagtgtagttactatttttttaagtgtgtattaaaacttctcattctattctctttatcttttaagcccttctgtactgtccatgtatgttatctttctgtgataacttcatagattgccttctagttcatgaattctcttgtcagatgtatataatctcttttaccctatccattgggcttcttctttcagaaattgtttttcatttctaattatgcatcatttttcagatctctgtttcttgatgtcatttttaatgtttttttaatgttttttatgtcactaattattttaaatgtctgtacttgatagacactgtaatagttctattaaatttagttcctgctgtttatatctgttgatttttgtatttgataggctgttcatccagttttgtctttttgaaaagtgagtttattttcagcaaggctttatctatgggaatcttgagtgtctgtttatgtcatattcccagggctgttgctgcacacaagcccattcttattttaatttcttggctttagggtttccatacctgaagtgtagcataaatactgataggagatttcccaggccaaggcaaacacacttcctcctcatctccttgtgctagtgggcagaatatttgattgatgcctttttcactgagagtataagcttccatgtgtcccacctttatggcaggggtggaaggaggtacatttaattcccactgcctgcctttggcaagccctgggttctttgctccccatatagatgtctaagctaaaagccgtgggttaatgagactggcaaattgttccaggacagctacagcatcagctcacatattcacctctctggtttttcattcccctcatttttttctgagacagagtcttgctctgtcacccaggctggagtgcagtggcatgatctcagctcactgaaacctctgcctcctgggttcaagcaattctcctgcctcagcctcctgagtagctgggactacaggcgtgtgccaacacgcccggctaattttttgtatttttattagagacggagtttcaccgtgttagccaggatggtctcgatcgcttgacctcgtgatccaccctcctcggcctcccaaagtgctgggattacaggtgtgagccaccgcgcccggcctcattcccctcatttttgaccgtaaggatttcccctttcttgtaagttctgctatgtatttaaaagaatgttttctacattttatccagcatttctctgtgttctgttggaagggaagggcttaggtatctagtttgatacataggtagaagtggaacatttctctgtcccccagctgtcatcatataagataaacatcagataaaaagccacctgaaagtaaaactactgactcgtgtattagtgagtataatctcttctccatccttaggaaaatgttcatcccagctgcggagattaacaaatgggtgattgagctttctcctcgtatttggaccttgaaggttatataaatttttttcttatgaagagttggcatttctttttattgccaatggcaggcactcattcatatttgatctcctcaccttcccctcccctaaaaccaatctccagaactttttggactataaatttcttggtttgacttctggagaactgttcagaatattactttgcatttcaaattacaaacttaccttggtgtatctttttcttacaagctgcctaaatgaatatttggtatatattggtagttttattactatagtaaatcaaggaaatgcagtaaacttaaaatgtctttaagaaagccctgaaatcttcatgggtgaaattagaaattatcaactagataatagtatagataaatgaatttgtagctaattcttgctagttgttgcatccagagagctttgaataacatcattaatctactctttagccttgcatggtatgctatgaggctcctgttctgttcaagtattctaatcaatggctttgaaaagtttatcaaatttacatacagatcacaagcctaggagaaataactaattcacagatgacagaattaagattataaaagattttttttttgtaattttagtagagacagggttgccattgtattccagccttggcgacagagcaagactctgcctcaaaaaaaaaaaaaaaaaggttttggcaagctggaactctttctgcaaatgactaagatagaaaactgccaaggacaaatgaggagtagttagattttgaaaatattaatcatagaatagttgttgtatgctaagtcactgacccatattatgtacagcatttctgatctttactttgcaagattagtgatactatcccaatacactgctggagaaatcagaatttggagaaataagttgtccaaggcaagaagatagtaaattataagtacaagtgtaatatggacagtatctaacttgaaaagatttcaggcgaaaagaatctggggtttgccagtcagttgctcaaaaggtcaatgaaaaccaaatagtgaagctatcagagaagctaataaattatagactgcttgaacagttgtgtccagattaagggagataatagctttcccaccctactttgtgcaggtcatacctccccaaagtgtttacctaatcagtaggttcacaaactcttggtcattatagtatatgcctaaaatgtatgcacttaggaatgctaaaaatttaaatatggtctaaagcaaataaaagcaaagaggaaaaactttggacatcgtaaagactagaatagtcttttaaaaagaaagccagtatattggtttgaaatatagagatgtgtcccaatttcaagtattttaattgcaccttaatgaaattatctattttctatagattttagtactattgaatgtattactttactgttacctgaatttattataaagtgtttttgaataaataattctaaaagc

SEQ ID NO: 5606 - DNA, 322 bp, Homo sapiens
  SIMILAR (1)..(147): 1001254mologous to Homo sapiens ATM mutant 2125del125,accession number W19687,Smith-Waterman Score=251.
atggactttttaaccattgtgagagaatgtggtatagaaaagcaccagtccagtattggcttctctgtccaccagaatctcaaggaatcactggatcgctgtcttctgggattatcagaacagcttctgaataattactcatctgagtgtttaacagagtaccctgattatggtcaaccagatgtagtggtgaaagaagatgaagaatataaacgtgttgattttagcaaagttccaaagctgaagacagttttccagaaagggcatccctccccatgctttgcttccgccttgcagtccgatctcagacctgctgtgctag

SEQ ID NO: 5607 - DNA, 822 bp, Homo sapiens
  SIMILAR (433)..(819): 921254mologous to Homo sapiens putative p150,accession number U93563,Smith-Waterman Score=624.
atggcctcaggtgtactgcaagcagctgccactgtgggcaccagggaatgcagtggctcccagaaacttggagatgtcaggaactgcagagccccaaagaggatgtcacagccctggctcagagagaccctaggtctgggctccctgaagggcagtagctcttctctcttcttgtttgcaacgtgctctttcagtcctgccattcagtgggtcctgagttcttgtcctgcatccaagaagcatgaggtatgtggacaactgaaggcccaccccggggcacgccttccccgctgcgacctgtgtcttcgcagcagctgctacacatgggccactgctgccattgtttgtcaaagatcagatagttgtagatatgtggcattatttctgagggctctgttctgttccattgatctatatctctgttttggtaccagtattgcttcaaagagaataaaatacctaggaatccaacttacaagggatgtgaaggacctcttcaaggagaactacaaaccaatgctcattgaaataaaagaggatacaaagaaatggaagaacattccatgctcatgggtaggaagaatcaatatcgtgaaaatggccatattgtccaaggtaatttatagattcaatgccatccccatcaagctaccaatgactttcttcacagaattggaaaaaactactttaaagttcatgtggaaccaaaaaggagcctgcatcaccaagtcaatcctaagccaaaagaacaaagctggaggcatcatgctacctgacttcaaactatactacaaggttacagtaaccaaaacagcatggtag

SEQ ID NO: 5608 - DNA, 517 bp, Homo sapiens
  SIMILAR (56)..(205): 801254mologous to Homo sapiens putative p150,accession number U93568,Smith-Waterman Score=200.
atgataagacccattgtccagaagaagactgtcacaaggtcgattgatcagttaagaattggaaaaaactactttgaattttatatggaaccaaaaaagagccaatataatgaagacaatcctaagcaaaaagaacaaagctggacgcatgatgctacctcacttcaaactatacggcaaggctacagtaaccaaaacagcatgccgcacacacagatggagagccctgggaagggttcccacagtgcgttagctccaaacagtgcaagaggacaagcagtgtggcgcttccagcctctgtcaataattcatgaggctcagactgaggagcaccagtcagagtcagccttccctggacatggggaaaattatactgaagctctcctgtctcatcgggatctgctgagtagcaaagcagagtattgcagctgtaacttcttggctgaggaaaacactagaattccagtgcaggcctgttctattacttgctcgccatacacccccttttgaatgttga

SEQ ID NO: 5609 - DNA, 703 bp, Homo sapiens
  SIMILAR (224)..(691): 401254mologous to Homo sapiens Human heregulin-like factor sequence,accession number Y05452,Smith-Waterman Score=225.
atggtggaaggtggaaagcacgtcttacgtggcagcagacacaagagaagagagagccaagtgaaaggttttccctatataaaactatcagatctcatgagacttattcactaccatgagaccagtatggaggaaactgccgccatgattcaaattatctcccaccaggtccctcccacaacatgtgggaattatgggagctacaattcaagatgcaatttggtattcaaaggtggaaaggcatcctgtgactgcattggagaaaatgatggagtcaagttttgtcggcccccagtcattccctgaggtcccttctcctgacagaggaagccagtctgtcaaacaccacagtgttccttgggatcaattcctaaatccttctctcagagtccaactaaaacgtggaggcaaatatgtaccaaatagagctcatgttctcccttcaagaccacccttcaggtgtcaggagcctcacctggaggctccctacccagatggtcttaaggtgctcacagggccagctcagatcaccctttccatgggttctgactacacaaaagtagatgagtggctgaacaagctcacagaactatcattccctagctcaggttatggtcttagtaaatctcctgagtgtaacgtcttgaccaaaacagacaccagtggctatgaaaaagccttcacaatgaagtcacagggataa

SEQ ID NO: 5610 - DNA, 415 bp, Homo sapiens
  SIMILAR (13)..(57): 1001254mologous to Homo sapiens ribosmal protein small subunit,accession number L13802,Smith-Waterman Score=75.
  misc_feature (1)...(415): n = a,t,c or g
ccacgcgtccgcaagcgccttacgaaaggcggcaaaaagggagccaagaagaaagtacaatgattgaagctcacgttgatgtcaagactaccgatggttacttgcttcgtctgttctgtgttggttttactaaaaaacgcaacaatcagatacggaagacctcttatgctcagcaccaacaggtccgccaaatccggaagaagatgatggaaatcatgacccgagaggtgcagacaaatgacttgaaagaagtggtcaataaattgattccagacagcattggaaaagacatagaaaaggcttgccaatctatttatcctctccatgatgtcttcgttagaaaagtaaaaatgctgaagaagcccaagtttgaattgggaaagctcatggagcttcatggtgaaggcagtagttn

SEQ ID NO: 5611 - DNA, 467 bp, Homo sapiens
  SIMILAR (54)..(119): 901254mologous to Homo sapiens ribosmal protein small subunit,accession number L13802,Smith-Waterman Score=101.
  misc_feature (1)...(467): n = a,t,c or g
ccgccattgcatcgcctcgcgctgcaggaattcggcacgagctgaccagcaccatggcggctggcaagaacaagcgccttacgaaaggcggcaaaaagggagccaagaagaaagcggttgcaatataataaatattggaaagacgctcgtcaccaggacccaaagaaccaaaattgcatctgatggtctcaagggtcgcgtgtttgaagagagtcttgctgatttgcagaatgatgaccgatggttacttgcttcgtgtgatctgagttgcttttactactgaacgcaccaatcagataaagaagtgttcaataaattgattccagacagcattggaaaagacatagaaaaggcttgccaatctatttatcctctccatgatgacttcgctagaaaagtaaaaatgctgaagaagcccaagtttgaattgagaaagctcatggagcttcatggtgaaggcagtagtn

SEQ ID NO: 5612 - DNA, 418 bp, Homo sapiens
  SIMILAR (336)..(416): 851254mologous to Eimeria tenella ribosomal protein S3a,accession number AF042107,Smith-Waterman Score=117.
cccacgcgtacgggcggatggcaagaactttcgccttactaaaggcggcgaactgggagccaggaacaaagtggttgatccattttctaagaaagattggtatgatgtgaaagcccctgctatgttcaatataagaaatattggaaagacgctcgtctccaggacccaaggaaccaaaattgcatctgatggtctcaagggtcgtgtgtttgaagcgagacttgctgatttgcagaatgatgaagttgcttttataaaatgcaagctgatcactgacgatgttcacggtaaaaactgcctgactatcttccatggcatggatcttacccgtgacaaaatgtggttcattgggcaaaaaatggcagacaatgattgaagctcacgttgatgtcaagactaccgatggttacttgcttcg

SEQ ID NO: 5613 - DNA, 341 bp, Homo sapiens
  SIMILAR (3)..(119): 1001254mologous to Homo sapiens v-fos transformation effector protein,accession number M84711,Smith-Waterman Score=201.
  misc_feature (1)...(341): n = a,t,c or g
tgggaaagctcatggagcttcatggtgaaggcagtagttctggaaaagccactggggacgagacaggtgctaaagttgaacgagctgatggatatgaaccaccagtccaagaatctgtttaaagttcagacttcaaatagtggcaaataaaaagtgctatttgtgnnnnnnnnnnnnnnnnnnnnnnnnnnnngggggggcctttttaaggaatccttgggggggccaaattttaccgggggtgggaaggaaaaatttttttctttttggggggggaattaaaaacctacttgggatttttgggaaggaaccttttttttgggggggggaaaaaatggaan

SEQ ID NO: 5614 - DNA, 237 bp, Homo sapiens
  SIMILAR (1)..(90): 961254mologous to Homo sapiens ribosomal protein S3a,accession number AB007148,Smith-Waterman Score=151.
atgctgaagaagcccaagtttgaattgggaaaactcatggagcttcatggtgaaggtagtagtactggaaaagccactggggatgagacagtcccagccactgggggtgatgccagcagcagttcatctggagcggctgccacaaaaaacgccggctgcagcagggaaggcgtggcagggtctgtgcgctccaaagagtcagcaacaggtgggagccctgaccactttccaaagttg

SEQ ID NO: 5615 - DNA, 1190 bp, Homo sapiens
  SIMILAR (114)..(569): 341254mologous to Homo sapiens v-fos transformation effector protein,accession number M84711,Smith-Waterman Score=95.
cgcccgccccattgcccccgctgatttagccccgctgcaggaattcggcacgagggctctctgaccagcaccatggcggttggcaagaacaagcgccttacgaaaggcgcgcaaaaagggatctcaagaagaaagtggttgatccatttcctaggcaaagattggtattgacgtcgaaagcaccctcttatgttccattataagaattattggaaagacggctcgtcacccaggaccccaagggacccaaaattgcaatctgatggtctccaagggttcgtgtgtttgaaagtgagtcttgctgatttgcagaaatgatgaagttgcatctaggaaattccaggctgattactgaggtttgtttcaggggtaaaaacttgccctgactaacttcccatggggcatgggatctttacccggtgacaaaaatgtgttcccatggtcaaaaaaattggcagaccaatgattgacagctcacgttgaatgttcaagactaacccgatgggttaccttgccctccgcctgttcctgtgttgggttttacctaaaaaaaccgcaaccaattcagattacggaaagcccctccttatgcttcagccacccaacaggtcccgcccaaatcccggaagaagatggatggaaaatcatgaccccgagaggtgccagacaaaatgaccttgaaaagaagtgggtcaataaattgattcccagacaagcattgggaaaagacattagaaaaggccctgcccaatcttattttatccctctcccatgatgtccttcgtttggaaaagttaaaattgctggaaggaagccccaagttttgaattggggaaagctcattgggagcttccatgggtggaagggcagtagttcctgggaaaagccacttggggacgcagacaggtgctaaagttggaacgagcctgatgggatatgaaccaccagtcccaagaatcctggtttaaagttcagacttcaaattagtggcaaataaaaagtgctatttgtgatggaaaaaaaaaaaaaaaaaaaaggggggggccctttttaaaaaatccttggggggcccaaatttaaccgggggtgggaaggcaaaatttttttctttttgggggggggtttaataccctccttgggaattttggaaaggaaccttttttttggggggggaaaaaaatggaacaacc

SEQ ID NO: 5616 - DNA, 2142 bp, Homo sapiens; identical to SEQ ID NO: 4221
  SIMILAR (799)..(1992): 901254mologous to Homo sapiens putative p150,accession number U93563,Smith-Waterman Score=1908.

SEQ ID NO: 5617 - DNA, 2745 bp, Homo sapiens
  SIMILAR (352)..(1782): 951254mologous to Homo sapiens putative p150,accession number U93563,Smith-Waterman Score=2344.
atggaaggtgaaatgaatgaaatgaagcgagaagggaagtttagagaaaaaagaataaaaagaaatgagcaaagcctccaagaaatatgggactatgtgaaaagaccaaatctacgtctgattggtgtacctgaaagtgatggggagaatggaaccaagttggaaaacactctgcaggatattatccaggagaacttccccaatctagcaaggcaggccaacgttcagattcaggaaatacagagaacgccacaaagatactcctcgagaagagcaactccaagacacataattgtcagattcaccaaagttgaaatgaaggaaaaaatgttaagggcagccagagagaaagacagatcaacgagacagaaagtcaacaaggatacccaggaattgaactcagctctgcaccaagcggacctaatagacatctacagaactctccacctcaaatcaacagaatatacatttttttcagcaccacaccacacttattccaaaattgaccacatacttggaagtaaagctctcctcagcaaatgtaaaagaacagaaattataacaaactatctctcagaccacagtgcaatcaaactggaactcaggattaagaatctcactcaaaaccgctcaactacatggaaactgaacaacctgctcctgaatgactactgggtacataacaaaatgaaggcagaaataaaaatgttctttgaaaccaacgagaacaaagacacaacataccagaatctctgggacacattcaaagcagtgtgtagagggaaatttatagcactaaatgcccacaagagaaagcaggaaagatccaaaattgacaccctaacatcacaattaaaagaactagaaaagcaagagcaaacacattcaaaagctagcagaaggcaagaaataactaaaatcagagcagaactgaaggaaatagagacacaaaaaacccttcaaaaaattaatgaatccaggagctggttttttgaaaggatcaacaaaattgatagaccgctagcaagactaataaagaaaaaaagagagaagaatctaatagacgcaataaaaaatgataaaggggatatcaccaccgatcccacagaaatacaaactaccatcagagaatactacaaacacctctacacaaataaactagaaaatctagaagaaatggataaattcctcgacacatacactctcccaagactaaacgaggaagaagttgaatctctgaatagaccaataacaggagctgaaattgtggcaataatcaatagcttaccaaccaaaaagagtccaggaccagatggattcacagctgaattctaccagaggtacaaggaggaactggtaccattccttctgaaactattccaatcaatagaaaaagagggaatcctccctaactcatgttatgaggccagcatcattctgataccaaagccaggcagagacacaacaaaaaaagagaattttagaccaatatccttgatgaacattgatgcaaaaatcctcaataaaatactggcaaaacgaatccagcagcacatcaaaaagcttatccaccatgatcaagtgggcttcatccctgggatgcaaggctggttcaatatacgcaaatcaataaatgtaatccagcatataaacagagccaaagacaaaaaccacatgattatctcaatagatgcagaaaaagcctttgacaaaattcaacaacccttcatgctaaaaactctcaataaattagaattggaagaaactactgtaaagttcatatggaaccaaaaaagagcccacatcgccaagtcaatcctaagccaaaagaacaaagctggaggcatcacactacgtgacttcaaactatactacaaggctacagtaaccaaaacagcatggtactggtaccaaaacagagatatagatcaatggaacagaacagagccctcagaaataacgctgcatatctacaactatctgatctttgacaaacctgagaaaaacaagcaatggggaacggattccctatttaataaatggtgctgggaaaactggctagccatatgtagaaagctgaaactggatcccttccttacaccttatacaaaaatcaattcaagatggattaaagacttaaacgttagacctaaaaccataaaaaccctagaagaaaacctaggcattaccattcaggacataggcatgggcaaggacttcatgtctaaaacaccaaaagcaatggcaacaaaagccaaaattgacaaatgggatctaattaaactaaagagcttctgcacagcaaaagaaactaccatcagagtgaacaggcaacctacaaaatgggagaaaattttcacaacctactcatctgacaaagggctaatatccagaatctacaatgaactcaaacaaatttacaagaaaaaaacaaacaaccccatcaaaaagtgggcaaaggacatgaacagacacttctcagaagaagacatttatgcagccaaaaaacacatgaaaaaatgctcatcatcactggccatcagagaaatgcaaatcaaaaccacaatgagataccatctcacaccagttagaatggcaatcattaaaaagtcaggaaacaacaggcatgcacccttttccatacacacccacattatgttcggctctctatatctacagatacagaaggacttgagcatccttggattttggtatccacggggcatcctggaaccaatctactga

SEQ ID NO: 5618 - DNA, 2802 bp, Homo sapiens
  SIMILAR (997)..(1863): 881254mologous to Homo sapiens putative p150,accession number U93563,Smith-Waterman Score=1386.
atgactatcatcatcaacattataatcatcatcatcaccatcatcactatcatcatcatagtccacatcatcaccatcaacatcgtcatcaccaccaccatcctcaccaccgttatcattagcagcaccataatcatcattatcaccatttttgtttttgagacaggtgcaatcaaactagaaatcaggattaagaaactcactcaaaaccgctcagctacatggaaactgaacaacctgctcctgaatgactactgggtacataacgaaatgaaggcagaaataaagatgttctttgaaaccaacgagaacaaagacacaacatgccagaatctctgggacacatttaaagcaatcaacaaaattgatagaccgctagcaagactaataaagaagaaaagagagaagaatcaaatagatgcaataaaaaatgataaaggggatatcaccactgataccacaggaatacaaactaccatcagagaatactataaacacctctatgcaaataaactagaaaatcgagaagaaatggataaattcttcgacacatacaccctcccaaggctaaaccaggaagaagttgaatctctgaatagaccaataacaggctccaaaattgaagaaataattaatagcttatcaatcaaaaaaagtccaggaccagacggattcacagccgaattctaccagaggtacaaggaggagctggtaccattccttctgaaactattccaatcaatagaaaaagagggaatcatccttaactcatgctgtgaggccagcatcatcctgataccaaagcctggcagagacacaaccaaaaaagagaattttagaccaatatccctgatgaacatcgatgcaaaaatcctcaataaaacactggcaaacagaatccagcagcacatcacaaagcttatccaccatgttcaagtgggcttcatccctgggatgcaaggctggttcaacatacgcaaatcaataaacaattggaaaaaaactactttaaagctcatatggaaccaaaaaagagcctgcattaccaagtcaatcctaagccaaaagaacaaagctggaggcatcacgctacctgacttcaaactatactacaaggctacggtaaccaaaacagcatggtactggtaccaaaacagagatatagaccaatggaacagaacagaggcctcagaaataataccacacacctacaactatctgagctttgacaaacctgacaaaaacaagaaatggggaaacaattctctatttaacaaatggtgctgggaaaactggctagccatatgtagaaagctgaaactggatcccttccttacactttatacaaaaattaattcaagatggattaaagacttaaattttggaactgaaaccataaaaaccctagaagaaaacctaggcaataccattcacgacataggcatgggcaaggacttcatgtctaaaacaccaaaagcaaaggcaacaaaagccaaaattgacaaatgggatctaattaaactaaagagcttctgcacagcaaaagaaactaccatcagagtgaacaggcaacctacagaatgggagaaaatttttgcaatctacccatctgacaaaggtctaatatccagaatctacaaagaactcaaacaagtttacaagaaaaaaacaaacaaccccatcaaaaagtgggcaaaggatacgaacagacacttctcaaatgaagacatttatgcagccaacagacacatgaaaaaatgctcatcatcactggccatcagagaaatgcaaatcaaaaccacaatgagatatcatctcgcaccagttagaatgacaatcattaaaaagtcaggaagtaacagacaaggtgagccagtggccatgtacggtgctggcagtcaacatcgtgatgacccagaggcccgagggagtgaggagcagctggtgggtgaaggtggccggactaatcagcaggcagaccaacaagctaaaatttctactattactgccgactcagacctggaagaagtagattgggctgcaatcacacaatgggtgcatcaccagtgcggacacctaggcgtgaagctgtacaaacctttgcagcccaagatggcattgaatggattttcccatattccttaccacctgcaagcagctggtttaactgaaagaatgaatgagttattgaacaaacagttgaaagtgttagggcaagaggccctccaaaaatacaccagtgttgaccccacctcccaggaaggaactattgttcttaatacccatttcatctctcagtctgctcctgacatacagcgcaagctcaaaaagattcaattactccatggcctctttatcaaaaatcccaaattctgccttgccaaaagtgctcccctcaacccagcatccttacttcttgtatcctcttcccttcctacttattcttgcactgacatccaagaccacctgcagccacacttcccaaacatttcctccaagactctcaccaaccccagtgaccagctgttcatagatggctcctcttccaggcccactggctcccccaaaattgctggatatgcagttgtttctcttgaccaagtaattaaagccaggcccttacctccaggaacctcctcccaaaaagcagaacttatagctctcaccagagccctaacccttcccaaaggtaaacaagtcaacatttatacaaattccaaatatgcctatcacatccttcattcccatgctgccatcggcaaaagagaagattctgtctcagctaacctctctggctgctag

SEQ ID NO: 5619 - DNA, 2463 bp, Homo sapiens; identical to SEQ ID NO: 4234
  SIMILAR (737)..(904): 871254mologous to Homo sapiens putative p150,accession number U93572,Smith-Waterman Score=269.

SEQ ID NO: 5620 - DNA, 1909 bp, Homo sapiens
  SIMILAR (696)..(752): 731254mologous to Homo sapiens putative p150,accession number U93570,Smith-Waterman Score=77.
atgagggaaagtttggaacttcctagagacttgttgactggttgtgaccaacatgatgataatgacatggacaatgaagtccaagctgaggaggtctcagatagaaatgaggaacttattgggaactggagtaaagctgctccagctcaaaccttggatcaacggggcctaggtacatctcagtcaactgcttcagagggtgcaacccgtaagccttggcagcttccatgtgatgttaagcccgagggtgcaaggagtgcaagagtcgaggcttgggtgcctccacctagatttcagaggatgtatggaaaaacctggatgtccagggagaagcctaatgcaggggcagagccccatggagaacctgtactaaggcagtgcagaagggaaatgaggagtacagggaggactcaccctgctggcctggaagggcactgttgcaaaggtgctaatcctttgcttcagtcagaaatgattctagaattagcagatggtagcggcagaggaaatgaagcaagagaaatacaaactaccatcagagaatactataaacacctctatgcaaataaactagaaaatctagaagaaatggataaattcctcgacacatgcaccctcccaagactaaaccaggaggaagctgaatctctgaatagaccaataacaggctctgaaattgaggcaataattaatagcttatcaaccaaaaaagtccaggaccagatggattcacaaccaaattctaccagagagaataaaatacctaggaatccaacttacaagagatgtgaaggacttcctcaaggagaaatacaaaccactgctcaacgaaataaaagaggatataaacaaatggaagaacattccatgctcatggataggaagaatcaatcttgtgaaaatggccatactgcccaagccatatgtagaaagctgaaactggatcctttccttacaacttatacaaaaattaattccagatggattaaagacttacatgttagacctaaaaccacaaaaaccctagaagaaaacctaggcaataccattcaggacataggcatgggcaaggacttcatgtctaaaacaccaaaagcaatggcaacagaagccaaaattgacaaatgggatctaattaaacgaaagagcttctgcgcagcaaaagaaactaccaccagagtgaacaggcaacctacagattgggagaaaatgtttgcaatctactcatctgacaaagggctaatatccagaatctacgaagaactcaaacaaatttacaagaaaaaaacaaacaaccccatcaacaagtgggcgaaggatatgaacagacacttctcaaaagaagacatttatgcagccaacagacacatgaaaaagtgctcatcatcactggccatcagagaaatgcaaatcaaaaccacagtgagcccattcgctgctcaatgggtcagtcagcggtatggaaagtggcaagaagcacacccaagcaacaatgatggtaagggataccggggcaaaccccgatttcaatccctctcagatgtccatggccctcaggaccaaaagaaaatcattaaagaatcagctctgcccccaacccctacctttatcaacatcctcatgaatgccaaaacaattgaaaatggtcaattcccatatttgctaaatgcactgaagcagcagcagccacatgatgcagagaatctgttcacttgggggaaggagaatgcagcaattgtgagcccctgtattgaagtcagcgctgccctgtcacagtggaaagtgccagcttggccacagaggagtggaataccaaataggattttgaggtccccaattccaggactaggctcttgggtagcatttcttgacctggtgtgggtgagaggggatcctactgccctgaaag

SEQ ID NO: 5621 - DNA, 1962 bp, Homo sapiens
  SIMILAR (1917)..(1961): 801254mologous to Homo sapiens putative p150,accession number U93574,Smith-Waterman Score=70.
atgaccaatgcagagaagtccttaaaggacctgatggagctgaaaaccaaggcacgagagctacatgacaaatgcagaagcctcagtagccgatgcgatcaactggaagaaagggtatcagtgatggaagacaaaatgaatgaaatgaagcaagaagagaagtttagagaaaaaagaataaaaagaaacgaacaaagccgccaagaaatatgggactatgtgaaaagaccaaatctacgtctgattggtgtacctgaaagtgacggggagaatggaaccaagttggaaaataccctgcaggatattatccaggagaacttccccaatctagcaaggcagaccaacattcagattcaggaaatacagagaacgccacaaagatactcctcgagaagagcaactccaagacacataattgtcagattcaccaaagttgaaatgaaggaaaaaatgttaagggaagccagggagaaagaccacagtgcaatcaaactagaactcaggattaagaaactcactcaaaaccgctcaactacaaggaaactgaacaacctgcttctgaatgactactgggtaaataatgaaatgaaggcagaaataaagatgttctttgaaaccaacgagaacaaagacacaacataccagaatctctgggaaacattcaaagcaatcaacaaaattgatagaccgctagcaagactaataaagaagaaaacagagaagaatcaaatagacgcaataaaaaatgataaaggggatatcaccaccgatcccacagaaatacaaactaccatcagagaatattataaacacctctacacaaataaactagaaaatctagaagaaatggataaattcttcaacacatacaccctcccaagactaaaccaggaagaaattgagtctctgaatagaccaataacaggatctgaaattgaggcaataatcaatagcttaccaaccaaaataagtccgggaccagatggattcacagccgaattctaccacaggtacaaagaggagctgagaataaaatacctaggaatccaacttagaagggatgtgaaggacctcttcaaggagaactacaaaccactgctcaatgaaataaaagaggatacaaacaaatggaagaacattccatgctcatgggtaggaagaatcaatatcgtgaaaatggctatagtgcccaaggtaatttatagattcaatgccatccccatcaagctaccaatgactttcttcacagaattggaaaaaactactttaaagttcatatggaaccaaaaaagagcccgcattgccaagtcgatcctaagccaaaagaacaaagctggaagcatcatgctacctgacttcaaactatactacaaggctacagtaaccaaaacagcatggtactggtaccaaaacagagatatagaccaatggaacagaacagagccctcagaaataatgtcacatatctacaactatctgatatttgacaaacctgagaaaaacaagcaatggggaaaggattccctatttaataaatggtgctgggaaaactggctagccatatgtagaaagctgaaactggatcgcttccttacaccttatacaaaaattaattcaagatggattaaagacttaaatgttaaaactaaaaccataaaaaccctagaagaaaacctaggcaataccattcaggacacaggcatgggcaaggacttcatgtctaaaacaccaaaagcaatggcaacaaaagccaaaattgacaaatgggatctaattaaactaaagaacttctgcacagcaaaagaaactaccatcagagtgaataggcaacctacagaatgggagaaaatttttgcaacctactcatctgacaaagggctaatatccagaatctacaatgaactcaaacaaatttacaagaaaaaaaaaacaaccccatcaaaaagtgggcaaaggatatga

SEQ ID NO: 5622 - DNA, 1851 bp, Homo sapiens; identical to SEQ ID NO: 2007
  SIMILAR (274)..(1779): 931254mologous to Homo sapiens putative p150,accession number U93572,Smith-Waterman Score=2471.

SEQ ID NO: 5623 - DNA, 1947 bp, Homo sapiens
  SIMILAR (1829)..(1945): 741254mologous to Homo sapiens putative p150,accession number U93563,Smith-Waterman Score=161.
atgaacattgatgcaaaaatcctcaataaaatactggcaaaccgaatccagcagcacatcaaaaagcttatccaccatgatcaagtgggcttcatccctgggaggcaaggctggttcaatatatgcaaatcaataaatgtaatccagcatataaacagagccaaagacaaaaaccacatgattatctcaatagatgcggaaaaggcctttgacaaaattcaacaactcttcatgctaaaaactctcaataaattaggtattgatgggacgtatttcaaaataataagagctatctatgacaaacccacagccaatatcatactgaatgggaaaaaactggaagcattccctttaaaaactggcacaagacagggatgccctctctcaccactcctattcaacatagtgttggaagttctggccagggcaatcaggcaggagaaggaaataaagggtattcaattaggaaaagaggaagtcaaattgtccctgtttgcagatgacatgattgtatatctagaaaaccccattgtctcagcccaaaatctccttaagctgataagcaacttcagcaaagtctcaggatacaaaatcaatgtacaaaaatcacaagcattcttatacaccaacaacagacaaacagagagccaaatcatgagtgaactcccattcacaattgcttcaaagagaataaaatacctaggaatccaacttacaagggatgtgaaggacctcttcaaggagaactacaaaccactgctcaaggaaataaaagaggatgcaaacaaatggaagaacattccatgctcatgggtaggaagaatcaatatcgtgaaaatggccatactgcccaaggtaatttacagattcaatgccatccccatcaagctaccaatgactttcttcacagaattggaaaaaaccactttaaagttcatatggaaccaaaaaagagcccacatcaccaaagcaatcctaagccaaaagaacaaagctagaggcatcacactacctgacttcaaactatactacaaggctacagtaaccaaaacagcatggtactggtaccaaaacagagatatagatcaatggaacagaacacagccctcagaaataacgccgcatatctacaactatctgatctttgacaaacctgacaaaaacaagcaatggggaaagggttccctatttaataaatggtgctgggaaaactggctagccatatgtagaaagctgaaactggatcccttccttacaccttatacaaaaatcaattcaagatggattaaagacttaaacgttagacctaaaaccacaaaaaccctagaagaaaacttaggcattaccattcaggacataggcatgggcatggacttcatgtctaaaacaccaaaagcaatggcaacaaaagacaaaattgacaaatgggatctaattaaactaaagagcttctgcacagcaaaagaaactaccatcagagtgaacaggcaacctacaaaatgggagaaaattttcacaacctactcatctgacaaagggctaatatccagaatctacaatgaactcaaacaaatttacaagaaaaaaacaaacaaccccatcaaaaagtgggcgaaggacatgaacagacacttctcaaaagaggacatttatgcagccaaaaaacacatgaaaaaatgctcaccatcactggccatcagagaaatgcaaatcaaaaccacaatgagataccatctcacacctgttagaatggcaatcattaaaaagtcaggaaacaacaggtgttggagaggatgtggagaaataggaacacttttacactgttggtgtgataaactggatgaagaaaacatggcacatatacacaatggaatactatgcatccataaaaaagaatgagttcatgtcctttgcaggggcatagatgaagctggaaaccatcattct

SEQ ID NO: 5624 - DNA, 1969 bp, Homo sapiens
  SIMILAR (2)..(1933): 951254mologous to Homo sapiens putative p150,accession number U93574,Smith-Waterman Score=3214.
aaaagagggaatcctccctaactcattttatgaggccagcatcatcctgataccaaagctgggcagagacacaaccaaaaaagagaattttagaccaatatccttagtgaacattgatgcaaaaatcctcaataaaatactggcaaaccgaatccagcagcacatcaaaaagcttatccaccatgatcaagtgggcttcatccctgggatgcaaggctggttcaatatacgcaaatcaataaatgtaatccagcttataaacagaaccaaagacaaaaaccacatgattatctcaatagatgcagaaaaggcctttgataaaattcaacaacccttcatgctaaaaactctcaataaattaggtattgatgggacgtatctcaaaataataagagctatctatgacaaacccacagccaatatcatactgaatgggcaaaaactggaagcattccctttgaaaactggcacaagacagggatgccctctctcaccactcctattcaacatagtgttggaagttctggccaggcccattaggcaggagaaggaaataaagggtattcaattaggaaaagaggaagtcaaaatgtccctgtttgcagacgacatgattgtatatctagaaaaccccattgtctcagcccaaaatctccttaagctgatcagcaacttcagcaaagtctcaggatacaaaatcaatgtacaaaaatcacaagcattcttatacaacaataacagacaaacagagagccaaatcatgagtgaattcccattcacaattgcttcaaagagaataaaatacctaggaatccaacttacaagggacgtgaaggacctcttcaaggagaactacaaatcactgctcaaggaaataaaagaggatacaaacaaatggaagaacattccatgctcatgggtaggaagaatcagtatcgttaaaatggccatactgcccgaggtaatttatagaatcagtgccatccccatcaagctcccaatgactttcttcactgaattggaaaaaactactttaaagttcatatggaaccaaaaaagagcccgcatcaccacatcaatcctaagccaaaagaacaaagctggaggcatcacactacctgacttcaaactatactacaaggctacagtaaccaaaacagcatggtactggtaccaaaacagagatatagaccaatggaacagaacagagccatcagaaataatgccacatatctacaactatctgatctttgacaaccctgagaaaaacaagcaacggggaaaggattccctatttaataaatggtgctgggaaaactggctagccatatgtagaacgctgcaactggatcccttccttacaccttatacaaaaattaattcaagatggattaaaggcttaaacgttagacctaaaaccataaaaaccctagaagaaaacctaggcattaccattcaggacataggcatgggcaaggacttcatgtctaaaacaccaaaagcaatggcaacaaaagccaaaattgacagatgggatctaattaagctaaagagcttctgcacagcaaaagaaactaccatcagagtgaacaggcaacctacaaaatgggagaaaattttcacaacctactcatctgacaaagggctaatatccagaatctacaaagaactcaaacaaatttacaagaaaaaaacaaacaaccccatcaaaaagtgggcaaaggatatcaacagacacttctcaaaagaagacatttatgcagccaaaaaacacatgaaaaaatgctcatcatcactggccatcagagaaatgcaaatcaaaaccacaatgagataccatcccacaccagttaggatggcaatcattaaaaagtcaggaaacaacagatgctggagaggatgtggagaaatagcaacacttttacactgttgggacatggatgaaattggaaatcatcattctcagtaa

SEQ ID NO: 5625 - DNA, 2272 bp, Homo sapiens
  SIMILAR (3)..(1430): 951254mologous to Homo sapiens putative p150,accession number U93563,Smith-Waterman Score=2338.
acagatcaacgagacagaaagtcaacaaggatacccaggaattgaactcagctctgcaccaagcggacctaatagacatctacagaactctccacctcaaatcaacagaatatacatttttttcagcaccacaccacacttattccaaaattgaccacatacttggaagtaaagctctcctcagcaaatgtaaaagaacagaaattataacaaactatctctcagaccacagtgcaatcaaactggaactcaggattaagaatctcactcaaaaccgctcaactacatggaaactgaacaacctgctcctgaatgactactgggtacataacaaaatgaaggcagaaataaaaatgttctttgaaaccaacgagaacaaagacacaacataccagaatctctgggacacattcaaagcagtgtgtagagggaaatttatagcactaaatgcccacaagagaaagcaggaaagatccaaaattgacaccctaacatcacaattaaaagaactagaaaagcaagagcaaacacattcaaaagctagcagaaggcaagaaataactaaaatcagagcagaactgaaggaaatagagacacaaaaaacccttcaaaaaattaatgaatccaggagctggttttttgaaaggatcaacaaaattgatagaccgctagcaagactaataaagaaaaaaagagagaagaatctaatagacgcaataaaaaatgataaaggggatatcaccaccgatcccacagaaatacaaactaccatcagagaatactacaaacacctctacacaaataaactagaaaatctagaagaaatggataaattcctcgacacatacactctcccaagactaaacgaggaagaagttgaatctctgaatagaccaataacaggagctgaaattgtggcaataatcaatagcttaccaaccaaaaagagtccaggaccagatggattcacagctgaattctaccagaggtacaaggaggaactggtaccattccttctgaaactattccaatcaatagaaaaagagggaatcctccctaactcatgttatgaggccagcatcattctgataccaaagccaggcagagacacaacaaaaaaagagaattttagaccaatatccttgatgaacattgatgcaaaaatcctcaataaaatactggcaaaacgaatccagcagcacatcaaaaagcttatccaccatgatcaagtgggcttcatccctgggatgcaaggctggttcaatatacgcaaatcaataaatgtaatccagcatataaacagagccaaagacaaaaaccacatgattatctcaatagatgcagaaaaagcctttgacaaaattcaacaacccttcatgctaaaaactctcaataaattagaattggaagaaactactgtaaagttcatatggaaccaaaaaagagcccacatcgccaagtcaatcctaagccaaaagaacaaagctggaggcatcacactacgtgacttcaaactatactacaaggctacagtaaccaaaacagcatggtactggtaccaaaacagagatatagatcaatggaacagaacagagccctcagaaataacgctgcatatctacaactatctgatctttgacaaacctgagaaaaacaagcaatggggaacggattccctatttaataaatggtgctgggaaaactggctagccatatgtagaaagctgaaactggatcccttccttacaccttatacaaaaatcaattcaagatggattaaagacttaaacgttagacctaaaaccataaaaaccctagaagaaaacctaggcattaccattcaggacataggcatgggcaaggacttcatgtctaaaacaccaaaagcaatggcaacaaaagccaaaattgacaaatgggatctaattaaactaaagagcttctgcacagcaaaagaaactaccatcagagtgaacaggcaacctacaaaatgggagaaaattttcacaacctactcatctgacaaagggctaatatccagaatctacaatgaactcaaacaaatttacaagaaaaaaacaaacaaccccatcaaaaagtgggcaaaggacatgaacagacacttctcagaagaagacatttatgcagccaaaaaacacatgaaaaaatgctcatcatcactggccatcagagaaatgcaaatcaaaaccacaatgagataccatctcacaccagttagaatggcaatcattaaaaagtcaggaaacaacag

SEQ ID NO: 5626 - DNA, 3480 bp, Homo sapiens; identical to SEQ ID NO: 4232
  SIMILAR (1075)..(2646): 741254mologous to Homo sapiens putative p150,accession number U93563,Smith-Waterman Score=1984.

SEQ ID NO: 5627 - DNA, 2817 bp, Homo sapiens
  SIMILAR (598)..(2379): 781254mologous to Homo sapiens putative p150,accession number U93563,Smith-Waterman Score=2302.
atgggagactttaacaccccacagtcaacattagacagatcaatgagacagaaagttaataaggatacccaggaattgaactcagctttgcaccacgcggacctaatacacatctacagaattctccaccccaaatcaacagaatatacatttttttcagcaccacaccacacctattccaaaattgaccacatagttggaagtaaagctctcctcagcaaatgtaaaagatcagaaattataacaaactgtctctcagaccacagtgcaatcaaactacaactcaggattaggaaactcactcaaaaccgctcaactacatggaaactgaacaacctgctcctgaatgactactgggtacataacgaaatgaaggcagaaataaagatgttctttgaaaccaacaagaacaaagacacaacataccggaatctctgggacacagtcaaatcagtgtgtagagggaaatttatagcactaaatgcccacaagagaaagcaggaaagatccaaaatggacaccctaacatcacaattagaagaactaaaaaagcaagagcaaacacattcaaaagctagcagaaggcaagaaataactaaaatcagagcagaactgaaggaaatagagacacaaaaaacccttcaaaaaattaatgaatccaggagctggttttttgaaaggatcaacaaaattgatagaccgctagcaaggctaataaagaagaaaagagagaagaatcacatagacgcaataaaaaatgataaaggggatatcaccaccgatcccacagaaatacaaactaacatcagagaatactataaacacctctacgcaaataaactagaaaatctagaagaaatggataaattcctcgacacatacaacctcccaagactaaaccaggaagaagttgactctctgaatagaccaataacaggctctgaaattgtggcaataatcaatagcttaccaaccaaaaagagtccaggaccagatggattcacagccgaattctaccagagggcaattaggcaggagaaggaaataaagggtattcaattaggaaaagaggaagtcaacttgtccctgtttgcagatgacatgattgtatatctagaaaaccccgttgtctcagcccaaaatctccttaagctgataagaaacttcagcaaagtctcaggatacaaaatcaatgtgcaaaaatcacaagcattcttatacaccaataacagacaaacagagagccaaatcatgagtgaactcccattcacaattgcttcaaagagaataaaatacctaggaatccaacttacaagggatgtgaaggacctcttcaaggagaactacaaaccactgctcaacgaaataaaagaggatacaaacaaatggaagaacattccatgctcatgggtaggaagaatcaatatcatgaaaatggccatactgcccaaggtaatttatagattcaatgccatccccatcaagctaccgatgactttcttcacagaattggaaaaaactactttcaagctcatatggaaccaaaaaagagcccacatcgccaagtcaatcctgagccaaaagaacaaagctggaggcatcacgctacctgacttcaaactatactacaaggctacagtaaccaaaacagcatggtactggtaccaaaacagagatatagatcaatggaacagaacagagccctcagaaataacgccgcatagctacaactatctgatctttgacaaacctgacaaaaacaagcaatggggaaaggattccctatttaataaatggtgttgggaaaactggctagccatatgtagaaagctgaaactggatcccttccttacaccttatacaaaaatcaattcaagatggattaaagacttaaatgttagacctaaaaccataaaaaccctagaagaaaacctaggcattaccattcaggacataggcatggaaaaggacttcatgtctaaaacaccaaaagcaatggcaacaaaagccaaaattgacaaatgggatctaattaaactaaagagcttctgcacagcaaaagaaactaccatcagagtgaacaggcaacctacagaatgggagaaaattttcacaacctactcatctgacaaagggctaatatccagaatctacaatgaactcaaacaaatttacaagaaaaaatcaaacaaccccatcaaaaagtgggcaaaggacatgaacagacacttctcaaaggaagacatttatgcagccaaaaaacacatgaaaaaatgctcaccatcactggccatcagagaaatgctaatcaaaaccacaatgagataccatctcacacgagttagaatggcaatcattaaaaagtcaggaaacaacaggtacctaagtattggacaagactatgccagagaaaacccagtgccattgagaagcaacaaggtttattggctattagagcagaaatcagaagacctgggagattggacagctacaggtttgtttggttttgttgttgttgttgttttgtccatcaagcacccatctttccaacgggactctctcccctaccccacagatggaagaagacgaggagccgccattgtatcagaaaagctttccggatcagaggcagcagcagcgtggcgtattaaaaggagcacaggaccaggagtaagaggacttgcactgctgcccctcctagcacacctgggagtagcctttgacacagtcagcgcggaggaaaggctttctggcagaggaagaactcggcaccatttcaaaggctccttgcagccgccttctaccgaccactcatga

SEQ ID NO: 5628 - DNA, 2093 bp, Homo sapiens
  SIMILAR (691)..(2091): 821254mologous to Homo sapiens putative p150,accession number U93563,Smith-Waterman Score=2020.
atggaaatcacaacaaactgtctctcagaacacagtgcaatcacattacaactcaggattaagaaactcactcaaaactgcacaactacatggaaattgaactacctgctcctgaatgactactgggtgaataacgaaatgaaggaagaaataaagatgttctttgaaaccaatgagaacaaagacacaacataccagaatctctgggacgtatttaaagcagtgtgtagagggaaatttatagcactaagtgcccacaagagaaagcaggaaagatctaaaactgacaccctaacatcacaattgaaagaactagagaagcaagagcaaacacattcaaaagctagcagaaggcaagaaataactaagatcagagcagaactgaaggagatagagacacaaaaaacccttcaagaaatcaatgattccaggagctcattttctgaaaagctcaacaaaattgatagaccgctagcaagactaataaagaagaaaagagagaagacacaaatagatgcaataaaaaacgataaaggggagatcaacaccaatcccacagaaatacaaactaccatcagagaatactataaatacctctatgcaaataaagtagaaaatctagaagaaatggatacattcctggacacatacaccctcccaagactaaaccaggaagaagttgaatctctgaatagaccaataacaggctctgaaattgaggcaataattaatagcctaccaaccaaagaaagtccaggaccagatggattcacagccgaattctaccagagggcaatcaggaaagggaaagaaataaagggtattcaattaggaaaagaggaagtcacattgtccctgtttgcagatgacatgattgtctatttaggaaaccccatcatctcagctcaaaatctcatgaagctgttaagcaacttcagcaaagtctcaggatacaaaatcaatgggcaaaaatcacaagcatgcccgtacaccaataacagacaaacagagagccaaatcatgagtgaactcccattcacaattgctacaaagagaataaaatacctaggaatccaacttacgagggatgtgaaggacctcttcaaggagaactacaaaccactgctcaacaaaataaaagaggacaaaaagaaatggaaaaacattcaatgctcatggataggaagaatcattatcatgaaaatggccatactgcccatggtaatttgtagattcaatgccatccccatcaagctaccaatgactttcttcacagaattggaaaaaactacgttaactttcatatggaaccaaaaaagagcctgcattgccaagaaaatcctaagcaaagagaacaaagctggaggcatcatgctacctgacttcaaactatactacaaggctacagtaaccaaaacagcatggtactggtaccaaaacagatacatagaacaatggaacagaacagaggcctcagaaataacaccacacatctacaaccatctgatctttgacaaatctgacaaaaacaagaaatggggaaacaattccctatttaataaatggtgctgggaaaactggctagctatatgtagaaagctgaaactgggtcccttccttacactttatacaaaaattaattcaagatggattaaagacttaaatgttagacctaaaaccataaaaaccctagaagaaaaccgaggcaataccattcaggacataggcatgggcaaggacttcatgactaaaacaccagaagcaatggcaacaaaaaccaaaatagacaaatgggatctaattaaactaaagagcttctgcatggcaaaagaaactaccatcagagtgcacagacaacctacagaatgggagaaaatttttgcaatctacccatctgacaaagggctaatatccagaatctacaaagaacttaaacaaatttacaagaaaaaaacaaacaaccccatcaaaaagtgggcaaaggacatgaacagacacttctcaaaagaagacatttatgcagccaacagacacatgaaaaaatgctcatcatcactggccatcagagaaatgcaaatcaaaaccacaatgag

SEQ ID NO: 5629 - DNA, 2727 bp, Homo sapiens
  SIMILAR (523)..(2715): 931254mologous to Homo sapiens putative p150,accession number U93565,Smith-Waterman Score=3541.
atggctgacatgctaacatgggaatcctgtcttgaggagtcactccaagaggagtcaccattggtcactcactgtggccccagctgctgcatctctggacagtcgcctccaagctcagctcgtccatcctcagtgtccagtgcaatctctgtgttgatgctgcctcagaacaggaagctgcctcctgcctggacgtctcctggaatcttccccacagatctggtggtttactccatgtcacttcctcatgcccttgccagatataactgtgatgtatgtaaaagcatgctgcctccaagattgtatgctcctgaggaaaaagctcgtacctctccactttgtggaacctggtactcaccttcactaccactttgtggagcctggtgcaagaagaatgagaagaagagggaaagagagagagagagaaagagacagagagaggatatactttctggtgcctcttcgtataaggacactattcatattcaattaagacccccaccttatgacgtccttcaacaaatacaaactaccatcagagaatacttcaaacacctctatgcaaataaactagaaaatctagaagaaatggataaactcctcgacacatacaccctcccaagactaaaccaggaagaagttgaatctctgaatagactaataacaggctctgaaattgtggcaataatcaacagcttaccaaccaaaaagagtccaagaccagatggattcacagctgaattctaccagaggtacaaggaggaactggtaccattccttctgaaactattccaatcaatagaaaaagggggactcctccctaactcattttatgaggccagcatcatcctgatgccaaagctgggcagagacacaaccaaaaaagagaattttagaccgatatccctgatgaacattgatgcaaaaatcctcaataaaatactggcaaaccaaatccagcagcacatcaaaaagcttatccagcatgatcaagtgggcttcatccctgggatgcaaggctggttcaatatttgcaaatcaataaatgtaatccagcatataaacagaaccaaagacaaaaaccacatgactatctcaatagatgcaggaaaagcctttgacaaaattcaacaactcttcatgctaaaaactctcaataaattaggtattgatgggacgtatctcaaaataataagagctatctatgacaaacccacagccaatatcattctgaatggggaaaaactggaagcattccctttgaaaactggcacaagacagggatgccctctctcaccactcctattcaacatagtgttggaagttctggccagggcaattaggcaggagaaggaaataaagggtattcgattacgaaaagaggaagtcaaattgtccctgtttgcagatgacatgattgtatatctagaaaaccccatcatctcagcccaaaatctccttaagctgataagcaacttcagcaaaatctcaggatacaaaatcaatgtacaaaaatcacaagcattcttatacaccaacaacagacaaacagagagccaaatcatgagtgaactcctattcacaattgcttcaaagagaataaaatacctaagaatccaacttactaaggacgtgaaggacctcttcaagaagaactacaaaccactgctcaatgaaataaaagaggatacaaagaaatggaagaacattccatgctcatgggtaggaagaatcaatatcgtgaaaatggccatacggcccaaggtaatttatagattcaatgccatccccatcaagctaccaatgactttcttcacagaattggaaaaaactactttcaagttcatatggaaccaaaaaagagcccgcatcgccaagtcaatcctaagccaaaagaacaaagctggaggcatcacactacctgacttcaaactatactacaaggctacagtaaccaaaacagcatggtactggtaccaaaacaaagatatagatcaatggaacagaacagagccctcagaaataatgccgcatatctacaactatctgatctttgacaaacctgacaaaaacaagcaatggggaaaggattccctatttaataaatggggctgggaaaactggctagccatatgtagaaagctgaaactggatcccttccttacaccttatacaaaaattaattcaagatggattaaagatttaaacgttagacctaaaaccataaaaaccctagaaaaaaacctaggcattaccattcaggacataggcatgggcaaggacttcatgtctaaaacaccaaaagcaatggcaacaaaagccaaaattgacaaatgggatctaattaaactaaagagcttctgcacagcaaaagaaactaccatcagagtgaacaggcaacctacaaaatgggagaaaatttttgcaacctactcatctgacaaagggctaatatccagaatctacaatgaactcaaacaaatttacaagaaaaaaacaaacaaccccatcaaaaagtgggtgaaggacatgaacagacacttctcaaaagaagacatttgtgcagccaaaaaacacatgaaaaaatgctcatcatcactggccatcagagaaatgcaaatcaaaaccacaatgagatatcatctcacaccagttagaatggcaatcattaaaaagtcaggaaacaacagggacatggatgaaattggaaatcttcattctcagtaa

SEQ ID NO: 5630 - DNA, 4683 bp, Homo sapiens
  SIMILAR (1078)..(3258): 991254mologous to Homo sapiens BC331191_1,accession number AC007842,Smith-Waterman Score=4075.
atggataaattcctcgacacatacaccctcccaagactaaaccaggaagaagttgaatctctgaatagaccaataacaggctctgaaattgtggcaataatcaatagcttaccaaccaaaaaagatccaggaccagatggattcacagccgaattctaccagagaataaaatacctgggaatccaacttacaagggatgtgaaggacctcttcaaggagaactacaaaccactgctcaaggaaataaaagaggatacaaacaaatggaagaacattccatgctcatgggtaggaagaatcaatatcatgaaaatggccatactgcccaaggtaatttatagattcaatgccatccccatcaagctaccaatgactttcttcacagaattggaaaaaactactttaaagttcatatggaaccaaaaaagagcccgcatcaccaagtcaatcctaagccaaaagaacaaagccggaggcatcacactacctgacttcaaactatactacaaggctacagtaaccaaaacagcatggtactgttaccaaaacagagatatagatcaatggaacagagcagagccctcagaaataatgctgcctatctacaactatctgatctttgacaaacctgacaaaaacaagcaatggggaaaggattccctatttaataaatggtgctgggaaaactggctagccatatgtagaaagctgaaactggatcccttccttacaccttatacaaaaattaattcaagatggattaaagacttacatgttagacctaaaaccataaaaaccctagaagaaaacctgggcaataccattcaggacataggcatgggcaaggactttatgtctaaaacaccaaaagcaatggcaacaaaagccaaaattgacaaatgggatctaattaaactaaagagcttctgcacagcaaaagaaactaccatcagagtgaacaggcaacctacaaaatgggagaaaattttcacaacctactcatctgacaaagggctaatatccagaatctacaatgaactcaaacaaatttacaagaaaaaaacaaccccatcaaaaaatttggagtcaaaatatggacctgagaaaatatctccagaaaatgatatttttgaaataaatttacccaaacatgttataaagcaaataagtaaaacacttggcctcgaggccttttattttagaaatgactcagaatatagaagtagatttgagggacgacagggacatcaagaaggatatatcaaccagaagatcatcagctatgaagaaatgcctgcttatactcatgcttctcctattcataatacacataaaccatatgaatgtaaggaatgtgggaaatactttagttgtggttcaaatcttattcagcatcagagtattcatactggagagaaaccctataaatgcaaagaatgtgggaaagcctttcaacttcacatacaacttactcgacatcagaaatttcatactggtgagaaaacttttgaatgtaaggaatgtggaaaagcctttaatcttcccacccagcttaatcgccataagaacattcacacagttaagaaactgtttgaatgtaaggaatgtgggaagtcttttaatcgtagctcaaaccttactcagcatcaaagtattcatgctggtgtaaaaccatatcaatgtaaggagtgtgggaaagcctttaatcgtggttcaaatcttattcagcatcaaaaaattcattccaatgagaaaccctttgtatgtagggaatgtgagatggcctttcgatatcattaccaactcattgaacattgccgaattcatactggcgagaaaccctttgaatgtaaagaatgcagaaaggcctttactcttctgacaaagcttgttcgacatcagaagattcatatgggtgagaagccctttgaatgcagggaatgcgggaaggcctttagtctcctcaatcagcttaatcgccataagaatattcacacaggtgaaaaaccatttgaatgtaaagaatgtgggaagtcctttaatcgtagttcaaaccttattcaacaccagagtattcatgctgatgtaaaaccatatgaatgtaaggagtgtgggaaaggctttaatcgtggtgcaaatcttattcagcatcaaaaaattcattccaatgagaaaccctttgtatgtagggaatgtgagatggcctttcgatatcattaccaacttattcaacattgccaaattcatactggtgggaaaccctttgaatgtaaagaatgtggaaaggcctttagtcttctgacacagcttgctcgacataagaacattcatactggtgagaaaccatttgaatgtaaagactgtgggaaggccttcaatcgtggctcgaaccttgttcaacatcagagtattcacactggtgagaagccctatgaatgtaaggagtgtgggaaggcttttagacttcacctacaactttctcaacatgagaaaactcatacaggtgagaaaccctttgaatgtaaggaatgtgggaaattctttcgtcgtggttcaaatcttaatcaacatcgaagtattcataccggaaagaaaccctttgaatgtaaggaatgtgggaaagcctttcgacttcatatgcaccttattcgacatcagaaatttcatactggtgagaagccctttgaatgtaaggaatgtggcaaggccttcagtcttcacacccagcttaatcaccataagaacattcacacaggtgagaagccatttaaatgtaaagaatgtgggaagtcctttaatcgtgtctcaaaccttgttcaacatcagagtattcatgctggtgtaaaaccatatgaatgtaaggagtgtgggaaaggctttagtcgtgtttcaaaccttattcagcatcagaaaactcattccagtgcgaaaccctttgtatgtaaggagtgtaggaagacctttagatatcattaccagcttactgaacattaccgaattcatactggtgagaaaccctttgaatgtaaagaatgcggaaaggcctttggtcttctgacacagcttgctcaacatcagatcattcatactggtgagaagccatttaaatgtaaggagtgtgggaaggcctttaatcgtggctcaaaccttgttcaacctcagagtattcatactggtgagaaaccctatgaatgtaaggagtgtgggaaggcttttagacttcacctacaactttctctgcatcaaaaacttgtacagaaaattcatacttgggtgaaaacctttgaatgtaaggaatgtgggaaggcctttcaatatcattaccaatttcatggacattatagatttcatattcgtgagaacccttatgaatgtcaaggatgtgggaaatgctttaccagtggtagaaaccttagagtacatcagagaattcatactggtgagaaaccatatcaatgtgaagaatgtaggaaggtctttactcagctctcacaacttattctgcataagagaattcataccggtgagaaaccctatgaatgtaaggaatgtggaaaagcttttatttgtggctcacagctttctcaacatcagaaaattcataatggggaaaaaccatatgaatgtaaggaatgtggaagggcctttattcggggctcactactgatgcaacatcagaggattcatactggtgaaaaaccctataaatgtgaagaatgtgggaaggcctttatccgtggctcacaacttactcaacaccagagaattcacaccaatgaaaagccctatgaatgtaaggaatgtggaaagatgtttagtcatggctcacaacttactcaacatcagagaatacacactggtgagaaaccctatcaatgtaaggaatgtggaaaagcgtttaatcgtggctcactccttacacgacaccagaggattcatactggtgagaaaccctatgaatgtaaagaatgtggaaaaacctttagtcgtggctcagaacttactcaacatgagcgaattcacacaggtgagaaaccctatgaatgtaaggaatgtgggaaatcttttattcgtggttcccagcttactcaacatcagagaatccatactggtgagaaaccttatgaatgtaaagaatgtagaatggcctttactcagagttcacatctttcccaacatcaaagacttcacactggtgagaaaccctatgtgtgtaatgaatgtggaaaggcctttgcgcgtggcttactacttatacaacatcagagaattcatactggtgagaaaccatatcaatgtaaggaatgtgggaaagcctttattcgtggttcacagttgactcaacatcagcgaattcacactggagaaaaaccctatgaatgcaaggagtgtggcaaggcctttagtcatggctctcagcttactctacatcagagaatccatactggtgagaagccctatgaatgcagagaatgtagaaaggcctttactcagagttcacatctttctcggcatcagagaattcatactggtgagaaaccatatcaatgtaaggaatgtgggaaggcctttactcgtggttcacagctaactcaacatcagagaattcatatcagtgagaaatcttttgaatataaggaatgtgggattgactttagtcatggctcacaagtttacatgtga

SEQ ID NO: 5631 - DNA, 1989 bp, Homo sapiens
  SIMILAR (1952)..(1987): 911254mologous to Homo sapiens putative p150,accession number U93565,Smith-Waterman Score=56.
atggataaattcctcaacacatacactctcccaagactaaaccaggaagaagttgaatctctgaatagaccaataacaggatctgaaattgtggcaataatcaatagcttaccaaccaaaaagagtccaggaccagatggattcacagccgaattctatcagaggtgcaaggaggaactagtaccattccttctgaaactattccaatcaatagaaaaagagggaatcctccctaactcattttatgaggccagcatcattctgataccaaagctgggcagagacacaaccaaaaaagagaattttagaccaatatccttgatgaacattgatgcaaaaatcctcaataaaatactggcaaaacgaatccagcagcacatccaaaagcttatccaccatgatcaagtgggcttcatccctgggatgcaaggctggttcaatatacgcaaatcaataaatgtaatccagcatataaacagagccaaagacaaaaaccacatgattatctcaatagatgcagaaaaagcctttgacaaaattcaacaacccttcatgctaaaaactctcaataaattagtgttggaagtgctggccagggcaattaggcaggagaaggaaataaagggtattcaattaggaaaagaggaagtcaaattgtccctgtttgcagatgacatgattgtatatctagaaaaccccattgtctcagcccaaaatctccttaagctgatgagcaacttcagcaaagtctcaggatacaaaatcaatgtacaaaaatcacaagcattcttgtacaccaacaacagacaaacagagagccaaatcatgagtgaactcccattcacaattgcttcaaagagaataaaatacctaggaatccaacttacaagggacatgaaggacctcttcaaggagaactacaaaccactgctcaaggaaataaaagaggatacaaacaaatggaagaacattccatgctcatgggtaggaagaatcaatatcgtgaaaatggccatactgcccatggtaatttacagattcaatgccatccccatcaagctaccaatgcctttcttcacagaattggaaaaaactactttaaagttcatatggaaccaaaaaagagcccgcatcgccaaggcaatcctaagccaaaagaacaaagctggaggcatcacactacctgacttcaaactatactacaaggctacagtaaccaaaacagcatggtaccagtaccaaaacagagatatagatcaatggaacagaacagagccctcagaaataatgccgcatatctacaactatctgatctttgacaaacctgagaaaaacaagcaatggggaaaggattccctatttaataaatggtgctgggaaaactgtctagccatatgtagaaagctgaaactggatcccttccttacaccttatacaaaaatcaattcaagatggattaaagacttaaacgttagacctgaaaccataaaaaccctagaagaaaacctaggcattaccattcaggacataggcatgggcaaggacttcatgtctaaaacaccaaaagcaatggcaacaaaagccaaaattgacaaatgggatctaattaaactaaagagcttctgcacagcaaaagaaactaccatcagagtgaaccggcaacctacaaaatgggagaaaattttttcaacctactcatctgacaaagggctaatatccagaatctacaatgaactcaaacaaatttacaagaaaaaaacaaacaaccccatgaaaaagtgggcaaaggacatgaacagacacttctcaaaagaagacatttatgcagccaaaaaacacatgaaaaaatgctcatcatcactggccatcacagaaatgcaaatcaaaaccacaatgagataccatctcacaccagttagaatggcaatcattaaaaagtcaggaaacaacagggacatggatgaaattggaaatcatcattctcagtaa

SEQ ID NO: 5632 - DNA, 2787 bp, Homo sapiens; identical to SEQ ID NO: 3823
  SIMILAR (229)..(2277): 831254mologous to Homo sapiens putative p150,accession number U93564,Smith-Waterman Score=2972.

SEQ ID NO: 5633 - DNA, 3573 bp, Homo sapiens
  SIMILAR (1501)..(3390): 961254mologous to Homo sapiens putative p150,accession number U93572,Smith-Waterman Score=3179.
atgggaaaaaaacagaacagaaaaactggaaactctaaaaagcagagggcctctcctcctccaaaggaacacagctcctcaccagcaacggaacaaagctggatggagaatgactttgatgagctgagagaagaaggcttcagacgatcaaattactctgagctacgggaggacattcaaaccaaaggcaaagaagttgaaaactttgaaaaaaatttagaagaatgtataactagaataactgatatagagaagtgcttaaaggagctgatggagctgaaaaccaaggctcgagaactacatgaagaatgcagaagcctcaggagccgatgtgatcaactggaagaaagggtatcagcaatggaagatgaaatgaatgaaatgaaaaacacacataggctcaaaataaaaggagcaccaagattcataaagcaagtcctgagtgacctacaaagagacttagactcccacacattaataatgggagactttaacaccccactgtcaacattagacagatcaacaagacaaaaaatcaacaaggatacccaggaattgaactcagctctgcaccaagcagacctaatagacatctacagaactctccactccaaatcaacagaatatacatttttttcagcaccacaccacacctattccaaaattgaccacatacttggaagtaaagctctcctcagcaaatgtaaaagaacagaaattataacaaactatctctcagaccacagtgcaatcaaactagaactcaggattaagaatctcactcaaaaccgctcaactacatggaaactgaacaacctgctcctgaatgactactgggtacataacgaaatgaaggcagaaataaagatgttctttgaaaccaacgagaacaaagacacaacataccagaatatctgggacgcattcaaagcagtgtgtagagggaaatttatagcactaaatgcccacaagagaaaacaggaaagatccaaaattgacaccctaacatcacaattaaaagaactagaaaagcaagagcaaacacattcaaaagctagcagaaggcaagaaataactaaaatcagagcagaactgaaggaaatagagacacaaaaaacccttcaaaaaattaatgaatccaggagctggttttttgaagggatcaacaaaattgatagaccgctagcaagaataataaagaaaaaaagagagaagaatcaaatagacgcaataaaaaatgataaaggggatatcaccaccgatcccacagaaatacaaactaccatcagggaatactacaaacacctctacgcaaataaactagaaaatctagaagaaatggataaattcctcgacacatacaccctcccaagactaaaccaggaagaagttgaatctctgaatacaccaataacaggctctgaaattgtggcaataatcaatagcttaccaaccaaaagagtccaggaccagatggattcacagccgaattctaccagagaaaaagagggaatcctctctaactcattttatgaggccagcatcattctgataccaaagccaggcagagacacaacaaaaaaagagaattttagaccaatatccttgatgaacattgatgcaaaaatcctcagtaaaatactggcaaaacgaatccagcagcacatcaaaaagcttatccaccatgatcaagtgggcttcatccctgggatgcaaggctgggtcaatatacacaaatcaataaatgtaatccagcatataaacagagccaaagacaaaaaccacatgattatctcaacagatgcagaaaaagcctttgacataattcaacaacccttcatgctaaaaactctcaataagttaggtattgatgggatgtatttcaaaataataagagctatctatgacaaacccacagctaatatcatactgaatgggcaaaaactggaagcattccctttgaaaactggcacaagacagggatgccctctctcaccactcctattcaacatagtgttggaagttctggccagggcaattaggcaggagaaggaaataaagggtattcaattaggaaaagaggaagtcaaattgtccctgtttgcagatgacatgactgtatatctagaaaaccccattgtctcagcccaaaatctccttaagctgataagcaacttcagcaaagtctcaggatacaaaatcaatgtgcaaaaatcacaaggattcttatacaccaacaacagacaaacagagagccaaatcatgagtgaactcccattcacaattgcttcaaagagaataaaatacctaggaatccaacttacaagggatgtgaaggacctcttcaaggagaactacaaaccactgctcaaggaaataaaagaggatacaaagaaatggaagaacattccatgctcatgggtaggaagaatcaatatcgtgaaaatggccatactgcccaaggtaatttacagtttcaatgccatccccatcaagctaccaatgcctttcttcacagaattggaaaaaactactttaaagttcatatggaaccaaaaaagagcccgcatcaccaagtcaatcctaagccaaaagaacaaagctggaggcatcacactacctgacttcaaactatactacaaggctacagtaaccaaaacagcatggtactggtaccaaaacagagatatagatcaatggaacagaacagagccctcagaaataacgccgcatatctacaactatctgatctttgacaaacctgagaaaaacaagcaatggggaaaggattccctatttaataaatggtgctgggaaaactggctagctatatgtagaaagctgaaactggatcccttccttacaccttatacaaaaatcaattcaagatggattaaagacttaaacgttagacctaaaaccataaaaaccctagaagaaaacctaggcaataccattcaggacataggcatgggcaaggacttcatgtctaaaacaccaaaagcaatggcaacaaaagccaaaattgacaaatgggatctaattaaactaaagagcttctgcacagcaaaagaaactaccatcagagtgaacaggcaacctacaaaatgggagaaaatttttgcaacctactcatctgacaaagggctaatatccagaatctacaatgaactcaaacaaatttacaagaaaaaaacaaacaaccccatcaaaaagtgggtgaaggacatgaacagacacttctcaaaagaagacatttatgcagccaaaaaacacatgaaaaaatgctcatcatcactggccatcagagaaatgcaaatcaaaaccacaatgagataccatctcacaccagttagagtggcaatcattaaaaagtcaggaaacaacaggattgatttggctattcaggctcttttgaagttccatatgaattttagaatagctttttcttattctgtgaaaaatgacattggtagttcgatgcaggatgccactgccctggcttcaggccgcaaaatgaatgatgctacttacattgagctttccactctaattggaggagaaagacaataa

SEQ ID NO: 5634 - DNA, 2630 bp, Homo sapiens
  SIMILAR (2091)..(2291): 891254mologous to Homo sapiens putative p150,accession number U93569,Smith-Waterman Score=323.
atgttctttgaaaccaacgagaacaaagacacaacataccagaatctctgggacacattcaaagcagtgtgtagaggaaaatttatagcactaaatgcccacaagagaaagcaggaaagatctaaaattgacaccctaacatcacaattaaaagaactagagaagcaagagcaaacgcattcaaaagctagcagaaggcaagaaataactaagatcagagcagaactgaaggaaatagagaaacaaaaaacccttcaaaaaatcaatgaatccaggagctggttttttgaaaagatcaacaaaattgatagaccgctagcaagactaataaagaagaaaagagagaagaatcaaatagacacaataaaaaatgataaagatatcaccactgatcccacagaaatacaaactaccatcagagaatactataaacacctctatgcaaataaactagaaaatctagaagaaatggataaattcctcgacacatacaccctcccaagactaaaccaggaagaagttgaatctctgaatagaccaataacaggctctgaaattgaggcaataattaatagcttaccaaccaaaaaaagtgcaggaccagatggattcacagccgaattctaccagaggtacaaggaggagctgcatataaacagaaccaaagacaaaaaccatatgattatctcaacagatgcagaaaaggcctttgacaaaattcaacaactcttcatgctaaaaactctcaataaattaggtattgatgggacatatctcaaaataaaaagagctatctatgacaaacccacagccaatatcatactgaatgggcaaaaactggaagcataccctttgaatactggcacaagacagggatgccctctctcaccactcctattcaacatagtgtgggaagttctggccagggcaatcaggcaggagaaggaaataaagggtattcaattaggaaaagaggaagtcaaattgtccctgtttgcagatgacgtgattgtatatctagaaaaccccatcatctcagcccaaaatctccttaagctgataagcaacttcagcaaagtctcaggatacaaaatatacaaaatcgatgtgcaaaaatcacaagcattcctatacaccaataatagacaaacagagagccaaatcatgagtgaactcccattcacaattgcttcaaagagaataaaatacccaggaatccaacttacaaggaatgtgaaggacctcttcaaggagaactacaaaccactgctcaatgaaataaaagaggacacaaacaaatggaagaacattccatgctcatggataggaagaatcaatattgtgaaaatggccatactgcccaaggtaatttatagattcaatgccatccccatcaagctaccaatgacttccttcacagaattggaaaaaactactttaaagttcatatggaaccaaaaaggagcccgcattgccaagacaatcctaagcaaaaagaacaaagttggaggcatcacgctacctgactttaaactatactacaaggctacggtaaccaaaacagcatggtactggtaccaaaacagagatatagatcaatggaacagaacagaggcctcagaaataacaccacccatctacaaccatctgatctttgacaaacctgacaaaaacaagaaatggggaaaggattccctatttaataaatggtgctgggaaaactggctagccatatgtagaaagctgaaactggatcccttccttacatcttatacaaaaattaattcaagatggattaaagacttaaatgttagacctaaaaccataaaaaccctagaagaaaacctaggcaataccattcaggacataggcatgggcaaggacttcatgactaaaacaccaaaagcaatggcaacaaaagccaaaattgacaaatgggatctaattaaactaaagagcttctgcacagcaaaagaaactaccatcagagtgaacaggcaacctacaaaatgggagaaaaattttgcaatctacccatctgacaaagggctaatatccagaatctacaaagaacttaaacaaaatttacaagaaaaaaatcaaaaaatcccatcaaaaagtgggcaaaggatatgaacagacacttctcaaaagaagacatttatgcagccaacagacacatgaaaaaatgctcatcatcactaatcatcaaagaaatgcaaatcaaaaccacaatgagataccatctcacaccagttagaatggcgatcattaaaaagtcaggaaacaacagtcaggcaccgtgtatgaaatctaacaatgcgctcatcgtcatcctcggcaccgtcaccctggatgctgtaggcataggcttggttatgccggtactgccgggcctcttgcgggatatcgtccattccgacagcatcgccagtcactatggcgtgctgctagcgctatatgcgttgatgcaatttctatgcgcacccgttctcggagcactgtccgaccgctttggccgccgcccagtcctgctcgcttcgctacttggagccactatcgactacgcgatcatggcgaccacacccgtcctgtggatctacccactagtcaattcaccatcttgttga

SEQ ID NO: 5635 - DNA, 10579 bp, Homo sapiens
  SIMILAR (1957)..(5343): 851254mologous to Homo sapiens putative p150,accession number U93563,Smith-Waterman Score=4843.
cctccggtctacagctcccagcgtgagcgacgcagaagacgggtgatttctgcatttccatctgaggtaccgggttcatctcactagggagtgccagacagtgggcgcaggccagtgggtgcgcgcaccgtgcggagccgaagcagggcgaggcattgcctcacctgggaagcgcaaggggtcagggagttccctttccgagtcaaagaaaggggtgacggacgcacctggaaaatcgggtcactcccacccgaatattgcgcttttcagaccggcttaaaaaacggcgcaccacgagactatatcccacacctggccttcggagggtcctacgcccacggaatctcgctgattgctagcacagcggtctgagatcaaactgcaaggccgcagcaaggctgggggaggggcgcccgccattgcccaggcttgcttaggtaaacaaagcagccggggaagctcgaactgggtgcagcccaccacagctcaaggaggcctgcctgcctctgtaggctccacctctgggggcagggcacagacaaacaaaaagacagcagtaacctctgcagacttaaatgtccctgtctgacagctttgaagagagcagtggttctcccagcacgcagctggagatctgagaacgggcagactgcctcctcaagtgggtccctgacccctgacccccgagcagcctaactgggaggcaccccccagcaggggcacactgacacctcacacggcagggtattccaacagacctgcagctgagggtcctgtctgttagaaggaaaactaacaaacagaaaggacatccacaccgaaaacgcatctgtacatcaccatcatcaaagaccaaaagtagataaaaccacaaagatggggaaaaaacagaacagaaaaactggaaactctaaaacgcagagcacctctcctcctccaaaggaacgcagttcctcaccagcaacggaccaaagctggatggagaatgattttgacgagctgagagaagaaggcttcagacgctcaaattactctgagctacgggaggacattcaaaccaaaggcaaagaagttgaaaactttgaaaaaaatttagaagaatgtataactagaataaccaatacagagaagtgcttaaaggagctgatggagctgaaaaccaaggctcgagaactacgtgaagaatgcagaagcctcaggagccaatgcgatcaactggaagaaagggtatcagcaatggaagatgaaatgaatgaaatgaagcaagaagggaagtttagagaaaaaagaataaaaagaaacgagcaaagcctccaagaaatatgggactatgtgaaaagaccaaatctacgtctgattggtgtacctgaaagtgatgcggagaatggaaccaagttggaaaacactctgcaggatattatccaggagactttccccaatctagcaaggcaggccaacgttcagattcaggaaatacagagaacgccacaaagatactcctcgagaagagcaactccaagacacataattgtcagattcaccaaagttgaaatgaaggaaaaaatgttaagggcagccagagagaaaggtcgagttaccctcaaagggaagcccatcagactaacagcggatctctcggcagaaaccctacaagccagaagagagtgggggccaatattgaacattcttaaagaaaagaattttcaacccagaatttcatatccagccaaactaagcttcataagtgaaggagaaataaaatactttacagacaagcaaatgctgaccgattttgtcaccagcaggcctgccctaaaagagctcctgaaggaagcgctaaacatggaaaggaacaaccggtaccagccactgcaaaatcatgccaaaatgtaaagaccatcgagactaggaagaaactgcatcaactaacgagcaaaatcaccagctaacatcataatgacaggatcaaattcacacataacaatattaactttaaatgtaaatggactaaattctccaattaaaagacacagactggcaagttggataaagagtcaagacccatcagtgtgctgtattcaggaaacccatctcatgtgcagagacacacataggctcaaaataaaaggatggaggaagatctaccaagcaaatggaaaacaaaaaaaggcaggggttgcaatcctagtctctgataaaacagactttaaaccaacaaagatcaaaagagacaaagaaggccattacatgatggtaaagggatcaattcaacaagaggagctaactatcctaaatatgtatgcacccaatacaggagcacccagattcataaagcaagtcctgagtgacctacaaagagacttagactcccacacattaataatgggagactttaacaccccactgtcaacattagacagatcaacgagacagaaagtcaacaaggatacccaggaattgaactcagctctgcaccaagcagacctaatagacatctacagaactctccaccccaaatcaacagaatatacatttttttcagcaccacaccacagctattccaaaattgaccacatacttggaagtgaagctctcctcagcaaatgtaaaagaacagaaattataacaaactatctctcagaccacagtgcaatcaaactagaactcaggattaagaatctcactcaaagccgctcaactacatggaaactgaacaacctgctcctgaatgactactgggtacataacgaaatgaaggcagaaataaagatgttctttgaaaccaacgagaacaaagacacaacataccagaatctctaggacgcattcaaagcagtgtgtagagggaaatttatagcactaaatgcccacaagagaaagcaggaaagatccaaaattgacaccctaacatcacaattaaaagaactagaaaagcaagagcaaacacattcaaaagctagcagaaggcaagaaataactaaaatcagagcagaactgaaggaaatagagacacaaaaaacccttcaaaaaatcaatgaatccaggagctggttttttgaaaggatcaacaaaattgatagaccgctagcaagactaataaagaaaaaaagagagaagaatcaaatagacacaataaaaaatgataaaggggatatcaccaccgatcccacagaaatacaaactaccatcagagaatactacaaacacctctacgcaaataaactagaaaatctagaagaaatggatacattccttgacacatacactctcccaagactaaaccaggaagaagttgaatctctgaatagaccaataacaggagctgaaattgtggcaataatcaatagtttatcaaccaaaaagagtccaggaccagatggattcacagccgaattctaccagaggtacaaggaggaactggtaccattctttctgaaactattccaatcaatagaaaaagagggaatcctccctaactcattttatgaggccagcatcattctgataccaaagccgggcagagacacaacaaaaaaaagagaattttagaccaatatccttgatgaacattgatgcaaaaatcctcaataaaatactggcaaaccgaatccagcagcacatcaagaagcttatccaccatgatcaagtgggcttcatccctggcatgcaaggctggttcaatatacgcaaatcaataaatgtaatccagcatagaaacagaaccaaagacaaaaaccacatgattatctcaacagatgcagaaaagttttttgacaaaattcaacaacccttcatgctaaaaaaactctcaataaattaggtattgatgggacgtatctcaaaataataagagatatctatgacaaacccacagccaatatcctactgaatggacaaaaactggaagcattccctttgaaaactggcacaagacagggatgtcctctctcaccactcctattcaacatagtgttggaagttctagccagggcaatcaggcaggagaagggaataaagggtattcaattaggaacagaggaagtcaaattgtccctgtttgcagatgacatgattgtatatgtagaaaaccccatcgtctcagcccaaaatctccttaagctgataagcaacttcagcaaagtctcaggatacaaaatcagtgtgcaaaaatcacaagcattcctatacaccaataacagaaaaacagagagccaaatcatgagtgaactcccattcacaattgcttcaaagagaataaaatacctaggaatccaacttacaagggacgtgaagggcctcttcaaggagaactacaaaacactgctcaacgaaataaaagaggatacaaacaaatggaagaacattttcattccatgcttatgggtaggaagaatcaatatcgtgaaaatggccatactgcccaagggaatttatagattcaatgccatccccatcaagctaccaatgactttcttcacagtactggaaaaaactactttaaagttcatatggaaccaaaaaagagcccgcattgccaagtcaatcctaagccaaaagaacaaagctggaggcatcacgctacctgacttcaaactattctacaaggctacagtaaccaaaacagcacggtactggtaccaaaatggagatatagatcaatggaatggaagagaccccttagaaataacgccacatatctacaactatctgatcttcgacaaacctgagaaaaacaagcaatggggaaaggattccctatttaataaatggtgctgggaaaactggctagccatatatggaaagctgaaaatggatcccttccctacaccttatacaaaaattaattcaagatggattaaagacttaaactttagacctaaaaccataaaaaccctagaagaaaacctaggcattaccattcaggacataggcatgggcaaggactttatgtctaaaacaccaaaagcaatggcaacaaaagccaaaattgacaaatgggatctaattaaactaaatagcttctgcacagcaaaagaaactaccatcagagtgaacaggcaacctacagaatgggagaaaatttttgcaatctactcatctgacaaagggctaatatccagaatctacaatgaactcaaacaaatttacaagaaaaaaatcaaacaaccccatcaaaaagtggacgaaggcacatgaacagacacttctcaaaagaagacatttatgcagccaaaaaacacatgaaaaaatgctcaccatcactggccatcagagaaataaatgcaaatcaaaaccacaatgagataccatctcacaccagttagaatggcaatcatgaaaaaagtcaggaaacaacaggattcaaggctggttcaacataagcaaatcaataaacgtaacccatcacacaaacagaaccaaaaacaaaaaccacatgattatctcaatagatgcagaaaaggccttcaataaaattcaataccccttcatgctaaaaactctcaataaattaggtgttgatggaacatatctcaaaacagtaacagctatttatgacaaacccacagtcaatatcatactgaatgggcaaaagctggaagcattccctttgcaaaccagcacaagacaaggatgctctctctcaccactcctattcaacactgtattggaagttctagccagggcaatcaggcaagagaaagaaataaaaggtattcaaataggaggagaggaagtcaaattgtctctgtttgcagatgacatgactgtatatttacaaaaccctatcatctcagcccaaaatctccttaagctgataagcaacatcagcaaggtctcaggatacaaaatcaatgtacaaaaatcacaagcattcttatacaccaataacagacaaacagagagacaaattatgagtgaactcccattcacaattgcttcaaagcgaagaaaatacctaggaatccaacttacaagggatgtgaaggacctcttgaaggagaactacaaaccactgctcaaggaaataagagaggacacaaacaaatggaaaaacattccatattcatggataggaagaatcaatatcgtgaaaatggccatactccccaagaggactccattattatcgctgcctagtacattatatgaggagctgtggagacttaggtcctacttcccattgtgccctcaactttacaacatggagcagaataccacagactgggtaatttataaagaacagtgcatttggctcacagctctggagactggggagtccaagagcactgcaccagcatttggcaagggttatcccatggcagaatacatcatatggggcagattgacacctcacatggctggctactcctctgagacaaaacttccagaggaacgatcaggcagcaacatctgctgttcaccaatatccgctgttctgcagcctctgctgctgatacccaggcaaacagggtctggagtggacctccagcaaactccaacagacctgcagctgagggtcctgactgttagaaggaaaactaacaaacagaaaggacatccacaccaaaaccccatctgtacgtcaccatcatcaaagaccaaaggatcaaattcacacataacaatattaaccttaaatgtaaatgggctaaatgctccaattaaaagacacagactggcaaattggataaagagtcaagacccatcagtgtgctgtattcaggagacccatctcacgtgcagagacacacacaggatcaaaataaagggatggagggagatctaccaagcaaatggaaaacaaaaaaaggcaggggttgcaatcctagtctctgataaaacggactttaaaccaacaaagatcaaaagagacaaagaaggccattacatgatggtaaagggatcaattcaacaagaagagctaactaccctaaatatatatgcacccaatacaggagcacccagattcataaagcaagtccttagagacctacaaagagacttagactcccacacattaataatgggagactttaacaccccactgtcaacattagacagatcaacgagacagaaagttaacaaggatatccaggatttgaactcagctctgcaccaagtggacctaatagacatctacagaactctccaccccaaatcaacagaatatacattcttctcagcactacaccacatttattccaaaattgaccacatagttggaagtaaagcactcctcagcaaatataaaacaacagaaattataacaaactgtctctcagaccacagtgcaatcaaactcgaactcaggattaagaaactcactcaaaaccgctcaactacatggaaactgaacaacctgctcctgaatgactactgggtacataacaaaatgaaggcagaaataaatacattatttgaaaccaacgagaacaaagacacaacataccagaatctctgggacacattcaaagcagtgtgtagagggaaattcatagcactaaatgcccacaagagaaagcaggaaagatctaaaattgacaccctaacatcacaattaaaagaactagagaagcaagaacaaacacattcaaaagctagcagaaggcaagaaataactaagatcagagcaaaactgaaggaaatagagacacaaaaaatccttcaaaaaatcaatgaatccaggagctggttttttgaaaagatcaacaaaattgatagaccactagcaagaccaataaagaagaaaagagagaagaatcaaatagatgcaataaaaaatgataaaggggatatcaccactgatcccacagaaatacaaactaccatcagagaatactataaacacctctatgcaaataaactagaaaatctagaagaaatggataaattcctcaacacatacaccctcccaagactaaaccaggaagaagttgaatctctgaataaaccaataacaggctctgaaattgaggcaataattaatagcttaccaatcaaaaaaagtccaggaccagatggattcatagccaaattccaccagaggtacaaggaggagctggaggccagcatcatcctgataccaaagcctggcagagacacaaccaaaaaagagaattttagaccaatacccctgatgaatattgatgcaaaaatcctcaataaaatactggcaaaccgaatccagcagcacatcaagaagcttatccaccatgatcaagtgggcttcatccctgggatgcaaggctcgttcaacatatgcaaatcaataaacgtaatccaggatataaacagaacgaatgacaaaaaccatatgattatctcaatagatgcagaaaaggcctttgacaaaattcaacaacccttcattctaaaaactctcaataaattaggtattgatgggacgtatctcaaaataataagagctatctatgacaaacccacagccaatatcatactgaatgggcaaaaactggaagcattccctttgaaaactggcacaagacaggggtgccctctctcaccactcctattcaacatagtgttggaagttctggccagggcaatcaggcaggagaaggaaataaagggcattcaattaggacaagaggaagtcaaattgtccctgtttgcagatgacatgattgtatatcgagaaaaccccatcgtctcaacccaaaatctccataagctgataagcaacttcagcaaagtctcaggatacaaaatcaatgtgcaaaaatcacaagcatttttatacaccaataacagacaaacagagagccaaatcatgagtgaactcccattcacaattgcttcaaagagaataaaatacctaggaatccaacttacaagggatgtgaaggatctcttcaaggagaactacaaaccactgctcaaggaaataaaagaggatacaaacaaatggaagaacattccatgctcatgggtaggaagaatcaatatcgtgaaaatggccatactgcccaaggtaatttatagatttaatgccatccccatcaagctaccaatgactttcttcacagaattggaaaaaactactttaaagttcatatggaaccaaaaaagagcccgcattgccaagtcaatcctaagccaaaggaacaaagctggaggcatcacactacctgacttcaaactatactacaaggctacagtaaccaaaacagcatggtactggtaccaaaacagagatatagaccaatggaacagaacggagccctcagaaataatgccacatatctacaaccatctgatctttgacaaacctgacaaaaacaagaaatggggaaatgattccctatttaataaatggtgctgggaaaactggctagccatatgtaggagaaagctgaaactggatcccttccttacaccttatacaaaaattaattcaagatggattaaagacttaaatgttagacctaaaaccataaaaaccctagaagaaaacctaggcaataccattcaggacataggcatgggcaaggacttcatgtctacaacaccaaaagcaatggcaacaaaagccaaaattgacaaatgggatctaattaaactaaagagcttctgcacagcaaaagaaactaccatcacagtgaacaggcaacctacagaatgggagaaaatttttacaatctacccatctgacaaagggctaatatccagaatctacaaagaactcaaacaaatttacaagaaaagaacaaacaaccccatcaacaagtgggtgaaggatatgaacagacacttctcaaaagaagacatttatacagccaaaaggcacatgaaaaaatgctcatcatcactggccatcagagaaatgcaaatcaaaaccacattgagataccatctcataccagttagaatggcgatcattaaaaagtcaggaaacaacagaccaagctccaatgtcttctctgtgaaactttctgagatccaatccttggctctcatagagactaggtgcttaatgaatgctgatgaacagggtgtgccactgattcaagaaatgctggaatcttgggcaagtatttgcaaagttcccaagtatccaaatgccgaagcagtgcggccagaagagcaaacaccccacctgcacccaggtgaaataaacagccatgttgctcacacaaagcttgtttggtggtctcttcacacggacacgcatgaaatttggtgccgtgactcggatcgggggacctcccttgggagatcaatcccctgtcctcctgctctttgctccgtgagaaagatccacctacgacctcaggtcctcagaccgaccagcccaagaaacatctcaccaatttcaaatccgcacacaagaacttccaaacgcctgaaccgcagcggccaggcgttcctccagaacctccttccccaggagcttgctacaagtgccagaaatctgaccaccaggccaaggaatgcctgcagcccaggattcctcctaagccgtgtcccatctgtgcgggaccccactggaaattggactgttcagctcacctggcagccactctcagagcccctggaactctggcccaaggctctctga

SEQ ID NO: 5636 - DNA, 876 bp, Homo sapiens
  SIMILAR (640)..(870): 801254mologous to Homo sapiens PRO2221,accession number AF116695,Smith-Waterman Score=312.
atgtggacacacgcttcagtatgcatgagctttcaaaacattgaaagctcatacatagctttggagaaaagtgacagccatcaggaaaaatcaggctcatcgtgccatttgggactattccctgatgctgtaactgcttcaaacaataagttacatggccgatactcaattaagaagcaaataaatacccatgattcctttccactccactgctttgccagtgattttcccagggtgcatgactactaccaaatctggcaactatattacttaactaagagagcaaccataaatacagctgccaactgcttcactctatatacaccccacaaaatgtacttagatgtcccttgccctcaaaaagctaagcctattagagaagacaaccccagtactaagacagagatttcaaaaacagaggttcaagataacagtctggcttttcccatttgtacggcattcctggatcttcagaaagcactggagatctcaagaccagaaaaacacagggaaggaaatcaagcaggctttccaaactcacagaattccaaagaaggcagaattactagggcaaattccagctccaaaggaaaaatccccagctcacccagaacactttccagtggaactacattactggatcgcagctcctcgccagcaatggaacaaagctggacggagaatgactttgatgagctgacagaagcaggcttcagaaggtcagtaataacaaacttctccaagctaaaggaggatgttcgaacccatcgcaaggaagctaaaaaccatgaaaaaagattagacaaatggctcactagaataaacagtgtagagaagaccttaaatgacctgatggagctgaaaaccatggaatga

SEQ ID NO: 5637 - DNA, 675 bp, Homo sapiens
  SIMILAR (1)..(306): 821254mologous to Homo sapiens VLA-3 alpha subunit,accession number D01038,Smith-Waterman Score=424.
atgaacaacctccgtgacaaactccatcccatcatcatctccatgaactactctttacctatacggatgccggatcgcctgcagccggggctctggtccctggacgcccaccaggcacgggctttggagaaccatactgaggtccagttccagaaggagtgcgggcctgacaataagtgcgagagcaacttgcagatacgggcagccttcatgtcggagcagcagcagaagccgggcaggctccagtacagcagagacgtctggaaactgctcctgagcatcaacgtgacgaacacccggaccaacacattagtccagaccattgctgtccgactccacatctgtgggcagggcacagctgaacaaaaggcagcagaaacttctgcagacttaaacgtcctggattgcagctcctcgccagcaacagaacaaagctggatggagaatgactttgacgagttgacagaagtaggcttcagaaggtcggtaataacaaacttctccaagctaaaggagcatgttctaacccatcgcaaggaagctgaaaaccttgaaaaaaggttacaagaatggctaactagaataaacagtgtagagaagaccttaaatgacctgatggagatgaaaaccatggcacaagaacttcgtgacatatgcacaagcttcaatagctga

SEQ ID NO: 5638 - DNA, 438 bp, Homo sapiens
  SIMILAR (250)..(435): 641254mologous to Homo sapiens PRO2221,accession number AF116695,Smith-Waterman Score=188.
atgggcaagaatggagtggctatgaagggtcaaggaaatgacatgggcaaaggcagagaggtgaaaaagtattcctgggcatttggagggaaggcaacttgctgtggtgttcctacagcagtgccccaggaaccacaagacaactccttttctcagactcaagaagtcttctgtgagtatcccaagagattttcttaccctctccccagaaacaggaatgcagagccttgggacttgggcctgggccatgccatgcctcagatcgcagatcacacctcctcaccagcaatggaacaaagcaggacagagaatgactttgatgagctgacagaagtaggcttcagaaagttggtaataacaaacttctccgagctaaagcaggatgttcaaacccatcgcaaggaagctaaaaaccttgaaaaaatactagatgaatag

SEQ ID NO: 5639 - DNA, 1011 bp, Homo sapiens
  SIMILAR (283)..(525): 381254mologous to Homo sapiens N-type calcium channel alpha-1 subunit,accession number M94173,Smith-Waterman Score=119.
atggtccgcttcggggacgagctgggcggccgctatgggggccccggcggcggagagcgggcccggggcggcggggccggcggggcggggggcccgggtcccggggggctgcagcccggccagcgggtcctctacaagcaatcgatcgcgcagcgcgcgcggaccatggcgctgtacaaccccatcccggtcaagcagaactgcttcaccgtcaaccgctcgctcttcgtcttcagcgaggacaacgtcgtccgcaaatacgcgaagcgcatcaccgagtggcctccattcgagtatatgatcctggccaccatcatcgccaactgcatcgtgctggccctggagcagcacctccctgatggggacaaaacgcccatgtccgagcggctggacgacacggagccctatttcatcgggatcttttgcttcgaggcagggatcaaaatcatcgctctgggctttgtcttccacaagggctcttacctgcggaacggctggaacgtcatggacttcgtggtcgtcctcacagggcggaaggctgggctgggctgctgtggctctggtgtggagagtggtggctggggagatcgcagctcctcgccagcaatggaacaaagcaggatggagaatgactttgatgagctgacagaagtaggcttcagaaagtcggtaataacaaacttctctgagctaaaggaggcatgtgcgaactcatcgcaaggaagctaaaaaccttgaaaaaagattagacaaaatggctaaatagaataaacagtgtagagaagaccttaaatgacccgatggagctgaaaaccatggcacgagaactatgtgatgcatgcacaagcttcagtagctgattcaatcaagtggaagaaaaggtatcagtaattgaagatcaaatggatgaaatgaagtgagaagagaagtttagagaaaaaagagtaaaaagaaatgaacaaagcctccaagaaatatgggactatgtgaaaagaccaaatctacgtttga

SEQ ID NO: 5640 - DNA, 1542 bp, Homo sapiens
  SIMILAR (1497)..(1541): 931254mologous to Homo sapiens putative p150,accession number U93563,Smith-Waterman Score=76.
atgctggtgagctttgtctctctgggttccctgtgccttcaaccaggtagccagactctgctggagaaaaatcgcacagtcaagccgcatgtctccttcacactgctgccagctttatctcatgtttctgagaaaaatgaagccgaaagcatgaactcccttatccctcccccgccaaatctacacacccctgcacaggcgcctttccctctgcccacaaaggagcaagatcgcagctcctcaccagcaacggaacaaagctggacagagaatgactttgatgagttgacagaagtaggcttcagaaggtcggtaataacaaactcctccaagctaaaggaggatgttcgaacccattgcaaggaagctaaaaatcttgaaaaaagattacatgaatggctaactagaatcaacagtgtagagaagaccttaaatgacctgaagctgaaatccatggcacgagaacttcatgacacatgcacaagcttcaatagccgatttgatcaagtggaagaaagggtgtcagcgattgaggatcaaaccaatgaaataaataatggggagaatggaaccaagttggaaaacactctgcaggatattatccaggagaacttccccaacctagcaaggcaggccaacattcaaattcaggaaatacggagaacaccacaaagatactcctcgagaaaagcaaccccaagacacataattgtcagattcaccaaggttgaaatgaaggaaaaagtgttaagggcagccagagagaaaggactagagaggcaagagcaaacaaattcaaaagctagcagaaggcaagatataactaagatcagtgcagaactgaaagagatagaaacacagaaaacccttcaaaaaattaatgaattcaggagccggttttttaaaaagatcaacaaaattgataaaacgctagcaagactaataaagaagaaaagagagaagaatcaaacagacgcaataaaaaatgataaaagggatatcaccaccgatcccacagaaatacaaactaccatcagagaatactataaacacctctatgcaaataaactagaaaatctggaagaaatggataaattcctggacacatacaccctcccaagactaaaccaggaagaagctgaatctctgaatagaacaataacaggctctgaaattgaggcaataattaatagcctaccaaccaaaaaaagtccaggaccagatggattcacagctgaattctaccagaggtacaaagaggagctgataccattccttctgaaactattacaatcaatagaaaaagagagaatcctccttaactcactttatgaggccaacatcatcctgataccaaagactggcagagacacaacaaaaaaagagaattttacaccaatatccctgatgaacatcaatgcgaaaatcctcaataaactactggcaaacagaatccagcagcacatcaaaaagcttatccaccatgatcaagttgcttcatccctgggatgcaaggctggttcaacatatgcaaatcaataa

SEQ ID NO: 5641 - DNA, 756 bp, Homo sapiens
  SIMILAR (319)..(750): 541254mologous to Homo sapiens p40,accession number U93571,Smith-Waterman Score=372.
atggatgaccccagattaaatgtcaagccactcacagaaagtttagagacttacagtggaaagtcaaaaggacttgaaggagatgtaattacagattcaaagctcaatgactgcaggtgcccctctgggacgaagcttccagaggaaggattgggcagcaatatttgctgttctgcaatatttgctgttctgcagcctctgctggtaatacctaggcaaacagggtctggagtggaccaccagcaaactccaactgacctgcggatgactgttagaaggaaaatgaacaagcagaaaggaatagcatcaacatcaacaaaaaggacaaaaaaggacatccacaccaaaaccccatctgtatgtcaccaacatcaaagaccaaaggattgcagcccctcgccagcaacagaacaaagctggatggagaatgacttagaagagctgacagaaataggcttcagaaggtcggtaataacaaacttctctgagctaaaggaggatgttcgaatccatcacaagaaagctaaaaaccttggaaaaagattagatgaatggctaactcgaataaacagtgtagagaagaccttaaatgacctgatggagctgaaaaccatggcacgagaactacatgactcatgcacaagcttcaatagccgatccaatcaagcagaagaaaaggtatcagtgattgaagatcaatttaatgaaataaagcgagaagagaagtttagagaaaaaaagagtaaaaagaaatga

SEQ ID NO: 5642 - DNA, 1008 bp, Homo sapiens
  SIMILAR (490)..(975): 221254mologous to Homo sapiens N-type calcium channel alpha-1 subunit,accession number M94173,Smith-Waterman Score=56.
atggtccgcttcggggacgagctgggcggccgctatgggggccccggcggcggagagcgggcccggggcggcggggccggcggggcggggggcccgggtcccggggggctgcagcccggccagcgggtcctctacaagcaatcgatcgcgcagcgcgcgcggaccatggcgctgtacaaccccatcccggtcaagcagaactgcttcaccgtcaaccgctcgctcttcgtcttcagcgaggacaacgtcgtccgcaaatacgcgaagcgcatcaccgagtggcctccattcgagtatatgatcctggccaccatcatcgccaactgcatcgtgctggccctggagcagcacctccctgatggggacaaaacgcccatgtccgagcggctggacgacacggagccctatttcatcgggatcttttgcttcgaggcagggatcaaaatcatcgctctgggctttgtcttccacaagggctcttacctgcggaacggctggaacgtcatggacttcgtggtcgtcctcacagggcggaaggctgggctgggctgctgtggctctggtgtggagagtggtggctggggagatcgcagctcctcgccagcaatggaacaaagcaggatggagaatgactttgatgagctgacagaagtaggcttcagaaagtcggtaataacaaacttctctgagctaaaggaggatgtgcgaactcatcgcaaggaagctaaaaaccttgaaaaaagattagacgaatggctaaccagaatgaacagtgtagagaagaccttaaatgacctgatggagctgaaaaccatggcacgagaactacgtgatgcatgcacaagcttcagtagccaattcgatcaagtgcaagaaatggtatcagtgattcaagatcaaattagtgaaatgaagcgagaagagaagtttagagaaaaaagagtaaaaagaaatgaacaagcctccaataaatatgggactatgtggaaagaccaaatctacgtttga

SEQ ID NO: 5643 - DNA, 675 bp, Homo sapiens; identical to SEQ ID NO: 5637
  SIMILAR (1)..(306): 821254mologous to Homo sapiens VLA-3 alpha subunit,accession number D01038,Smith-Waterman Score=424.

SEQ ID NO: 5644 - DNA, 810 bp, Homo sapiens
  SIMILAR (395)..(574): 831254mologous to Homo sapiens putative p150,accession number U93564,Smith-Waterman Score=254.
atggggagaaaccagagcagaaaagctgaaaattctaaaaaccagagtgccttttctcctccaagggattgcagctcctcgccagcaatggaacaaagccagatggagaatgactttgacaagttgacagaagtaggcttcagaaggttggtaataacagacttctccaagctaaaggaggatgttcgaacccatcgcaaggaagctaaaaaccttgaaaaaagattagacaaatggctaactagaataaacagtgtagagaagaccttaaatgacctgatggagctgaaaaccatggcgcgagaactacatgacacatgcacatgcttcagtagccgattcgatctagtggaagaaagggtatcagtgattgaagatcaaattaatgaaatgaattgcttcagagagaataaaatacctaggaatccaacctacaagggatgtgaaggacctcttcaaggagaactacaaactactgctcaacaaaataaaagaggacacaaacaaatggaagaacattccatgctcatgaataggaagaatcagtatcatgaaaatggctgtactgtgcaaggattggaaaaaactactctaaagttcatatggaaccaaaaaagagcccgcattgccaagccaatcctaagccaaaagaacaaagctggaggcatcacactacctgacttcaaactatactacaaggctgcagtaaccaaaacagcgtggtactggtaccaaaacagatatagaccagtggaacagaacacagccctcataaataataccacacatctacaaccatctgatctttga

SEQ ID NO: 5645 - DNA, 1620 bp, Homo sapiens
  SIMILAR (610)..(1557): 721254mologous to Homo sapiens p40,accession number U93569,Smith-Waterman Score=1165.
atgtggacacacgcttcagtatgcatgagctttcaaaacattgaaagctcatacatagctttggagaaaagtgacagccatcaggaaaaatcaggctcatcgtgccatttgggactattccctgatgctgtaactgcttcaaacaataagttacatggccgatactcaattaagaagcaaataaatacccatgattcctttccactccactgctttgccagtgattttcccagggtgcatgactactaccaaatctggcaactatattacttaactaagagagcaaccataaatacagctgccaactgcttcactctatatacaccccacaaaatgtacttagatgtcccttgccctcaaaaagctaagcctattagagaagacaaccccagtactaagacagagatttcaaaaacagaggttcaagataacagtctggcttttcccatttgtacggcattcctggatcttcagaaagcactggagatctcaagaccagaaaaacacagggaaggaaatcaagcaggctttccaaactcacagaattccaaagaaggcagaattactagggcaaattccagctccaaaggaaaaatccccagctcacccagaacactttccagtggaactacattactggatcgcagctcctcgccagcaatggaacaaagctggacggagaatgactttgatgagctgacagaagcaggcttcagaaggtcagtaataacaaacttctccaagctaaaggaggatgttcgaacccatcgcaaggaagctaaaaaccatgaaaaaagattagacaaatggctcactagaataaacagtgtagagaagaccttaaatgacctgatggagctgaaaaccacaccaattcgattaagtggaagaaaggctatcgtggttgaagatcaaattaatgaaataaaacgagaagacaagattagagaaaaaagagtaaaaagaaacgaaaaaagcctccaagaaatatgggactatgtaaaaaaaccaaatctacatttgattggtgtacctgaaagtgacggggagaatggaaccaagttagaaaacactcttcaggatattatccaggagaacttctccaacctagcaaggcaggccaatattcaaattcaggaaatatggagaccaccacaaagatattcctcaagaagagcaactccaagacacataattgtcagattaaccaaggttgaaatgaaggaaaaaatgttaaaggcagccagagagaaaggtcaggttacccacaaagggaagcccatcggactaacagcagatctctcgtcagaaaccctacaagccagaagagagtgggggccaatattcaacattcttaaaagaaagaattttcaatccagaatttcatatccagccaaactaagcttcgtaagtgaagggcaaatcaaatcctttacagacaagcaaatgctgagagattttgtcaccaccagacctgccttacaagagctcctaaaggaagcactaaacattgaaaagaacaaccagtaccagccaccgcaaaaacatgccaaattgcaaagaccattcattcatgctgtgaagaaactacatcaattaacgggcaaaataaccagctaa

SEQ ID NO: 5646 - DNA, 1896 bp, Homo sapiens
  SIMILAR (1567)..(1893): 771254mologous to Homo sapiens p40,accession number U93567,Smith-Waterman Score=426.
atggtgaggtccctgagccctggtgccagtgcaccgcctaaggcctatcaggatgctgttcttccgagtggggcactagctgagatgcaagaccccatcatagtgagtgaaactcctcgtgttacaagatcagcatttctcagagatgtgcacaagggcattgccagcagcgttgttagtggtatgaagaataagaaacgaccaaatagccctgagcatgagactggactcataaattccaatatagtcaggggcaacgtctgggagaccctgaccgaagttatagaaaagcctgcaaatgaaggctctgctctggagaatggtcttccagctcacattccggctgaagaaggtgacaagggtttaattttgcttgctaattttgctaaacaaatagacaaaccaacaaacaaaagccctgccaatgccggcatccaacccaccagtaggaaagtcccccaagggaaaatgtatgcagtgtcagagtggcactgcgatgtctcctcgcccttccacacagagccccaaatccagcaggctctctgggctgagtcctgccctagcaggctcgagcatgaggaagctgggcggaggcagagtaggtctccagcccgcctccggaccctcgggctgtacccatgcagatctgctccatggatgccggccacctccctgtctaatgccactgtatattctgcacatattctcgctgctgacaaggccatccatttgcgttcacaaagactgttcggcattctagcaactcataggaagtgggagcacgttcccatcacgtgcactggggcttcgcggaaatgcttctctcctggcaataaaaagaagaaagaggaggaaatgactattttctgcaaacacagagaaaaactggctggccagggtgctccagtgcgcaccgtttcccacagctgctcgccccacctgggaagctttgcccagcctaactgggagacacctcccagtaggggccgacagatacccaggcaaacagggtctggagtgtacctccagcaaactccaacagacctgcagctgagaaacttgactgttagaaggaagcatcaacatcaacaaaaaggacatctataccaaaacccaatctgtaggtcgccagcatcaaagaccaaaggtagataaaactacaaagatggggagaaaccagaacagaaaagctgagaattctaaaaaccagagtgcctcttctcctccaaaggattgcaggctcctcgccagcaatggaacaaagctggatggagaacaactttgatgagttgacagaaataggcttcagaaggtcggtaataacaaacttctccgagctaaaggaggatgttcaaacccattgcaaggaagctaaaaaccttaaaaaaagattagatgaatgcctaactagaataaacagtgtagagaagaagaccttaaatgacctgatggagctgaaaaccatggcacaagaacttcatgacacatgcacaagcttcaatacccaattcgatcaagtggaagaaagggtatcagtgattgaagatcaaattaatgaaataaagtgagaagagaagtttagagaaaaaaagagtaaaaataaatgaataaagctgccaagaaatatgggactaggtgaaaagaccaaatatacatctgattactgtacctgaaagtgatggggagaaaggaaccaagttggaaaacactctgcaggatattatccaggagaacttccacaacatagcaaggcaggctaacattcaaattcaggaaatacaaagaacagcacaaagatattcctcgagaacagcaaccccaagacacataattgtcagattcgccaaggttgaaatgaaggaaaaagtgttaagggcagccagaaagaagggttga

SEQ ID NO: 5647 - DNA, 1017 bp, Homo sapiens; identical to SEQ ID NO: 4872
  SIMILAR (213)..(584): 681254mologous to Mus musculus Pro-Pol-dUTPase polyprotein,accession number Y12713,Smith-Waterman Score=418.

SEQ ID NO: 5648 - DNA, 1101 bp, Homo sapiens
  SIMILAR (508)..(666): 771254mologous to Mus musculus Pro-Pol-dUTPase polyprotein,accession number Y12713,Smith-Waterman Score=232.
atgcagatttgtattacaatttcggaaccattaatgactggagttaagcgtaggggacaatgcatgctaaagaggattgacccaattttggatctcgaccagatattcacggaaagacaactgttttctgggcagcagcagctagtgttcaggaatcccctgcaccctctgtcaactccagaagccagatcaatacccgtatccattggatggaaatgtcatcttggcaatgagagggatcccagccaattctctatcagggccaccttcacctataggcaggatgagtgttcccttggactgaccatcacatgtgctctccaaccagcttgcagacagcctgttgtgggaccttgtgatcatgactatatgtggagaaccaaggaacacaatgaagttggttggttgctcctaagttcagtggacaaagtgaagaaagaaaatgatgaactcagggattctaactcccggcttcagaagcagatactgagtctcaaatctggatacctccagctttttaccagggtaactgtgcactggggaaagggaaatgatcagacatttcggggagtagtggacactggctctgagctgacactgattccagggaactcaaaacatcattgtggttccccagttaaaataggggcttgtggaggtcagatcagaagaaatctggctgttgaagagccagcaagaataatgacttgggttatgaaagagaccaccatgttcagggcagagaaagcagctgacactgctgaatctctagccctgactctggaggatggtcccttggagcttcattatggagaatttgcatgttatggagaggtgcctccaagaatctacggaatcctgacacgcttagttcagcattccccagacaagataatagcatgttctggtgaaaagtccacccgaaaggagattgtgttagggagccagcacacacttgaaattgcaaaacaaaagttagttgatccatattgtggctctgctccttatttacagagagaagaggggagtgggaacaagaattgggatctttcttcaccaggataccagttggctttgcctactggacagggaggaagttag

SEQ ID NO: 5649 - DNA, 589 bp, Homo sapiens
  SIMILAR (35)..(538): 431254mologous to Mus musculus MUS MUSCULUS GENOMIC DNA CONTAINING N ALLELE OF FV1 GENE,accession number A67510,Smith- Waterman Score=301.
aataataaggagggcggtcttccgttggttttggggttaaaggagttggggccttaatatgattagaccccaaaatactaaggactctaattctaattgtttggagaagactgatagcccttggtgtgaactgtttaaagagttatacaaaataaatgcctttgacactcctgattcattgctcatgagaggcaacgagtttagtgaccctatacatcatacctttgaccatatgtggagaactaaggaacataatgaagctggttggttgctcctaagttcagtggataaagtgatgaaagaaaatgatgaactcggggattctatctcccagcttcagaagcagatactgagcctcaaatctgccaagattgccctgagtgagagtctaatctcctgtagagaaagagctgaaattgtggaaaaatagacataagctcttatcatgttagtggctgacctgcaatgaaaggtgcatgcacagcctcaccatgcacagcctcgccaagtatctactgttaaagtgagggcattgattgttttgcaggaagtcacggacccttgatggagggatcggccacagctgagg

SEQ ID NO: 5650 - DNA, 499 bp, Homo sapiens
  SIMILAR (161)..(499): 1001254mologous to Homo sapiens unnamed protein product,accession number AK024782,Smith-Waterman Score=586.
tttgtgcttgtggatgttaacaacatgtggcatcggtacgccagtatgctgtacgaacgccggttactcatcatttgcagcaaactcagcactctgactgcctgcatccacgggtttgcggcgatgctctaccccatgtactggcagcacgtgtacatctcccgtgctgccgccgcatctgctggactactgctgtgctcccatgccctacctcataggaatccatttaagtttaatggagaaagtcagaaacatggccctggatgatgtcgtgatcctgaatgtggacaccaacaccctggaaacccccttcgatgacctccagagcctcccaaacgacgtgatctcttccctgaagaacaggctgaaaaaggtctccacaaccactggggatggtgtggccagagcgttcctcaaggcccaggctgctttcttcggtagctaccgaaacgctctgaaaatcgagccggaggagccgatcactttctgtgaggaagcc

SEQ ID NO: 5651 - DNA, 798 bp, Homo sapiens
  SIMILAR (562)..(663): 1001254mologous to Homo sapiens unnamed protein product,accession number AK024782,Smith-Waterman Score=202.
atggggcgtgcttctgaactgaggcttgatgggaactgcgagtgctccctgcagctgctcctggggccccgctctgccccacagtggaggaaccaagatacactggttgactccttccgactgcctttggtgtttgctgttttgtttttcactgagtttgttaagaggcaagttggtgtggtggttaggagaaatctgacagaatattttgtggctgtggatgttaacaacatgttgcatctgtacgccagtatgctgtacgaacgccggatactcatcatttgcagcaaactcagcactttcgcagtgcttgagacattgtacaagtacacagacaccagacaccaacctccaaaatccaagaggtctgtctttctgcagtccatggatgtgcagcaaatggcagatacgtattttcataaacctctgggcattgtgcagctcccttgctcctgtgacattgccatcctctggcagagggcacaagaagcagctctggtgccattgaccagaattgagtcacatgccatgcctctgctccagcccatcactggcaaggaactgactgcctgcatccacgggtctgcggcgatgctctaccccatgtactggcagcacgtgtacatccccgtgctgccgccgcatctgctggactactgctgtgtaatgcagttaaagacattgtctccaaacagttcaagtcaacagaagtccgtaagggagcatggtacacagacagggaaaggcactaactgcgtgccggatattgagagcttcaggagaagggaagccatttga

SEQ ID NO: 5652 - DNA, 5190 bp, Homo sapiens
  SIMILAR (175)..(3531): 1001254mologous to Homo sapiens ankyrin-like protein,accession number Y10601,Smith-Waterman Score=5877.
ccagaagttctccagggcttccgcagagcactttttcgctgcctgtgagctgcagcgcgggagagctcgggctcgcgcggaccccagcgcctggcaggctgacagcgctctctcgccccaggtgcccgcgcgcgtggtgagcagctgcaccaggtggcgtccggggtggggtcaatgaagtgcagcctgaggaagatgtggcgccctggagaaaagaaggagccccagggcgttgtctatgaggatgtgccggacgacacggaggatttcaaggaatcgcttaaggtggtttttgaaggaagtgcatatggattacaaaactttaataagcaaaagaaattaaaaacatgtgacgatatggacaccttcttcttgcattatgctgcagcagaaggccaaattgagctaatggagaagatcaccagagattcctctttggaagtgctgcatgaaatggatgattatggaaatacccctctgcattgtgctgtagaaaaaaaccaaattgaaagcgttaagtttcttctcagcagaggagcaaacccaaacctccgaaacttcaacatgatggctcctctccacatagctgtgcagggcatgaataatgaggtgatgaaggtcttgcttgagcatagaactattgatgttaatttggaaggagaaaatggaaacacagctgtgatcattgcgtgcaccacaaataatagcgaagcattgcagattttgcttaacaaaggagctaagccatgtaaatcaaataaatggggatgtttccctattcaccaagctgcattttcaggttccaaagaatgcatggaaataatactaaggtttggtgaagagcatgggtacagtagacagttgcacattaactttatgaataatgggaaagccacccctctccacctggctgtgcaaaatggtgacttggaaatgatcaaaatgtgcctggacaatggtgcacaaatagacccagtggagaagggaaggtgcacagccattcattttgctgccacccagggagccactgagattgttaaactgatgatatcgtcctattctggtagcgtggatattgttaacacaaccgatggatgtcatgagaccatgcttcacagagcttcattgtttgatcaccatgagctagcagactatttaatttcagtgggagcagatattaataagatcgattctgaaggacgctctccacttatattagcaactgcttctgcatcttggaatattgtaaatttgctactctctaaaggtgcccaagtagacataaaagataattttggacgtaattttctgcatttaactgtacagcaaccttatggattaaaaaatctgcgacctgaatttatgcagatgcaacagatcaaagagctggtaatggatgaagacaacgatgggtgtactcctctacattatgcatgtagacaggggggccctggttctgtaaataacctacttggctttaatgtgtccattcattccaaaagcaaagataagaaatcacctctgcattttgcagccagttatgggcgtatcaatacctgtcagaggctcctacaagacataagtgatacgaggcttctgaatgaaggtgaccttcatggaatgactcctctccatctggcagcaaagaatggacatgataaagtagttcagcttcttctgaaaaaaggtgcattgtttctcagtgaccacaatggctggacagctttgcatcatgcgtccatgggcgggtacactcagaccatgaaggtcattcttgatactaatttgaagtgcacagatcgcttggatgaagacgggaacactgcacttcactttgctgcaagggaaggccacgccaaagccgttgcgcttcttctgagccacaatgctgacatagtcctgaacaagcagcaggcctcctttttgcaccttgcacttcacaataagaggaaggaggttgttcttacgatcatcaggagcaaaagatgggatgaatgtcttaagattttcagtcataattctccaggcaataaatgtccaattacagaaatgatagaatacctccctgaatgcatgaaggtacttttagatttctgcatgttgcattccacagaagacaagtcctgccgagactattatatcgagtataatttcaaatatcttcaatgtccattagaattcaccaaaaaaacacctacacaggatgttatatatgaaccgcttacagccctcaacgcaatggtacaaaataaccgcatagagcttctcaatcatcctgtgtgtaaagaatatttactcatgaaatggttggcttatggatttagagctcatatgatgaatttaggatcttactgtcttggtctcatacctatgaccattctcgttgtcaatataaaaccaggaatggctttcaactcaactggcatcatcaatgaaactagtgatcattcagaaatactagataccacgaattcatatctaataaaaacttgtatgattttagtgtttttatcaagtatatttgggtattgcaaagaagcggggcaaattttccaacagaaaaggaattattttatggatataagcaatgttcttgaatggattatctacacgacgggcatcatttttgtgctgcccttgtttgttgaaataccagctcatctgcagtggcaatgtggagcaattgctgtttacttctattggatgaatttcttattgtatcttcaaagatttgaaaattgtggaatttttattgttatgttggaggtaattttgaaaactttgttgaggtctacagttgtatttatcttccttcttctggcttttggactcagcttttacatcctcctgaatttacaggatcccttcagctctccattgctttctataatccagaccttcagcatgatgctaggagatatcaattatcgagagtccttcctagaaccatatctgagaaatgaattggcacatccagttctgtcctttgcacaacttgtttccttcacaatatttgtcccaattgtcctcatgaatttacttattggtttggcagttggcgacattgctgaggtccagaaacatgcatcattgaagaggatagctatgcaggtggaacttcataccagcttagagaagaagctgccactttggtttctacgcaaagtggatcagaaatccaccatcgtgtatcccaacaaacccagatctggtgggatgttattccatatattctgttttttattttgcactggggaaataagacaagaaataccaaatgctgataaatctttagaaatggaaatattaaagcagaaataccggctgaaggatcttacttttctcctggaaaaacagcatgagctcattaaactgatcattcagaagatggagatcatctctgagacagaggatgatgatagccattgttcttttcaagacaggtttaagaaagagcagatggaacaaaggaatagcagatggaatactgtgttgagagcagtcaaggcaaaaacacaccatcttgagccttagctcctcagaccttcagtgaggcttctaatggggggtgcatgacttgctggttctaactttcaatttaaaaagagtgaggaagaagcagaatgattgattttactgcgtgtgaaatcatggttcctgcatgctatataaaagtaaaccatcttttatcctctattcatattttctaccaatcactatgtattggggatatctttgcagatatgttcaaattggactggactttgatgagatataatctcattatttgaatgggtagaaaatgaatttgctagaacacacatttttaatgaaaagaagtaataaatgtaactattaagctaaaatgcaaatgtcagtactgaattcctgcttgttaattacataatatgtgatgctctagaaaatagtcacaagtattaataatgccttagatgatagtcttaaatattaggttgaggtctacctaacctaagctgcttcctggaaagcttcatgttgaaagaacctatgggtggcaccatgtggacttttctgtccctactgtgatgaatagccccacccttcttgctgtccccaacacacctgatgtcactttgagccatatagttgaagtacaaattaataggccttatgatatgcacgaattttactatagataatatatgttgtttctggttttgtttgccaatgagcataataaatgtaaaacctatatagtatccctgtgattattgtatgagcctttgtttgagatttgaaaaaaacatggctccatcacatattcccttttttcttttgatgtctactcaaatcatgaattaatcacatacctcatcattaatcttttcaaggtccttctattgttttgtctgattttctccatcatcctgattagcatgtttattccctcactacccccaggagatattcactgtaatgaatatgtctttggctatgtatgtgtccttgtgttatgttgtacagtgttgttttgagtctgttattatttacacagatgttattatgctatagcttctatttctgtttttgcttcttatttctcttataattctcacttatttcctattttttctactcatttctatttgttactcctttttactggacatgatgtttacaagatacaactgtgttactgtattccatctagtacggggcctttggtgtggcttactatttcattgtgtgcacccacccacccaccacactggacttttctagagatggacagcttggttacctccaccttcctgcactcattctcaaacatactgatgttcatacaaaccagcagagtgctgagggacgatatgtactattacaaaaccagacacttttacattcatggtccaacagaacacatggcctagaggcaatgttgcatataccttaatctttgatatgaataatatctttgttctttatatttcttaaaacagaaagggtggaaaatcactatacagaagcaatatccaaagatctcctgatcataaagacaaggggtcttttcagtcttccctctcctcaaaccttgtgtagcattgcacaatatagatctcagtcaacattcactgagtgccaagaatgtgagaaacactgtaccatgcctgtcatgcgaaatatttaaataaacagattgtcttacag

SEQ ID NO: 5653 - DNA, 2076 bp, Homo sapiens
  SIMILAR (520)..(1410): 931254mologous to Homo sapiens ankyrin-like protein,accession number Y10601,Smith-Waterman Score=1453.
atggcccagtacttactaagcttgccactggcaagctgtgaggtaatcccaaagagcccaaagtcaccccacctgagagtggcacaggaacgggggctccccagttctccgcggagcaggaatccccggagtccggacctctctgactcctggagacgacctgcaagccttgagagttcgctcgacaagcgcgagggcagtgacttgaggttcgctcatactggggagttcggcgcgctgtggggagctggcacctgcaccagggacctgactgcgtcagcgctgctctgcttccccttccccagctcggccccggagcccctgttgttaaccctttacagactaccattggagataagggtctgtaacccgtggcacgttgctgccaaactggatgcatatctgatagcccagagaaaggcaaaaatctttgagtggcttattggacagacagaatgtattcaaaatctgtatgcagtggccttgctctgccttcttgtgcagaccgaggcggttacaggtgcccaagtagacataaaagataattttggacgtaattttctgcatttaactgtacagcaaccttatggattaaaaaatctgcgacctgaatttatgcagatgcaacagatcaaagagctggtaatggatgaagacaacgatgggtgtactcctctacattatgcatgtagacaggggggccctggttctgtaaataacctacttggctttaatgtgtccattcattccaaaagcaaagataagaaatcacctctgcattttgcagccagttatgggcgtatcaatacctgtcagaggctcctacaagacataagtgatacgaggcttctgaatgaaggtgaccttcatggaatgactcctctccatctggcagcaaagaatggacatgataaagtagttcagcttcttctgaaaaaaggtgcattgtttctcagtgaccacaatggctggacagctttgcatcatgcgtccatgggcgggtacactcagaccatgaaggtcattcttgatactaatttgaagtgcacagatcgcctggatgaagacgggaacactgcacttcactttgctgcaagggaaggccacgccaaagccgttgcgcttcttctgagccacaatgctgacatagtcctgaacaagcagcaggcctcctttttgcaccttgcacttcacaataagaggaaggaggttgttcttacgatcatcaggagcaaaagatgggatgaatgtcttaagattttcagtcataattctccaggcaataaatgtccaattacagaaatgatagaatacctccctgaatgcatgaagatcgagtataatttcaaatatcttcaatgtccattagaattcaccaaaaaaacacctacacaggatgttatatatgaaccgcttacagccctcaacgcaatggtacaaaataaccgcatagagcttctcaatcatcctgtgtgtaaagaatatttactcatgaaatggttggcttatggatttagagctcatatgatgaatttaggatcttactgtcttggtctcatacctatgaccattctcgttgtcaatataaaaccaggaatggctttcaactcaactggcatcatcaatgaaactagtgatcattcagaaatactagataccacgaaaaggaattattttatggatataagcaatgttcttgaatggattatctacacgacgggcatcatttttgtgctgcccttgtttgttgaaataccagctcatctgcagtggcaatgtggagcaattgctgtttacttctattggatgaatttcttattgtatcttcaaagacaccaagtggagatacggggctccagactggttctggggaatgtctgccaagagtcctgtgatgtgatccgtcttcacatcttccagttttggataccagcacctgatctggactatttggctcagagggatggttttagaatcagggatgaccagaaagaagcaattttggaacatggaggagtaagaagggtgtcaaatgaggtagtgaaggagaaacttgattatgctaccatcgtgtga

SEQ ID NO: 5654 - DNA, 1048 bp, Homo sapiens
  SIMILAR (893)..(1039): 591254mologous to Drosophila melanogaster brakeless- A,accession number AF242193,Smith-Waterman Score=140.
atgtccttgagcagtggagcctccggagggaaaggagtggatgcaaacccggttgagacatacgacagtggggatgaatgggacattggagtagggaatctcatcattgacctggacgccgatctggaaaaggaccagcagaaactggaaatgtcaggctcaaaggaggtggggataccggctcccaatgctgtggccacactaccagacaacatcaagtttgtgaccccagtgccaggtcctcaagggaaggaaggcaaatcaaaatccaaaaggagtaagagtggcaaagacactagcaaacccactccagggacttccctgttcactccaagtgagggggcagctagcaagaaagaggtgcaggggcgctcaggagatggtgccaatgctggaggcctggttgctgctattgctcccaagggctcagagaaggcggctaaggcatcccgcagtgtagccggttccaaaaaggagaaggagaacagctcatctaagagcaagaaggagagaagcgaaggagtggggacttgttcagaaaaggatcctggggtcctccagccagttcccttgggaggacggggtggtcagtatgatggaagtgcaggggtggatacaggagctgtggagccacttgggagtatagctattgagcctggggcagcgctcaatcctttgggaactaaaccggagccagaggaaggggagaatgagtgtcgcctgctaaagaaagtcaagtctgaaaagatggagtcccctgtttccacaccagcagtgctgccaatacaccttttggtgccagtggtcaacaatgacatctcatctccttgtgagcagatcatggttcgtacccgatcagttggggtcaacacatgtgatgtgggctctggccacagagcctgagtgcttgggcccctgtgaacctggaactagcgtcaaccttgaaggcatcgtgtggcaggaaacagaagatggacacaaggaagcagttcccaatatgccatctaaggtagctaccttcttggtgttcctcagtgacccatactga

SEQ ID NO: 5655 - DNA, 642 bp, Homo sapiens
  SIMILAR (502)..(630): 901254mologous to Rattus norvegicus Ost oncogene,accession number Z35654,Smith-Waterman Score=200.
gtaagttcttcctgaacagtgatattaagtcccaaatataagagaacagagatgctcagagctgcagaggccctcccttatgcagaatgggtcaccagaagcagcaggccctggggtctgggtcgaggcctagggaatccacactgagaccacacactgcctctgctcctaaactatgtggccacattggcacaaaaaaacatccagtcttgcacagtgagcgtgaatgctgtggggccagcgtctcttccaaaccacaaagccatgacccacgaggagccctgtggggctgagaccaaagaacaaggattcactgagagtctgcaatatcccaccagctgccagtttgacttttgcaaactagcctctaaaaagtgtacctttgctactgcccaaggtcccagtggtcctgggatgaaaggagtgaaggaagaaacacacaaatggctgaacacaaacagtaacgtaaacagcttcaaaaacagacatatttccacgaaaagggaaatgctgaaatacagcaggaactgcgagggggctgaggacctgcaggaggttttgagctccatcctgggcatcctgaaggccgtgaacgactccatgcacctcatcgctatcaccggctatgacgatactgtttaa

SEQ ID NO: 5656 - DNA, 385 bp, Homo sapiens
  SIMILAR (135)..(296): 601254mologous to Human endogenous retrovirus K pol protein,accession number Y17832,Smith-Waterman Score=194.
agagaatatggaacaccacaggagcaactgaatctggcattattaactttaaattttttgagcctgcccaaaggccagatgttatcagcagctgaacagcatctacagaaaccagctgcaaagacagaagcagaagaatgatttggcagagagatccaataacaaaaatttgggaaataggtaaaataataacttggggtagaggttatgcttgtgtttctccaggccaaaatcatcagtcagtttggataccatcaagacacctgaaatcttgtcatgggccagatgccaaggaagagattccgggaggatcctgaggacccccccggttgcagccatgtcaaggctggtgccgaggaggaccccaactgtcacgagcaacacc

SEQ ID NO: 5657 - DNA, 1337 bp, Homo sapiens
  SIMILAR (69)..(419): 501254mologous to Human endogenous retrovirus K pol protein,accession number Y17832,Smith-Waterman Score=308.
cccacgcgtccgattaaacacattactgatatcccatataattctgaaggacaagccatagtggaaagaatgaatctctccctgaaacagcagttgcaaaagcataaaaaaggggggaaaacaaggactacgggacaccccatatgcaactgaatctagcattgttaactttaaattttttgagcctgcctaaaggccagatcctatcagtagctgaacagcatctacagaaaccagctgcaaagacagaagcagaacaactagtttggtggagagatccaataacaaaaagttaggaaataggtaaaataataacttggggtaaaggttatgcttgtgtttctccaggactgactcaacagccgatttggataccatcaagacacctgaaaccttatcatgagccagatgctgaggaagaaattccgggaggatcccgaggaccccccccacccccggttgcagccatgtcgagactgacgctgaggaagaaccccactgtcacgagcaacacctgtcgaacacagccacccacctggggacagatcaagaagctgtcacagctggtggaagaaaacctgaggaaagcaagacaaccagtcacaataagtaattggattctccctagaataactaaatttaaaccaattgaaggtgctgagaatgtttttacagatgggtctagcaacggtaaagcttcttattctggctcaaaaggacctttgactgaagggaatcaaatggctgatcgccttgttgctaaagtaatatctaatgctagacactttcacaatttaacccatgttaatgcctctggtctcaaacgcagatacagcattacctggaaagaagctaaagctattatccagcgatgcccaacttgccaagtgatgctatcagcagctgaacagcatctacagaaatcagctgcaaagacagaagcagaaaaactggtttggtggagagacccaataacaaaaagtcgggaaataggtaaaataataacttggggtagaggttatgcttgtgtttctccaggaccaaatcaacagccgatttggataccatcaaaacacctgaaaccttatcataagccagatgctggggaaaagattccaggagaatcccgaggacccccggttgcagccatgtcaagactgacgctgaggaggatgccaactgtcatgagcaacacccatcgaacacagccacccacctggggacagatcaagaagctgtcacagatggcggaagaaaacctgaggaaagcgggacaaccagtcacaatgaataatttaatgatagcggtgatcaccactgccttcaacaagggctga

SEQ ID NO: 5658 - DNA, 793 bp, Homo sapiens
  SIMILAR (401)..(766): 631254mologous to Mus musculus Plenty of SH3s; POSH,accession number AF030131,Smith-Waterman Score=444.
gaaaaccttggccgaaagggttgtagacatggcggccatcaggatgggaaaactgacaaccatgcctgcaggtctgatatatgcatctgtaagtgtacatgcagccaaacaagaggaatccaaaaagcagctagtgaaaccagagcagctccccatatatactgcaccaccgctccagtctaaatatgttgaagagcagcctggtcatttacaaatgggctttgcttccatccgcactgcaactggttgttacattggctggtgcaagggtgtttatgtctttgtgaaaaatggggataatgggtacagtacaatttgggaaaagatgcttatgtcttatctgaaggatcctcctcgagattttcttccgaaaatgggagttattacggtttcaggattggtgcctcgagcaaaggccttatgcaactacagagggcagaatcccggtgacctaaggtttaataagggagatatcatccttctccggagacagcttgatgagaattggtaccagggggaaatcaatggcatcagcgggaacttcccagccagctccgtggaagtcatcaagcagctgccccagccgcccccgctctgcagggccctctacaacttcgacctacgaggcaaggacaagagtgagaaccaggattgcctgaccttcctcaaggacgatatcatcactgtgatcagccgagtggatgagaactgggcagaaggcaagttaggagataaagtaggcatcttccctatcttgtttgtagaggtacgtgagtatcaagtctacatctga

SEQ ID NO: 5659 - DNA, 2876 bp, Homo sapiens
  SIMILAR (659)..(546): 371254mologous to Cloning vector pZC320 SopA,accession number U26464,Smith-Waterman Score=44.
tcagggcgatggcccactacgtgaaccatcacccaaatcaagttttttggggtccaagtgccgtaaagcactaaatcggaaccctaaagggagcccccgattaagagcttgacggggaaagcccgccaactgcccgctttccagtcgggaaacctgtcgtgccagctgcattaatgaatcggccaacgcgcggggagaggcggtttgcgtattgggcgccagggtggtttttcttttcaccagtgagacgggcaacagctgattgcccttcaccgcctggccctgagagagttgcagcaagcggtccacgctggtttgccccagcaggcgaaaatcctgtttgatggtggttccgaaatcggcaaaatcctgcccgctttccagtcgggaaacctgtcgtgccagctgcattaatgaatcggccaacgcgcggggagaggcggtttgcgtattgggcgccagggtggtttttcttttcaccagtgagacgggcaacagctgattgcccttcaccgcctggccctgagagagttgcagcaagcggtccacgctggtttgccccagcaggcgaaaatcctgtttgatggtggttccgaaatcggcaaaatccattaattgcgttgcgctcactgcccgctttccagtcggaaaacctgtcgtgccagctgcattaatgaatcggccaacgcgcggagagaggcggtttgcgtattgggcgccagggtggtttttcttttcaccagtgagacgggcaacagctgattgcccttcaccgcctggccctgagagagttgcagcaagcggtccacgctggtttgccccagcaggcgaaaatcctgtttgatgggggttccgaaatcggcaaaatcccttataaatcaaaagagtagcccgagatagggttgaatgttgtaccagcgacgcgaacccgagtgtcgaaagcttgcgactcggtttgcccgagtgacaccccgcgacaccccccgagctagaatacctagttagttgacgcagacgagaaaatgcacgaggataaaaccacataatgggtgtacataaagaccacgcctgcccgctttccagtcgggaaacctgtcgtgccagctgcattaatgaatcggccaacgcgcggggagaggcggtttgcgtattgggcgccagggtggtttttcttttcaccagtgagacgggcaacagctgattgcccttcaccgcctggccctgagagagttgcagcaagcggtccacgctggtttgccccagcaggcgaaaatcctgtttgatggtggttccgaaatcggcaaaatccctactcccgcttccaaaagctggagagggtaatttccctccccaaactgcaaggaattgacccacgggcgacctagtgcctgtgggggatcttgtgattactgtctcgccaatgatcattaagtcagatatttcccgaattcctgcccgctttccagtcgggaaacctgtcgtgccagctgcattaatgaatcggccaacgcgcggggagaggcggtttgcgtattgggcgccagggtggtttttcttttcaccagtgagacgggcaacagctgattgcccttcaccggctggccctgagagagttgcagcaagcggtccacgctggtttgccccagcaggcgaaaatcctggttgatggggggtccgaaatcggcaaaattcaacattttttagaaccatgcttccccaggcctgccgaatttgctcctccatccacggggactgagagccattactattgctgtatttggtaagcaaaatacgtacatcaggctcgaaccctttaagatcaacgttcttgagcagatcacgaagcatatcgaaaaactgcagtgcggaggtgtagtcaagcaactcagcaggcgtgggaacaatcagcacatctgcagcacatacgacattaatcgtgccgatacccaagttaggcgcgctgtcaataactatgacatcatagtcatgagcaacagtttcaatggccagtcggagcatcaagtgtggatgggtgggcagtctacctttatcaaatttgcccattaactcagtttcaatgcggtgcagagccagacaggaaggaataatgtcaagccccggccagcaagagagctttattgcataagtgacatcgtcctttaccattaattgcgttgcgctcactgcccgctttccagtcgggaaacctgtcgtgccagctgcattaatgaatcggccaacgcgcggggagaggcggtttgcgtattgggcgccagggtggtttttcttttcaccagtgagacgggcaacagctgattgcccttcaccgcctggccctgagagagttgcagcaagcgggtcacgctggtttgccccagcaggcgaaaatcctgtttgatggtggttccgaaatcggcaaaatccgtggactccaacgtccaagggcgaaaaaccgtctttcagggcgagggcccctacgtgaaccatcacccaaataattttttggggtccaggggcgtaaaacactaaatcggaccctaaagggagccccccattaaaacttggcggcgaaagccggcaaaccactgtctccttgtacctctggtagaattcggatgtgaatccatctggtcctggactttttttggttggtaagctattaattattgcctcaatttcagagcctgttattggtctattcagagattcaacttcttcctggtttagtcttgggagggtgtatgtgtcgaggaatttatccatttcttctagattttctagtttatttgcatagaggtgtttatagtattctctgatggtagtttgtatttctgtgggatcagtggtgatatcccctttatcattttttattgggt

SEQ ID NO: 5660 - DNA, 1393 bp, Homo sapiens
  SIMILAR (742)..(1383): 971254mologous to Cloning vector pBACe3.6 levansucrase,accession number U80929,Smith-Waterman Score=1086.
  misc_feature (1)...(1393): n = a,t,c or g
atggacgatatcccgcaagaggccggcaggtaccggcataaccaagcctatgcttacagcatccagggtgacggtgccgaggatgacgatgagcgcattgttagatttcatacacgggtcaccgtcgacagcgacacacttgcatcggatgcagcccggttaacgtgccggcacggcctgggtaaccagggttccgatttagtgctatacggcacctcgaccccaaaaaacttgatttgggtgagggttcacgtagtgggccatcgccctgatagacggtttttcgcctttgacgtttggagtccacgttctttaatagtggactcttgttccaaactggaacaacactcaaccctatctcgggctattcttttgatttataagggattttgccgatttcggaaccaccatcaaacaggattttcgcctgctggggcaaaccagcgtggaccgcttgctgcaactctctcagggccaggcggtgaagggcaatcagctgttgcccgtctcactggtgaaaagaaaaaccaccctggcgcccaatacgcaaaccgcctctccccgcgcgttggccgattcattaatgcagctggcacgacaggtttcccgactggaaagcgggcagtgagcgcaacgcaattaatggattttgccgatttcggaaccaccatcaaacaggattttcgcctgctggggcaaaccagcgtggaccgcttgctgcaactctctcagggccaggcgaacgttcagcagtttatcgatgaaggcaattatacatccggcgacaaccatacgctgagagaccctcactacgttgaagacaaaggccataaataccttgtattcgaagccaacacgggaacagaaaacggataccaaggcgaagaatctttatttaacaaagcgtactacggcggcggcacgaacttcttccgtaaagaaagccagaagcttcagcagagcgctaaaaaacgcgatgctgagttagcgaacggcgccctcggtatcatagagttaaataatgattacacattgaaaaaagtaatgaagccgctgatcacttcaaacacggtaactgatgaaatcgagcgcgcgaatgttttcaaaatgaacggcaaatggtacttgttcactgattcacgcggttcaaaaatgacgatcgatggtattaactcaaacgatatttacatgcttggttatgtatcaaactctttaaccggcccttacaagccgctgaacaaaacagggcttgtgctgcaaatgggtcttgatccaaacgatgtgacattcacttactctcacttcgcagtgccgcaagccaaaggcaacaatgtggttatcacaagctacatgacaaggggatcctctagagtcgacaaagcagggctgcnaa

SEQ ID NO: 5661 - DNA, 1169 bp, Homo sapiens
  SIMILAR (654)..(713): 501254mologous to Cloning vector pZC320 SopA,accession number U26464,Smith-Waterman Score=40.
atgctccgactggccattgaaactgttgctcatgactatgatgtcatagttattgacagcgcgcctaacctgggtatcggcacgattaatgtcgtatgtgctgctgatgtgctgattgttcccacgcctgctgagttgtttgactacacctccgcactgcagtttttcgatatgcttcgtgatctgctcaagaacgttgatcttaaagggttcgagcctgatgtacgtattttgcttaccaaatacagcaatagtaatggctctcagtccccgtggatggaggagcaaattcgggatgcctggggaagcatggttctaaaaaatgttgtacgtgaaacggatgaagttggtaaaggtcagatccggatgagaactgtttttgaacaggccattgatcaacgctcttcaactgatacttcgttatcgacaccagctgccccgatggtggattcgttaattgcgcgcgtaggagtaatggctcgcggtaatgccattactttgcctgtatgtggtcgggatgtgaagtttactcttgaagtgctccggggtgatagtgttgagaagacctctcgggtatggtcagtggactcttgttccaaactggaacaacactcaaccctatctcgggctattcttttgatttataagggattttgccgatttcggaaccaccatcaaacaggattttcgcctgctggggcaaaccagcgtggaccgcttgctgcaactctctcagggccaggcggtgaagggcaatcagctgttgcccgtctcactggtgaaaagaaaaaccaccctggcgcccaatacgcaaaccgcctctccccgcgcgttggccgattcattaatgcagctggcacgacaggtttcccgactggaaagcgggcagtgagcgcaacgcaattaatggattttgccgattccggaaccaccatcaaacaggattttcgcctgctggggcaaacccagcgtggaccgcttgctgcaactctctcagggccaggcggtgaagggcaatcagctgttgcccgtctcactggtgaaaagaaaaaccaccctggcgcccaatacgcaaaccgcctctccccgcgcgttggccgattcattaatgcagctggcacgacaggtttcccgactggaaagcgggcagtgagcgcaacgcaattaat

SEQ ID NO: 5662 - DNA, 3947 bp, Homo sapiens
  SIMILAR (1442)..(1149): 971254mologous to Cloning vector pZC320 SopA,accession number U26464,Smith-Waterman Score=486.
gattttcgcttgctggggcaaaccagcgtggaccgcttgctgcaactctctcagggccagccggtgaagggcaatcagctgttgcccgtctcactggtgaaaagaaaaaccaccctggcgcccaatacgcaaaccgcctctccccgcgcgttggccgattcattaatgcagctggcacgacaggtttcccgactggaaagcgggcatgggccatcgccctgatagacggtttttcgccctttgacgttggagtccacgttctttctatagtggactcttgttccaaactggaacaacactcaaccctatctcgggctattcttttgatttataagggattttgccgatttcggaaccaccatcaaacaggattttcgcctgctggggcaaaccagcgtggaccgcttgctgcaactctctcagggccaggcggtgaagggcaatcagctgttgcccgtctcactggtgaaaagaaaaaccaccctggcgcccaatacgcaaaccgcctctccccgcgcgttggccgattcattaatgcagctggcacgacaggtttcccgactggaaagcggccagtgagcgcaacgcaattaatggattttgccgatttcggaaccaccatcaaacaggattttcgcctgctggggcaaaccagcgtggaccgcttgctgcaactctctcagggccaggcggtgaagggcaatcagctgttgcccgtctcactggtgaaaagaaaaaccaccctggcgcccaatacgcaaaccgcctctccccgcgcgttggccgattcattaatgcagctggcacgacaggtttcccgactgcaaagcgggcaggattttgccgatttcggaaccaccatcaaacaggattttcgcctgctggggcaaaccagcgtggaccgcttgctgcaactctctcagggccaggcggtgaagggcaatcagctgttgcccgtctcactggtgaaaagaaaaaccaccctggcgcccaatacgcaaaccgcctctccccgcgcgttggccgattcattaatgcagctggcacgacaggtttcccgactggacagcgggcacaatacaaatggtttctccatggttttgaagccgggggagttcaagatcaaggcaccagccgaatttatgcttgggggactgagagccattactattgctgtatttggtaagcaaaatacgtacatcaggctcgaaccctttaagatcaacgttcttgagcagatcacgaagcatatcgaaaaactgcagtgcggaggtgtagtcaaacaactcagcaggcgtgggaacaatcagcacatcagcagcacatacgacattaatcgtgccgatacccaggttaggcgcgctgtcaataactatgacatcatagtcatgagcaacagtttcaatggccagtcggagcatcaggtgtggatcgatagaaaggcaggagagtgtcttctgcatgaatatgaagatctggtacccatccgtgatacattgaggctgttccctgggggtcgttaccttccacgagcaaaacacgtagccccttcagagccagatcctgagcaagatgaacagaaactgaggttttgtaaacgccacctttatgggcagcaaccccgatcaccggtggaaatacgtcttcagcacgtcgcaatcgcgtaccaaacagggggatcctctagaggattttgccgatttcggacccaccatcaaacaggattttcgcctgctggggcaaaccagcgtggaccgcttgctgcaactctctcagggccaggcggtgaagggcaatcagctgttgcccgtctcactggtgaaaagaaaaaccaccctggcgcccaatacgcaaaccgcctctccccgcgcgttggccgattcattaatgcagctggcacgacaggtttcccgactggaaagcgggcagtgagcgcaacgcaattaatggattttgccgatttcggaaccaccatcaaacaggattttcgcctgctggggcaaaccagcgtggaccgcttgctgcaactctctcagggccaggcggtgaagggcaatcagctgttgcccgtctcactggtgaaaagaaaaaccaccctggcgcccaatacgcaaaccgcctctccccgcgcgttggccgattcattaatgcagctggcacgacaggtttcccgactggaaagcgggcaacggtttttcgcccttgacgttgggagtccacgttctttaatagtggattcttgttccaaactggaacaacactcaaccctatctggggctattcttttgatttataagggattttgccgatttcggaaccaccatcaaacaggattttcgcctgctggggcaaaccagcgtggaccgcttgctgcaactctctcagggccaggcggtgaagggcaatcagctgttgcccgtctcactggtgaaaagaaaaaccaccctggcgcccaatacgcaaaccgcctctccccgcgcgttggccgattcattaatgcagctggcacgacaggtttcccgactggaaagcgggcagtgagcgcaacgcaattaatggattttgccgatttcggaaccaccatcaaacaggattttcgcctgctggggcaaaccagcgtggaccgcttgctgcaactctctcagggccaggcggatttgtcgcctgctgcggccaaacccagcgtggcccggcttttgccaactctctcaggggccagccgggattttgccgatttcggaaccaccatcaaacaggattttcgcctgctggggcaaaccagcgtggaccgcttgctgcaactctctcagggccaggcggtgaagggcaatcagctgttgcccgtctcactggtgaaaagaaaaaccaccctggcgcccaatacgcaaaccgcctctccccgcgcgttggccgattcattaatgcagctggcacgacaggtttcccgactggaaagcgggcaggattttgccgatttcggaaccaccatcaaacaggattttcgcctgctggggcaaaccagcgtggaccgcttgctgcaactctctcagggccaggcggtgaagggcaatcagctgttgcccgtctcactggtgaaaagaaaaaccaccctggcgcccaatacgcaaaccgcctctccccgcgcgttggccgattcattaatgcagctggcacgacaggtttcccgactggaaagcgggcaggattttgccgatttcggaaccaccatcaaacaggattttcgcctgctggggcaaaccagcgtggaccgcttgctgcaactctctcagggccaggcggtgaagggcaatcagctgttgcccgtctcactggtgaaaagaaaaaccaccctggcgcccaatacgcaaaccgcctctccccgcgcgttggccgattcattaatgcagctggcacgacaggtttcccgactggaaagcgggcatgcttctgtttacagctgtgcaggatgttcactgcacgaaggtatcttcaagaggattttcgccctgctggggcaaaccagcgtggaccgcacgctgcaactctctcagggccaggcggtgaagggcaatcagctgttgaccgtctcactggtgaaaagaaaaaccaccctggcgcccaatacgcaaaccgcctctcgccgcgcgttggccgattcattaatgcagctggcacgacaggtttcccgactggaaagcgggcaggattttgccgatttcggaaccaccatcaaacaggattttcgcctgctggggcaaaccagcgtggaccgcttgctgcaactctctcagggccaggcggtgaagggcaatcagctgttgcccgtctcactggtgaaaagaaaaaccaccctggcgcccaatacgcaaaccgcctctccccgcgcgttggccgattcattaatgcagctggcacgacaggtttcccgactggaaagcgggcagtga

SEQ ID NO: 5663 - DNA, 885 bp, Homo sapiens
  SIMILAR (349)..(696): 761254mologous to Leishmania major probable levansucrase precursor,accession number AL160371,Smith-Waterman Score=463.
atgatggatgaggggtccaccatcgcattgtctagatgcagtgatctgtgggccatcgccctgatagacggtttttcgccctttgacgttggagtccacgttcttttaatagtggactcttgttccaaactggaacaacactcaaccctatctcgggctattcttttgatttataagggattttgccgatttcggaaccaccatcaaacaggattttcgcctgctggggcaaaccagcgtggaccgcttgctgcaactctctcagggccaggcggtgaagggcaatcagctgttgcccgtctcactggtgaaaagaaaaaccaccctggcgcccaatacgcaaaccgcctctccccgcgcgttggccgattcattaatgcagctggcacgacaggtttcccgactggaaagcgggcagaggagcgactcaagccttcgcgaaaagaaaataaccaaaaagcatacaaagaaacgtacggcgtctctcatattacacgccatgatatgctgcagatccctaaacagcagcaaaacgaaaaataccaagtgcctcaattcgatcaatcaacgattaaaaatattgagtctgcaaaaggacttgatgtgtgggacagctggccgctgcaaaacgctgacggaacagtagctgaatacaacggctatcacgttgtgtttgctcttgcgggaagcccgaaaggggataaggcagaatgtaccactagcaaccctgccacattcatagccttcaaaggtcttccaaaagtttctctcctgtgtaaaccccctgatacctactggcgtactgtttctgaacaaggacttttccatgatcattatatttctaccaactataagctcactgaagatgtgatctatggtcactga

SEQ ID NO: 5664 - DNA, 1563 bp, Homo sapiens
  SIMILAR (493)..(714): 1001254mologous to Cloning vector pTM30 repressor LacI- q,accession number AF023620,Smith-Waterman Score=354.
atgagggacatcttttgggtaccggatatctgtaaagtaatgttatatttggttttctttcggtcgatgggtacaccattgagagctgtggccatggggcttgttattacaagttggaaaatagctcagaaaccaagggattttgccgatttcggaaccaccatcaaccaggattttcgcctgctggggcaaaccagcgtggaccgcttgctgcaactctctcagggccaggcggtgaagggcaatcagctgttgcccgtctcactgaaaacggataccaaggcgaagaatctttatttaaccaaagcgtactacggcggcggcacgaacttcttccgtaaagaaagccagaagcttcagcagagcgctaaaaaacgcgatgctgagttagcgaacggcgccctcggtatcatagagttaaataatgattacacattgaaaaaagtaatgaagccgctgatcacttcaaacacgggatttgccgatttcggaaccaccatcaaacaggattttcgcctgctggggcaaaccagcgtggaccgcttgctgcaactctctcagggccaggcggtgaagggcaatcagctgttgcccgtctcactggtgaaaagaaaaaccaccttggcgcccaatacgcaaaccgcctctccccgcgcgttggccgattcattaatgcagctggcacgacaggtttcccgactggaaagcgggcaggttcccgatttagtgcttttagggcaccctcgacccccaaaaaacttgatttgggtgatggttcacgtagtgggccatcgccccgatagacggtttttcgcctttgacggttggagtccacgttctttaatagtggactcttgttccaaactggaccaacactcaaccctatctcgggctattcttttgatttataagggattttgccgatttcggaaccaccatcaaacaggattttcgcctgctggggcaaaccagcgtggaccgcttgctgcaactctctcagggccaggcggtgaagggcaatcagctgttgcccgtctcactggtgaaaagaaaaaccaccctggcgcccaatacgcaaaccgcctctccccgcgcgttggccgattcattaatgcagctggcacgacaggtattcccgactggaaagcgggcagtgagcgcaacgcaattaatggggccatcgcccttatagagggttttcggcctttgacgttggagcccagttctttaatagtgaactcttgttccaaactggaacaacactcaaccctatctcgggctattcttttgatttataagggattttgccgatttcggaaccaccatcaaacaggattttcgcctgctgggccaaaccagcgtggaccgcttgctgcaactctctcagggccaggcggtgaagggcaatcagctgttgcccgtctcactggtgaaaagaaaaaccaccctggcgcccaatacgcaaaccgcctctccccgcgcgttggccgattcattaatgcagctggcacgacaggtttcccgactggaaagcgggcagtgagcgcaacgcaattaatgtga

SEQ ID NO: 5665 - DNA, 1458 bp, Homo sapiens
  SIMILAR (1)..(459): 1001254mologous to unidentified cloning vector chloramphenicol acetyltransferase,accession number Y09893,Smith- Waterman Score=856.
atgaatgctcatccgaagttccgtatggcaatgaaagacggtgagctggtgatatgggatagtgttcacccttgttacaccgttttccatgagcaaactgaaacgttttcatcgctctggagtgaataccacgacgatttccggcagtttctacacatatattcgcaagatgtggcgtgttacggtgaaaacctggcctatttccctaaagggtttattgagaatatgtttttcgtctcagccaatccctgggtgagtttcaccagttttgatttaaacgtggccaatatggacaacttcttcgcccccgttttcaccatgggcaaatattatacgcaaggcgacaaggtgctgatgccgctggcgattcaggttcatcatgccgtttgtgatggcttccatgtcggcagaatgcttaatgaattacaacagtactgcgatgagtggcagggcggggcggattttgccgatttcggaaccaccatcaaacaggattttcgcctgctggggcaaaccagcgtggaccgcttgctgcaactctctcagggccaggcggtgaagggcaatcagctgttgcccgtctcactggtgaaaagaaaaaccaccctggcgcccaatacgcaaaccgcctctccccgcgcgttggccgattcattaatgcagctggcacgacaggtttcccgactggaaagcgggcaaccaaaagtgtttgagtatgcttctttatttcagactgaaggtgggaagagtgcagtactcacagctctcatagtcggtcttggtggaagagcagttgctactaatagaggatcctctttaaaaggttttgtgaaagatggacagaaacgttttttcgcctttgaccgttggagtccacgttctttaatagtggactcttgttccaaactggaacaacactcaaccctatctcgggctattcttttgatttataagggattttgccgatttcggaaccaccatcaaacaggattttcgcctgctggggcaaaccagcgtggaccgcttgctgcaactctctcagggccaggcggtgaagggcaatcagctgttgcccgtctcactggtgaaaagaaaaaccaccctggcgcccaatacgcaaaccgcctctccccgcgcgttggccgattcattaatgcagctggcacgacaggtttcccgactggaaagcggccagtgagcgcaacgcaattaatggattttgccgatttcggaaccaccatcaaacaggattttcgcctgctggggcaaaccagcgtggaccgcttgctgcaactctctcagggtcaggcggtgaagggcaatcagctgttgcccgtctcactggtgaaaagaaaaaccaccctggcgcccaatacgcaaaccgcctctccccgcgcgttggccgattcattaatgcagctggcacgacaggtttcccgactggaaagcgggcagtga

SEQ ID NO: 5666 - DNA, 3573 bp, Homo sapiens
  SIMILAR (2492)..(2542): 881254mologous to Bacillus amyloliquefaciens precursor (AA - 29 to 443),accession number X52988,Smith-Waterman Score=80.
atgcctcctgatggggagatacctcccagcagggatcaacagacacctcatacaggagagctccagctgacatctggcaggtgctcctctgggatgaagcttccagaggaaggaacaggcagcaatgtttgctgttctgcagcccctgctgttgatacccaggtcgaatcaaggtccaagtacggcatcacatctggaattaagatccttgttccagtgacgtgtcaaaccttacgtcccaaccgaagagaaaaagatccttttcagcttgccaaggcactggaaaagctccagcatcttatggcagcccttaaatcaccaaaagaagaattaacacatataatgtgggtagagttaacaaacaacaggcgcgatacaatctgccatccaaaggctacaagaaaggtggtgcgtgaacggttcacaaggcccttgaacccttccagagtcgtcaattccaccccccggagcgaagtacccgcgggacagccccgaggcgcacgtaaacctttgtttgtccaaacggttcggcttctacggagccagcggctagcgcgggacactccaccctggcggtcgctgggattacaggccgccgccctgcatcgcagacggagccggcacagggaggaccagctacatctgtgggccgcggcggcggccaagcccggtaacatcctgactggacatcagcgaacaccgatggcttcgccgccacaagctgcctgggtgacccggaaacggcaacgtcatttagcgacgcctgccgtggagggtttactagcattgggcatcagtaagtctgttcaaacaccagatccttctcatccaaattcctctctctctgacgttccagaacaatttttcccaactgccatcctcattggctttccagcaggtcatggcatcagcaggtcagcagctgccgcagtcccaagtaagcggctttcccgttcaagctttaatcgggggctccctttagggttccgatttagtgctttacggcacctggaccccaaaaaacttgatttgggtaatggttcactggactcttgttccaaactgaaacaacactcaaccctatctcgggctattcttttgatttataagggattttgccgatttcggaaccaccatcaaacaggattttcgcctgctggggcaaaccagcgtggaccgcttgctgcaactctctcagggccaggcggtgaagggcaatcagctgttgcccgtctcactggtgaaaagaaaaaccaccctggcgcccaatacgcaaaccgcctctccccgcgcgttggccgattcattaatgcagctggcacgacaggtttcccgactggaaagcgggcagtgagcgcaacgcaattaatggattttgccgatttcggaaccaccatcaaacaggattttcgcctgctggggcaaaccagcgtggaccgcttgttgcaactctctcagggccaggcggtgaagggcaatcagctgttgcccgtctcattggtgaaaagaaaaaccaccctggcgcccaatacgcaaaccgcctctccccgcgcgttggccgattcattaatgcagctggcacgacaggtttcccgactggaaagcgggcacaattactcaaaaggtcaatccaaggtgtcatttaagacaaggcaagtcccttctgcctatgaacctgtaaaatcaaaagcaggggggtgctttagagtcgcacccaacagggctttcaagtcccgaagggattttgccgatttcggaaccaccatcaaacaggattttcgcctgctggggcaaaccagcgtggaccgcttgctgcaactctctcagggccaggcggtgaagggcaatcagctgttgcccgtctcactggtgaaaagaaaaaccaccctggcgcccaatacgcaaaccgcctctccccgcgcgttggccgattcattaatgcagctggcacgacaggtttcccgactggaaagcgggcaggattttgccgatttcggaaccaccatcaaacaggattttcgcctgctggggcaaaccagcgtggaccgcttgctgcaactctctcagggccaggcggtgaagggcaatcagctgttgcccgtctcactggtgaaaagaaaaaccaccctggcgcccaatacgcaaaccgcctctccccgcgcgttggccgattcattaatgcagctggcacgacaggtttcccgactggaaagcgggcagattgttcggtccgccacgggtcaactgattcataattggactcagcgaacccaaggcttctccccccaacctgctggtaacccgaaacggcaagtctttagcgacgcctccctggaggtagcgaaagtacgttacccgttgagcacaataggaggccctccttcccggggaccaggactcccaaagtgggaagggcgtggctgcaagggaagtttggtttctcccgtcttcttttgcacctgtacttttgcgcttggttggaaatcatcacgtcggcgacaactcaatcgacagctggaaaaacgcgggccgttctttaaagacagcgataagttcgacgccaacgatccgatcctgaaagatcagacgcaagaatggtccggttctgcaacctttacatctgacggaaaaatccgtttattctacactgactattccggtaaacattacggcaaacaaagcctgacaacagcgcaggtaaatgtgtcaaaatctgatgacacactcaaaatcaacggagtggaagatcacaaaacgatttttgacggagacggaaaaacatatcagaacgttcagcagtttatcgatgaaggcaattatacatccggcgacaaccatacgctgagagaccctcactacgttgaagacaaaggccataaataccttgtattcgaagccaacacgggaacagaaaacggataccaaggcgaagaatctttatttaacaaagcgtactacggcggcggcacgaacttcttccgtaaagaaagccagaagcttcagcagagcgctaaaaaacgcgatgctgagttagcgaacggcgccctcggtatcatagagttaaataatgattacacattgaaaaaagtaatgaagccgctgatcacttcaaacacggtaactgatgaaatcgagcgcgcgaatgttttcaaaatgaacggcaaatgggattttgccgatttcggaaccaccatcaaacaggattttcgcctgctggggcaaaccagcgtggaccgcttgctgcaactctctcagggccaggcggtgaagggcaatcagctgttgcccgtctcactggtgaaaagaaaaaccaccctggcgcccaatacgcaaaccgcctctccccgcgcgttggccgattcattaatgcagctggcacgacaggtttcccgactggaaagcgggcaggattttgccgatttcggaaccaccatcaaacaggattttcgcctgctggggcaaaccagcgtggaccgcttgctgcaactctctcagggccaggcgaatcacctaatgacacagttctcagaacctgtcctcatcattgagcaacgcacgactgatgaagagtag

SEQ ID NO: 5667 - DNA, 1008 bp, Homo sapiens
  SIMILAR (565)..(711): 651254mologous to Cloning vector pCMVLacI lac repressor,accession number U64448,Smith-Waterman Score=152.
atgcgctcgctccttcgcattgtgccctatctaactcgcgacgttcgcggctgtcccgtcagcctctataacggagaatccttaggcttccgatttatgctttacggcacctcgaccctaaaaaacttgatctgggtgatggttcacacggtatatcgccctatgacgttggagtccacgttctttaatagtggactcttgttccaaactggaacaacactcacccctatctcgggctattcttctgagtttataagggattttgccgatttcggaaccaccatcaaacaggattttcgcctgctggggcaaaccagcgtggaccgcttgctgcaactctctcagggccaggcggtgatgcatgttagtcgtagcatcgtgagtgatgtgtatgcggagtcacagatgagatgtgtgtcgagagtggacgttgagtcgcgagttgatcagacggagatgtcacccacgacatcatccgactggactattgttatgaactgtaacaacactcatccatatcgcggcctactctcacgattaatacgggatcttggcgatttcggaaccaccatgaaacaggattttcgcctggtggggcaaactgaggtggaatgctttgtggcactctctcagggccagacggtgaagggcaatcagctgttgcacgtctcactggtgaaaagaaacatccccgtggcgatcaatagcaaaaagcgcctctgctcgcgcgatggccaatccattaatgcagctggcacaacagatttcccgactggcaagcgggcaatcgatacgcatcgcagcgtgtcacatgcacacatcatcatcactatccactcatctacactatcctcggacatcagccacacagatgcaccgaacacatccagcaacaactacgtcatcgctatcacatcaccatctgatacagctcctacatctcgtacaccactacatcgcatccaccacactacaccaatacccatcgccacactcgcacggccttaa

SEQ ID NO: 5668 - DNA, 1566 bp, Homo sapiens
  SIMILAR (579)..(635): 541254mologous to unidentified cloning vector 29kD protein essential for the replication of mini F plasmid,accession number AB015619,Smith-Waterman Score=40.
  misc_feature (1)...(1566): n = a,t,c or g
atgacccccacgttcgagtctagaggataccccccgcgaatcgtccagtcaaacgacctcactgaggcggcatatagtctctcccgggatcaaaaacgtatgctgtatctgttcgttgaccagatcagaaaatctgatggcaccctacaggaacatgacggtatctgcgagatccatgttgctaaatatgctgaaatattcggattgacctctgcggaagccaaggatgccggcgatgaaaaaggctatgaatcttttccttggtttatcaaacgtgcgcacagtccatccagagggctttacagtgtacatatcaacccatatctcattcccttctttatcgggttacagaaccggtttacgcagtttcggcttagtgaaacaaaagaaatcaccaatccgtatgccatgcgtttatacgaatccctgtgtcagtatcgtaagccggatggctcaggcatcgtctctctgaaaatcgactggatcatagagcgttaccagctgcctcaaagttaccagcgtatgcctgacttccgccgccgcttcctgcaggtctgtgttaatgagatcaacagcagaactccaatgcgcctctcatacattgagaaaaagaaagccgccagacgactcatatcgcagctgcagcatgacaccattttgagagcccaacttccaccaagctacatcctgtcccagtgccccacagctcctgcatctccacctccctggagtcccagtgacatttccccacatccaccagaagggctacagagagagttgcagcaagcggtccacgctggtttgccccagcaggcgaaaatcctgtgtgatggtggttccgaaatcggcaaaatcccttataaatcaaaagaatatcccgagatagggttgagtgttgttccagtttggaacacgagtccactattaaagaacgtggactccaacgtcaaagggcgagaaaccgtctatcagggcgatggcccactacgtgaaccatcacccaaatcaagttttttgggggtcgagtgtgacaatctaaaaacttgtcacacttcacatggatctgtcatggcggaaacagcggttatcaatcacaagaaacgtaaaaatagcccgcgaatcgtccagtcaaacgacctcactgaagccgcatatagtctctcccgggatcaaaaacgtatggcacagtcacaagggtgggtgaaaagatacatcaaggccttttgtaaaggcttctttgtggcggtgcctggtgcaatgactttcttggatcgggggacagggtggcagacgctcactttggtctanaggataccctccatattgggtaacgattatcgcccaacaagtgcttatgaacgtggtcagcgttatgcaagccgattgcagaatgaatttgctggaaatatttctgcgctggctgatgcggaaaatatttcacgtaagattattacccgctgtatcaacaccgccaaattgcctaaatcagttgttgctcttttttctcaccccggtgaactatctgcccggtcaggtgatgcacttcaaaaagccttctacagataa

SEQ ID NO: 5669 - DNA, 2314 bp, Homo sapiens
  SIMILAR (1130)..(1924): 781254mologous to Cloning vector pBACe3.6 levansucrase,accession number U80929,Smith-Waterman Score=1016.
  misc_feature (1)...(2314): n = a,t,c or g
gtcttcagcatcactccgacccagggctatggaatccagcaacttcggacggtttttcgcccttggacgttggagtccacgttctttaatagtggactcttgttccaaactggaacaacactcaaccctatctcgggctattcttttgatttataagggattttgccgatttcggaaccaccatcaaacaggattttcgcctgctggggcaaaccagcgtggaccgcttgctgcaactctctcagggccaggcggtgaagggcaatcagctgttgcccgtctcactggtgaaaagaaaaaccaccctggcgcccaatacgcaaaccgcctctccccgcgcgttggccgattcattaatgcagctggcacgacaggtttcccgactggaaagcgggcagtgagcgcaacgcaattaatccacagagaggcagcacagtgccatggacaactcaggggatctttagagcgcacaacgggctgcaagcttacgcttcatttaactctctctccagtcaacggtttttcgccctttgacgttggagtccacgttcttttaatagtggactcttgttccaaactggaacaacactcaaccctatctcgggctattcttttgatttataagggattttgccgatttcggaaccaccatcaaacaggattttcgcctgctggggcaaaccagcgtggaccgcttgctgcaactctctcagggccaggcggtgaagggcaatcagctgttgcccgtctcactggtgaaaagaaaaaccaccctggcgcccaatacgcaaaccgcctctccccgcgcgttggccgattcattaatgcagctggcacgacaggtttcccgactggaaagcgggcagtgagcgcaacgcaattaatggattttgccgatttcggaaccaccatcaaacaggattttcgcctgctggggcaaaccagcgtggaccgcttgctgcaactctctcagggccaggcggtgaagggcaatcagctgttgcccgtctcactggtgaaaagaaaaaccaccctggcgcccaatacgcaaaccgcctctccccgcgcgttggccgattcattaatgcagctggcacgacaggtttcccgactggaaagcgggcagggaggtgaagattccccaaaccgattttttgacggcggacgaaaaaaacaaatcagaacggtccgccagtttatcgatgaaggcaataatacaccggcggacacccaaacgctgagagaccctcactacgttgaagacaaaggccataaataccttgtattcgaagccaacacgggaacagaaaacggataccaaggcgaagaatctttatttaacaaagcgtactacggcggcggcacgaacttcttcngtaaagaaagccagaagcttcagcagagcgctaaaaaacgcgatgctgagttagcgaacggcgccctcggtatcatagagttaaataatgattacacattgaaaaaagtaatgaagccgctgatcacttcaaacacggtaactgatgaaatcgagcgcgcgaatgttttcaaaatgaacggcaaatggtacttgttcactgattcacgcggttcaaaaatgacgatcgatggtattaactcaaacgatatttacatgcttggttatgtatcaaactctttaaccggcccttacaagccgctgaacaaaacagggcttgtgctgcaaatgggtcttgatccaaacgatgtgacattcacttactctcacttcgcagtgccgcaagccaaaggcaacaatgtgaatgcagggagcgactggggtgaatggatgtgcgctgaagatgcaaatacgccggattttccggatttcggaaccaccatcacacaggattttcgcctgctggggcaaaccagcgtggaccgcttgctgcaactctctcagggccaggcggtgaagggcaatcagctgttgcccgtctcactggtgaaaagaaaaaccaccctggcgcccaatacgcaaaccgcctctccccgcgcgttggccgattcattaatgcagctggcacgacaggtttcccgactggaaagcgggcaggattttgccgatttcggaaccaccatcaaacaggattttcgcctgctggggcaaaccagcgtggaccgcttgctgcaactctctcagggccaggcggtgaagggcaatcagctgttgcccgtctcactggtgaaaagaaaaaccaccctggcgcccaatacgcaaaccgcctctccccgcgcgttggccgattcattaatgcagctggcacgacaggtttcccgactggaaagcgggcagtga

SEQ ID NO: 5670 - DNA, 2016 bp, Homo sapiens
  SIMILAR (450)..(295): 1001254mologous to Homo sapiens putative helicase RUVBL,accession number AF218313,Smith-Waterman Score=274.
ctattcttttgatttataagggattttgccgatttcggaaccaccatcaaacaggattttcgccgtaaactccacaagggcaaatacccacttcttgcttatctttgtaccttctttagatcctagtaatttaacagcgagctcagctgccagggtttgtggctggcgccagtcgtattgtggacatgggcttatgctgagcacagaccaggtgctcctctgggaggagtgagactcacgggaacaccatcctccgctttctcgtgaggagggtgccccctccttgaacttacatatgtcctcgctggcaaacctgacaagcctccgtgccacgtagagtgggtcctctcctccctcgagcatgcgagccagccagtagagggaggcgttctggtctgagccccgcatggacttgtgcagggcggagatgcagttgtaatgctcctcaccaagatggtgattgactagtgggtagatccacaggccgggtgtggtcgccatgatcgcgtagtcgataggggctcccagtagcgcagcgagcaggactggagcatccagggtgacggtgcgaaggatgacgatgagcgcattgttagatttcatacacggtgcctgaggccttgtctgcccgaagtaatcctgcagcgtgtcagcacgcatcgtgtcggccagcggcttgccctgtagcatctgtcggatctcctcggcagccagcgcccgggggtgcgggcggccaccgccactggccccgaaggcggtggcggcttcggcagcgtccgcgtcccagtgccccgggtcgtcctcgccgtccgcgtccgcgtccccgtcgccatcgccgtcgcccacggcctcatcctcatcatgcgcctccgcctcgtcccagctgcgcggagacgcgctccccgccgcggcggcggccgccggcctcttccccgaccccttcctcccggggctgctggagcgggccaccgggaagtcggggataaggcgggcgccgctgggtgtgggcggcgcgtcgtagctctcgcggctctcggtctcgccgccgtcgtcgccctcctcaccctcgccctcgctgctctcggctgccgtcggggtggctggctgcttcagcgccgagctctccgacagccgccgcctcttggcgccgggcggcgagggccccttggcccgctccccggcgcggtgcgacccggccgcgggctccgcgtgccccgccgggtggagcagcagacagcggtccaggtgcgagttgatgtgcgcggcgggcatctcctgctggcacacggggcactgcacctggtgcagcttgtccttcatgcctctggtcttgatgattttggctgccagcttcagacctgtggccgtctcctcacacttgtgaacctggccgaaacgccctctgccaaaaagaggaagcggcgtagcatgaggccctgtggtcagctgccgagtggacagcgcacagtggccccagtatttctcctgctgagtctggatgagcagccctctgaggagttctttcagtaaacttctagagcagtatttgtcaacatgtggtgtgtggatcacttgcatcagaatcacctgggagctctgcactgtagcaggggtcccaaccccctgggccacagactggtactgacctgtggcgagaaggtaatggtaaatataatgggcttgaatcgtcttgaaagcatccactcccctgtcttggaaaaactgtcttccacaaaaccagtccctggtgccaaaatggttgaggacctctgcattataggcatcgacacttgggctgctgcgagggctgatgtccttttgcttttgacgggcatcctttccgtcaggtcggcgtttgaccacacctccttcgccatcttggtcctggtaaggcagcttcctggaatcacaggaccacagggacaaaggcatctgaggggtcgttgacacaaccttctgtccccgatggcaggacacagtgatcgcttctcctggcacatgtctcagggagaccat

SEQ ID NO: 5671 - DNA, 3873 bp, Homo sapiens
  SIMILAR (2416)..(3243): 871254mologous to Cloning vector pBACe3.6 levansucrase,accession number U80929,Smith-Waterman Score=1242.
atggaaaggcgcacacccctgaccttgagggtgctgggagatgggggccaaggtcctgctgccctgcaggaatggttggttgacatgattgaatcacacaatttcacaaggagatggaccgtaaaaggctacacagtacaatcattgtcaaactccagaactactaaaaaaggggatcctctagagtcacaccgcgggtctgccaccaaggtgttaaagacacatgcacacgctttgcagaactttcagcggtataccggcatacagcatgtgcatcgcataggaatggcggaacgtatgtggtgtgaccggaacagagaacgtcacaccgtcagcagcagcggcggcaaccgcctccccaatccaggtcctgaccgttctggttcccgatttagtgctttacgggcacctcgacccccaaaaaacttgatttgggtgatggttcacgaagtgggccatcgccctgatagacggtttttcgcccttgtacgttggagtccacgtcttttaatagtggactcttgttccaaattggaccaacactcaaccctatctcgggctattcttttgattattaagggattttgccgatttcggaaccaccatcaaacaggattttcgcctgctgggccaaaccagcgtggaccgcttgctgcaactctctcagggccaggcggtgaagggcaatcagctgttgcccgtctcactggtgaaaagaaaaaccaccctggcgcccaatacgcaaaccgcctctccccgcgcgttggccgattcattaatgcagctggcacgacaggtttcccgactggaaagcgggcagtgagcgcaacgcaattaatggattttgccgatttcgacaccaccatcaaacaggattttcgcctgctggggcaaaccagcgtggaccgcttgctgcaactctctcagggccaggcggtgaagggcaatcagctgttgcccgtctcactggtgaaaagaaaaaccaccctggcgcccaatacgcaaaccgcctctccccgcgcgttggccgattcattaatgcagctggcacgacaggtttcccgactggaaagcgggcaggatgttgccgatttcggacccaccatcatacagatatttcgcctgctggggcaaaccagcgtggaccgcttgctgcaactctttcagggccaggcggtgaagggcaatcagctgttgcccgtctcactggtgaaaagaaaaaccaccttggcgctcaatacgcaaaccgcctctctccgcgcgttggccgattcattaatgcagctggcacgacaggtttcccgactggaaagcgggcagaatttagcagatttcgagacccaccatcaaacaggattttcgcttgctggggcaaaccagcgtggaccgcttgctgcaactctctcagggccaggcggtgaagggcaatcagctgttgcccgtctcactggtgaaaagaaaaaccaccctggcgcccaatacgcaaaccgcctctccccgcgcgttggccgattcattaatgcagctggcacgacaggtttcccgactggaaagcgggcagtgagcgcaacgcaattaatgcccattccagatggacgggattttgccgatttcggaaccaccatcaaacaggattttcgcctgctggggcaaaccagcgtggaccgcttgctgcaactctctcagggccaggcggtaaagggcaatcagctgttgcccgtctcactggtgaaaagaaaaaccaccctggcgcccaatacgcaaaccgcctctccccgcgcgttggccgattcattaatgcagctggcacgacaggtttcccgactggaaagcgggcaggattttgccgatttcggaacccccatcaaacaggattttcgcctgctggggcaaaccagcgtggaccgcttgatgcaactttctcagggccaggcggtgaagggcaatcagctgttgcccgtctcactggtgaaaagaaaaaccaccctggcgcccaatacgcaaaccgcctctccccgcgcgttggccgattcattaatgcagctggcacgacaggtttcccgactggaaagcgggcatgaatcagaagtaactcacctaacccttcacttaaatagctcatgggtaactccagacgagacaattggaaaggggccaggcggtgaagggcaatcagctgttgcccgtctcactggtgaaaagaaaaaccaccctggcgcccaatacgcaaaccgcctctccccgcgcgttggcgatttcattaatgcagctggcacgacaggtttcccgactggaaagcgggcagtgagcgcaacgcaattaatggattttgccgatttcggaaccaccatcaaacaggattttcgcctgctggggcaaaccagcgtggaccgcttgctgcaactctctcagggccaggcgcctgacaccagcgcaggtaaatgttcaaaatctgatgacacactcaaaatcaacggagtgaaagatcacaaaacgatttttgccggagacggaaaaacatatcagaacgttcagcagtttatcgatgaaggcaattatacatcggccgacaaccatacgctgagagaccctcactacgttgaagacaaaggccataaatactttgtattcgaagccaacacgggaacagaaaacggataccaaggcgaagaatctttatttaacaaagcgtactacggcggcggcacgaacatcttccgtaaagaaagccagaagcttcagcagagcgctaaaaaacgcgatgctgagttagcgaacggcgccctcggtatcatagagttaaataatgattacacattgaaaaaagtaatgaagccgctgatcacttcaaacacggtaactgatgaaatcgagcgcgcgaatgttttcaaaatgaacggcaaatggtacttgttcactgattcacgcggttcaaaaatgacgatcgatggtattaactcaaacgatatttacatgcttggttatgtatcaaactctttaaccggcccttacaagccgctgaacaaaacagggcttgtgctgcaaatgggtcttgatccaaacgatgtgacattcacttactctcacttcgcagtgccgcaagccaaaggcaacaatgtggttatcacaagctacatgacaaacagaggggattttgccgatttcggaaccaccatcaaacaggattttcgcctgctggggcaaaccagcgtggaccgcttgctgcaactctctcagggccaggcggtgaagggcaatcagctgttgcccgtctcactggtgaaaagaaaaaccaccctggcgcccaatacgcaaaccgcctctccccgcgcgttggccgattcattaatgcagctggcacgacaggtttcccgactggaaagcgggcaggattttgccgattacggaaccaccatcaaacaggattttcgcctgctggggcaaaccagcgtggaccgcttgctgcaactctctcagggccaggcggtgaagggcaatcagctgttgcccgtctcactggtgaaaagaaaaaccaccctggcgcccaatacgcaaaccgcctctccccgcgcgttggccgattcattaatgcagctggcacgacaggtttcccgactggaaagcgggcaggaatttgccgatttcggaaccaccatcaaacaggattttcgcctgctggggcaaaccagcgtggaccgcttgctgcaactctctcagggccaggcggtgaagggcaatcagctgttgccggtctcactggtgaaaagaaaaaccaccctggcgcccaatacgcaaaccgcctctccccgcgcgttggccgattcattaatgcagctggcacgacaggtttcccgactggaaagcgggcagtga

SEQ ID NO: 5672 - DNA, 784 bp, Homo sapiens
  SIMILAR (5)..(715): 981254mologous to Cloning vector pBACe3.6 levansucrase,accession number U80929,Smith-Waterman Score=1242.
  misc_feature (1)...(784): n = a,t,c or g
nagaatccccgatcacaaaacgatttttgacggagacggaaaaacatatcagaacgttcagcagtttatcgatgaaggcaattatacatccggcgacaaccatacgctgagagaccctcactacgttgaagacaaaggccataaataccttgtattcgaagccaacacgggaacagaaaacggataccaaggcgaagaatctttatttaacaaagcgtactacggcggcggcacgaacttcttccgtaaagaaagccagaagcttcagcagagcgctaaaaaacgcgatgctgagttagcgaacggcgccctcggtatcatagagttaaataatgattacacattgaaaaaagtaatgaagccgctgatcacttcaaacacggtaactgatgaaatcgagcgcgcgaatgttttcaaaatgaacggcaaatggtacttgttcactgattcacgcggttcaaaaatgacgatcgatggtattaactcaaacgatatttacatgcttggttatgtatcaaactctttaaccggcccttacaagccgctgaacaaaacagggcttgtgctgcaaatgggtcttgatccaaacgatgtgacattcacttactctcacttcgcagtgccgcaagccaaaggcaacaatgtggttatcacaagctacatgacaaacagaggcttcttcgaggataaaaagggcacatttgcgccaagctggacttgcgcgaaaatcctgtttgatggtggttccgaaatcggcaaaatcccttataaatcaaaagaatag

SEQ ID NO: 5673 - DNA, 1812 bp, Homo sapiens
  SIMILAR (1368)..(673): 971254mologous to Cloning vector pZC320 SopB,accession number U26464,Smith-Waterman Score=1122.
ctagtcagcacccaaagtctggagggggctgaggcagcagggggctggcatatcagtgctgccctgagtgtgcgcgcaaccggccaggtcgccaaagcgcctgagctcatcctcaactttgatctgcccaaaaaatattttgacaaacttgtgcacacattttttttccccccacaccgggaaatttcccacggtaaaaattcttatggcgccgttcgctaactcagcatcgcggggggtagcgctctgctgaagcttctggctttctttacggaagaagttcgtgccgccgccgtagtacgctttgttaaataaagattcttcgccttggtatccgttttctgttcccgtgttggcttcgaatacaaggtatttatggcctttgtcttcaacgtagtgagggtctctcagcgtatggttgtcgccggatgtataattgccttcatcgataaactgctgaacgttctgatatgtttttccgtctccgtcaaaaatcgttttgtgatcttccactccgttgattttgagtgtgtcatcagattttgacacatttacctgcgctgttgtcaggctttgtttgccgtaatgtttacccgaatagtcagtgtagaataaacggatttttccgtcagatggtaaagttgcagaacccgaccattcttgcgtctgatactcagttggaacacgagacctgtccaggttaagcaccattttatcgcccttatacaatactgtcgctccaggagcaaactgatgtcgtgagcttaaactagttcttgatgcagatgacgttttaagcacagaagttaaaagagtgataacttcttcagcttcaaatatcaccccagcttttttctgctcatgaaggttagatgcctgctgcttaagtaattcctctttatctgtaaaggctttttgaagtgcatcacctgaccgggcagatagttcaccggggtgagaaaaaagagcaacaactgatttaggcaatttggcggtgttgatacagcgggtaataatcttacgtgaaatattttccgcatcagccagcgcagaaatatttccagcaaattcattctgcaatcggcttgcataacgctgaccacgttcataagcacttgttgggcgataatcgttacccaatctggataatgcagccatctgctcatcatccagctcgccaaccagaagacgataatcactttcggtaagtgcagcagctttacgacggcgactcccatcggcaatttctatgacaccagatactcttcgaccgaacgccggtgtttgttgaccagtcagtagaaaagaagggatgagatcatcccatgcgttcttagtaagcagctcctggtcacgttcattacctgtcgtgccagctgcattaatgaatcggccaacgcgcggggagaggcggtttgcgtattgggcgccagggtggtttttcttttcaccagtgagacgggcaacagctgattgcccttcaccgcctggccctgagagagttgcagcaagcggtccacgctggtttgccccagcaggcgaaaatcctgtttgatggtggttccgaaatcggcaaaatcccttataaatcaaaagaatagcccgagaataggttgagtgttgttcccgtttgggaacaagagtccactcttgcatcagtgtgacctggatgtaagcgaggagatcattttgtagctttaatatttgactgccccactgggggggggacttgcattgggcctgcagcctctttgttttggccaatttctcccattttgaatgcctgtatttacccaatgcctgcaccctcat

SEQ ID NO: 5674 - DNA, 915 bp, Homo sapiens
  SIMILAR (161)..(361): 1001254mologous to synthetic construct lac repressor,accession number A14595,Smith-Waterman Score=321.
atggttcacgtagtgggccatcgccctgatagacggtttttcgcccttggacgttggagtccacgttctttaatagtggactcttgttccaaactggaacaacactcaaccctatctcgggctattcttttgattaaaaagggattttgccgatttcggaaccaccatcaaacaggattttcgcctgctggggcaaaccagcgtggaccgcttgctgcaactctctcagggccaggcggtgaagggcaatcagctgttgcccgtctcactggtgaaaagaaaaaccaccctggcgcccaatacgcaaaccgcctctccccgcgcgttggccgattcattaatgcagctggcacgacaggttcacccattcaccccacgaaatccccacgccctcgggccaacgtggttctcccgtgtttggacaaaacggagtgtacgcaaataaggtttaaacagtttcgcggtgggccatgttggaacacattttattgttttctcgagagcccagcaacaaagaaccagaaacgtaggcacatagtatgtaagcagacgacaagaggttcgcggcgtataaaaagaagacgaagggagggacggagcgatgggacaagtatggacgccggcctgcgaacggtattcgaacgggcgaaaacaacgcgaagacagagcaccttcgggaccgggatcaaaagcgacgagagagagagagagagcgaggtaaacgacagaaatcaccgagcaggagggcagcggttgaggcgagcccgtggagcagatgcggaagaggagggctcaggcatggtcaaggcgaaaatcgactggatcacagacggaaaccagaagcgtaagagttaccagagtaggcttaaaaaccgcctccgagtcccgcaggatcagaacgatggagcaaaatga

SEQ ID NO: 5675 - DNA, 1469 bp, Homo sapiens
  SIMILAR (3)..(632): 981254mologous to Tn10 delivery vector pHV1248 transposase,accession number AF307747,Smith-Waterman Score=1084.
agcaatgttcaaagaaagctcatgaccaatttctagccgaccttgcgagcattctaccgagtaacaccacaccgctcattgtcagtgatgctggctttaaagtgccatggtataaatccgttgagaagctgggttggtactggttaagtcgagtaagaggaaaagtacaatatgcagacctaggagcggaaaactggaaacctatcagcaacttacatgatatgtcatctagtcactcaaagactttaggctataagaggctgactaaaagcaatccaatctcatgccaaattctattgtataaatctcgctctaaaggccgaaaaaatctgcgctcgacacggactcattgtcaccacccgtcacctaaaatctactcagcgtcggcaaaggagccatgggttctagcaactaacttacctgttgaaattcgaacacccaaacaacttgttaatatctattcgaagcgaatgcagattgaagaaaccttccgagacttgaaaagtcctgcctacggactatgcctacgccatagccgaacgagcagctcaaagcgttttgatatcatgctgctaatcgccctgatgcttcaactaacatgttggcttgcgggcgttcatgctcataaacagaggcaatcactcctgcagccatttcctgacatatgccagggaggaactgatgtttctctgtggctggtgacctactgcacatgtgacaatctaaaaacttgtcacacttcacatggatctgtcatggcggaaacagcggttatcaatcacacgaaacgtaaaaatagcccgcgaatcgtccagtcaaacgacctctctgaggcggcatatagtctctcccgggatcaaaaacgtatgctgtgtctgttcgttgaccagatcagaaaatctgatggcgccctacaggaacatgacggtgtctgcgagatccatgttgctaaatatgctgaaatattcggattgacctctgcggaagcccgtgtggatgtacggcaggcgttgaagagtttcgcggggaaggaggtggttttttatcgccctgaagaggatgccggcgatgaaaaaggctatgaatcttttccttggtttttcaaacgtgcgcacagtccctccggagggctggttcgtgtgcttatcatcccctatctcattcccttttgtgtcgtggttccagaaccgggttactcattttcggctgcgaaaatcctgtgtgatggtggttccgaaatcggcaaaatcccttataaatcaaaagaatatcccgagatagggttgagtgttgttccagtttggaacaagagtccactattaaagaacgtggactccaacgtcaaagggcgaaaaaccgtctatcatggcgatggcgcactacgtgaaccatcacacaaatcaagttttttgggggtcgagtgccgtaaagcactaaatcggaaccctaaaggagcccccgatttatag

SEQ ID NO: 5676 - DNA, 3763 bp, Homo sapiens
  SIMILAR (164)..(3109): 1001254mologous to Homo sapiens myosin phosphatase targeting/regulatory subunit,accession number AB003062,Smith- Waterman Score=4985.
gaggatccgggtaccatggggcgggaggagtaaagatggcggcgcgagggtctccgccctctgctccgggctgaagcgctctgagagaggcggcagcggcaactcgagccccaacagtaatttagtgttggtagttttggcagcagctgccgaggccggagcaatggcggaactggagcacctaggagggaagcgggcagagtcggcgcgaatgcggcgggcagagcagcttcggcgctggcggggctcgctgacagagcaggagcctgcggagcgacgaggcgcggggcggcagccgctgaccaggcgcgggagccccagggtccgcttcgaggacggtgctgtctttctggccgcctgctctagcggggacaccgacgaggtgagaaagcttctggcaagaggtgctgatatcaacacggtcaacgtggacggcttgacagccctgcaccaggcatgtattgatgaaaatttggacatggtgaagtttctggtggagaacagagccaatgtaaaccagcaagacaacgagggctggacaccccttcatgcagcagcttcctgtggctatctcaacatagcagagtatttcattaatcacggagccagtgtaggtattgtcaatagtgaaggtgaagttccctctgaccttgcagaagagccagccatgaaggatcttcttctggagcaagtaaagaagcaaggaattgatctagagcagtcaagaaaagaagaagagcagcagatgttgcaggatgcccgccagtggctcaacagtgggaaaatagaggatgtgaggcaggctcgctcaggggctacagcccttcatgtggctgctgccaagggctactctgaagtcctcagacttttaattcaggctggctatgaactcaatgttcaggattatgatggctggactcccctccatgctgctgcacactggggagtgaaggaggcttgctccatcctggcagaagcactttgtgacatggatattcgaaataaactgggccagacaccatttgatgtggctgatgagggtctcgtggagcatttggagttgctccagaagaagcagaatgtgcttcgaagtgaaaaggagacacggaataaactcattgagtcagatctgaacagcaagattcagagtgggttctttaagaacaaagagaagatgctctatgaggaggagacacctaagtcccaagaaatggaggaagaaaataaagaatctagtagctccagctcagaggaggaggaaggtgaagatgaagcttctgagtcagaaactgagaaggaggcagataaaaagccagaagcctttgtcaatcattccaactctgaaagcaagagtagtatcacagagcagataccagcaccagctcaaaataccttctctgcctcttctgctaggaggttctcttctggcctttttaacaagccagaagagcccaaagatgaatctccttcttcatggagattgggactgagaaaaactggcagccacaacatgctgagtgaggtggccaattccagggaacctataagggaccgaggctcttccatctatcgctcctcttcaagccctcgaatttctgctctactggacaacaaagataaggagagagaaaacaaaagctatattagttcactagcaccccggaagctcaacagcacaagtgatattgaagaaaaggagaacagagaatcagctgttaatctagtgaggagtggctcctatacccggcagctatggagggatgaagcaaaaggaaatgaaatcccacagacaattgctccctccacctatgtatcaacttacttgaaaaggactcctcacaaatcccaggccgacacaacagcagagaaaacagcagacaatgtctcttctagcaccccgctctgtgtgatcaccaatcgccctcttcctagcactgccaatggggttacagctactcctgtgctctccattactggaacagattcctctgtggaagccagggagaagaggaggtcctatctgactcctgtacgggatgaggaagcagagtctttacggaaagcacgctccagacaagctcggcagacacgaaggtctactcaaggtgtcaccctaacagaccttcaagaagcagaaaggacattcagccggtcgagggcagagaggcaagctcaggagcagcctcgtgagaagcccacagacactgaagggcttgaggggagccctgagaagcatgagccctcagcagttccagcaacagaagctggggagggccagcagccctggggcaggagtctggatgaagagcctatctgtcatcgcctgaggtgcccagctcagccagacaaacccaccacgccagcatctccttctacgtcaagaccctcactctacaccagttcccacctgctatggacaaatagattttcagtccctgattctgagagttcagagactaccacaaacactacaactgcaaaggaaatggacaaaaatgagaatgaagaagcagatttggatgagcagtcctctaagaggctgtccatccgagagaggaggcggcccaaggaacgacgaagaggcacaggcatcaatttctggacaaaggatgaggatgaaactgatggctctgaagaggtcaaagaaacgtggcatgaaagactttctaggttggaatcgggaggtagtaatcctacaaccagtgattcttacggtgaccgggcttcagcaagagcccgtcgggaggcccgggaggcccgcctagccaccctgaccagccgtgtagaagaagacagcaacagagattataaaaaactctatgagagtgctctgactgaaaaccaaaaactgaaaacaaaacttcaggaagcccagctagagctagcagatataaagtccaagcttgagaaggtggcccagcagaaacaagaaaagacctctgaccgatcatcagtgctggagatggagaaacgggagaggcgagccttggagcgcaaaatgtcagaaatggaggaagaaatgaaggtgttaacagaactgaaatccgacaaccagaggctgaaagatgaaaatggtgccctcatcagagtcatcagcaaactgtccaagtaggctaggctccagatttatgaggaaagaaagggacagcatttgctgcccccacccctcttttccagtccttgccttccaaccaaaagaaatggatgttttggtggaaggacacttctttctatcaccctctttagtcacctctatacactctacattttctctgcactttcaatgccctgttcttccaaacccctatcccaagttttatgacagttttaattgaagcatgattgtggtaattcgagccatctggagaatgctctggggagtacaccaggctcagctgtggacccctcaacttcctgctgctcagctactttgtccacattggatttggtccaaacatgtaagacttctaccctaatcagtatccttcagctttttacattaacccagtgtcctctgatataggtgagtcttgtggtagccactccaggatcctgattggggtgccaagagaaacagcaggatgttgaattgatcatcagatgccctctggaatggttagcatccaaggtgacagtgactgcattgaggcgctctattcttcttcacctctcaggaactgacttttattttttctatcaacacccagtaatctccctaactagttttaacccttattcctccctcatacctagccatttcccg

SEQ ID NO: 5677 - DNA, 2757 bp, Homo sapiens
  SIMILAR (1971)..(2030): 501254mologous to Cloning vector pZC320 SopA,accession number U26464,Smith-Waterman Score=40.
atgaggtggacaccagggcatgaaataacaaaggctttgcagacttttcagcggtataccggcatacagcatgtgcatcgcataggaatggcggaacgtatgtggtgtgaccggaacagagaacgtcacaccgtcagcagcagcggcggcaaccgcctccccaatccagaacattttgaggcatttcagtcagttgctcaatgtacctataaccagaccgttcagctggatattacggcctttttaaagaccgtaaagaaaaataagcacaagttttatccggcctttattcacattcttgcccgcctgatgaatgctcatccggagttccgtatggcaatgaaagacgtggactcttgttccaaactggaacaacactcaaccctatctcgggctattcttttgatttataagggattttgccgatttcggaaccaccatcaaacaggattttcgcctgctggggcaaaccagcgtggaccgcttgctgcaactctctcagggccaggcggtgaagggcaatcagctgttgcccgtctcactggtgaaaagaaaaaccaccctggcgcccaatacgcaaaccgcctctccccgcgcgttggccgattcattaatgcagctggcacgacaggtttcccgactggaaagcgggcagtgagcgcaacgcaattaatttaccgagaactcttcccgcagccattggttcagctggacccctgtagcgtcccatgcatgcagccgcccacttcgcccaaatccagggcctgggtttctgacatcgcgcttcttgagtttcagaagaagaaagagatggagaagaagaaagagaaggaaaggaagaaagagctacagggaggaagaggaagacgaagaggaggaggatgggggaaaggaagagaaagaggaggaagaggaaaaaagagaagaggaggaggagaggctatcagagatgccgagaaagcagggcgactaccgcacccggatatggaaattcgaggacgggttgagcaacgtgttggttatacaattgaacaaattaatcatatgcgtgatgtgtttggtacgcgattgcgacgtgctgaagacgtatttccaccggtgatcggggttgctgcccataaaggtggcgtttacaaaacctcagtttctgttcatcttgctcaggatctggctctgaaggggctacgtgttttgctcgtggaaggtaacgacccccagggaacagcctcaatgtatcacggatgggtaccagatcttcatattcatgcagaagacactctcctgcctttctatcttggggaaaaggacgatgtcacttatgcaataaagcccacttgctggccggggcttgacattattccttcctgtctggctctgcaccgtattgaaactgagttaatgggcaaatttgatgaaggtaaactgcccaccgatccacacctgatgctccgactggccattgaaactgttgctcatgactatgatgtcatagttattgacagcgcgcctaacctgggtatcggcacgattaatgtccatcctgcttggggctctgccatttcccttctggaatattcccctggccacctggctggcttcgtggcctccattccagccccactccagcttgtccccagatgggacaccaagcctgtcctggaggatgcatcagcatcctcacggttcagcatcccccaaagaaaccccacacatttacatcccaccaccagcttcccttcttgcaatccagacacagtggatgcctggatgagatttctcataacttggtgcctttacacttctccttactccactcttatgggagagcttttccctttttatcaggggatgctcctagagtcgaccaaacagggcagtcaagtccgaaaagttttcgtatggactcttgttccaaactggaacaacactcaaccctattctcgggctattcttttgatttataagggattttgccgatttcggaaccaccatcaaacaggattttcgcctgctggggcaaaccagcgtggaccgcttgctgcaactctctcagggccaggcggtgaagggcaatcagctgttgcccgtctcactggtgaaaagaaaaaccaccctggcgcccaatacgcaaaccgcctctccccgcgcgttggccgattcattaatgcagctggcacgacaggtttcccgactggaaagcgggcaatcctaaaacagcagcaaaacgaaaaataccaagtgcctcaattcgatcaatcaacgattaaaaatattgagtctgcaaaaggacttgatgtgtgggacagctggccgctgcaaaacgctgacggaacagtagctgaatacaacggctatcacgttgtgtttgctcttgcgggaagcccgaaagacgctgatgacacatcaatctacatgttttatcaaaaggtcggcgacaactcaatcgacagctggaaaaacgcgggccgtgtctttaaagacagcgataagttcgacgccaacgatccgatcctgaaagatcagacgcaagaatggtccggttctgcaacctttacatctgacggaaaaatccgtttattctacactgactattccggtacacattacggcaaacaaagcctgacaacagcgcaggtaaatgtgtcaaaatctgatgacacactcaaaatcaacggagtggaagatcacaaaacgatttttgacggagacggaaaaacatatcagaacgttcagcagtttatcgatgaaggcaattag

SEQ ID NO: 5678 - DNA, 7263 bp, Homo sapiens
  SIMILAR (982)..(1725): 841254mologous to Cloning vector pZC320 SopB,accession number U26464,Smith-Waterman Score=1025.
  misc_feature (1)...(7263): n = a,t,c or g
ggatatgccacgcacgtaaaaaaccgtcctatagccactctattccaataattcaaggtcaaacaaccccttcccccaaaagtccaagaatggtcagcagacacctgcagttcggtcgaatagtatctggtgttatagaaattccctatggatgtcgccgtcgaaaagctgctgcacttactgaaagtaattatcgtgttctggttgcccagctgtatgatgagcagatggctgcattatccagattgggtaacgattatcgcccaacaagtgcttatgaacgtggtcagcgttatgcaagccgattgcagaatgaatttgctggaaatatttatgcgctggctgatgcggaaaccacttcacgtaagattattacccgctgtatcaacaccgccaaattgcctaaatcagttgttgctcttttttctcaccccggtgaactatctgcccggtcagtgggccatcgccctcatagccggtttttcgcccttgaccgttggagtccacgttctttaatagtggactcttgttccaaattggatcaacactcaaccctatctcgggttattcttttgatttataagggattttgccgatttcggaaccaccatcaaacaggattttcgcctgctggggcaaaccagcgtggaccgcttgctgcaactctctcagggccaggcggtgaagggcaatcagctgttgcccgtctcactggtgaaaagaaaaaccaccctggcgcccaatacgcaaaccgcctctccccgcgcgttggccgattcattaatgcagctggcacgacaggtttcccgactggaaagcgggcacgccttacatatctccctcatcacaccaagtttccctactgaggggaagagccagtttgtgctgcaactaagaccttcgttacgaggagcactcttgagtttgctggatcactacgaatggaactgttttgtcttcctgtatgacacagacagggnagtaatggctcgcggtaatgccatttctttgcctgtatgtggtcgggatgtgaagttactctttgaagtgctccggggtgatagtgttgagaagacctctcgggtatggtcaggtaatgaacgtgaccaggagctgcttactgaggacgcactggatgatctcatcctttcttttctactgactggtcaacagacaccggcgttcggtngaagagtatctggtgtcatagaaattgccgatgggagtcgccgtcgtaaagctgctgcacttaccgaaagtgattatcgtgttctggttggcgagctggatgatgagcagatggctgcattatccagattgggtaacgattatcgcccaacaagtgcttatgaacgtggtcagcgttatgcaagccgattgcagaatgaatttgctggaaatatttctgcgctggctgatgcggaaaatatttcacgtaagattattacccgctgtatcaacaccgccaaattgcctaaatcagttgttgctctcccctctcaccccggtgaactatctgcccggtcaggtgatgcacttcaaaaagcctttacagataaagaggaattacttaagcagcaggcatctaaccttcatgagcagaaaaaagctgggacggtttttcgccttttgacgttggagtccacgtctttaatagtggactcttgtcccaaactgaaacaacactcaaccttatctcgggttattcttttgatttataagggattttgccgatttcggaaccaccatcaaacaggattttcgcctgctggggcaaaccagcgtggaccgcttgctgcaactctctcagggccaggcggtgaagggcaatcagctgttgcccgtctcactggtgaaaagaaaaaccaccctggcgcccaatacgcaaaccgcctctccccgcgcgttggccgattcattaatgcagctggcacgacaggtttcccgactggaaagcgggcagtgagcgcaacgcaattaatggattttgccgatttcggaaccaccatcaaacaggattttcgcctgctggggcaaaccagcgtggaccgcttgctgcaactctctcagggccaggcgacggtttttcgccctttgacgtggagtccacgttctttaatagtggactcttgttccaaactggaacaacactcaaccctatctcgggctattcttttgattaataagggattttgccgatttcggaaccaccatcaaacaggattttcgcctgctggggcaaaccagcgtggaccgcttgctgcaactctctcagggccaggcggtgaagggcaatcagctgttgcccgtctcactggtgaaaagaaaaaccaccctggcgcccaatacgcaaaccgcctctccccgcgcgttggccgattcattaatgcagctggcacgacaggtttcccgactggaaagcgggcagtgagcgcaacgcaattaatggattttgccgatttcggaaccaccatcaaacaggattttcgcctgctggggcaaaccagcgtggaccgcttgctgcaactctctcagggccaggcggtgaagggcaatcagctgttgcccgtctcactggtgaaaagaaaaaccaccctggcgcccaatacgcaaaccgcctctccccgcgcgttggccgattcattaatgcagctggcacgacaggtttcccgactggaaagcgggcaggattttgccgatttcggaaccaccatcaaacaggattttcgcctgctggggcaaaccagcgtggaccgcttgctgcaactctctcagggccaggcggtgaagggcaatcagctgttgcccgtctcactggtgaaaagaaaaaccaccctggcgcccaatacgcaaaccgcctctccccgcgcgttggccgattcattaatgcagctggcacgacaggtttcccgactggaaagcgggcaggattttgccgatttcggaaccaccatcaaacaggattttcgcctgctggggcaaaccagcgtggaccgcttgctgcaactctctcagggccaggcggtgaagggcaatcagctgttgcccgtctcactggtgaaaagaaaaaccaccctggcgcccaatacgcaaaccgcctctccccgcgcgttggccgattcattaatgcagctggcacgacaggtttcccgactggaaagcgggcaggattttgccgatttcggaaccaccatcaaacaggattttcgcctgctggggcaaaccagcgtggaccgcttgctgcaactctctcagggccaggcggtgaagggcaatcagctgttgcccgtctcactggtgaaaagaaaaaccaccctggcgcccaatacgcaaaccgcctctccccgcgcgttggccgattcattaatgcagctggcacgacaggtttcccgactggaaagcgggcaggattttgccgatttcggaaccaccatcaaacaggattttcgcctgctggggcaaaccagcgtggaccgcttgctgcaactctctcagggccaggcggtgaagggcaatcagctgttgcccgtctcactggtgaaaagaaaaaccaccctggcgcccaatacgcaaaccgcctctccccgcgcgttggccgattcattaatgcagctggcacgacaggtttcccgactggaaagcgggcaggattttgccgatttcgggaccccccatcaaacaggattttcgcctgctggggcaaaccagcgtggaccgcttgctgcaactctctcagggccaggcggtgaagggcaatcagctgttgcccgtctcactggtgaaaagaaaaaccaccctggcgcccaatacgcaaaccgcctctccccgcgcgttggccgattcattaatgcagctggcacgacaggtttcccgactggaaagcgggcagtgagcgcaacgcaattaatggattttgccgatttcggaaccaccatcaaacaggattttcgcctgctggggcaaaccagcgtggaccgcttgctgcaactctctcagggccaggcggtgaagggcaatcagctgttgcccgtctcactggtgaaaagaaaaaccaccctggcgcccaatacgcaaaccgcctctccccgcgcgttggccgattcattaatgcagctggcacgacaggaaacagctatgaccatgattacgaattcgagctcggtacccctgcacgcttttccaatcccggtgaccggaaacctggggatcctctagaccccaaaagcagtctgaagcgagccggtgattggtgttggttgagcccgactttgagagagatccagtcaacggagggaaattccggggatcctctatattcgccagggcttttatcgggaaagccttttatcgggtttgtaaagccaaccatagtacgcccttgtagcggcgcattaagccggccggtggactcttgttccaaactggaacaacactcaaccctatctcgggctattcttttgatttataagggattttgccgatttcggaacccacccatcaaacaggattttcgcctgctggggcaaaccagcgtggaccgcttgctgcaactctcgctcggactgcgaatagttgcaccggcccagcaagttgagtttgcagagatgcaggttatcgcagggtctctggcagtacttgcgacggcagacccgggctcgagtggtggccaccaccgatcgggtgatcccggcctcgccgccggtctccaacaccacaaagcggtcgggcccggccacctgcagcacctcacagagctgcggctcagacagcgcgggggatcctaggtggattccggggttacagtagcctttctcgatcgtctccatgtgctcaaagtccgtccaggttttaccaataagcatctgccaccggtaaggcagatggaagtggactttgctgcagctaccttgagaagggtagtaaatcaccaagtttagcctagcttcagaaatgacatcaactaggggaggtaaaacctgcaaagccccttcacctcctcggaaaacaaccgggttggaatcttggaccctgtgcttaaagggttctttttggacatcaagtggtaaaagttcattttccaattcatggccgtaaacttcagttgtaactgtaaccagagtggacccttcctggcgcccaatacgcaaaccgccctctccccgcgcgttggccgattcattaatgcagctggcacgacaggtttcccgatttttttctaaacactccagttggaacaccaacacctttcccaggttaagcaccctttcattgcccttatcaaatactgtcgctccaggagcaaactgatgtcgtgagcttaaactagttcttgatgcagatgacgttttaagcacagaagttaaaagagtgataacttcttcagcttcaaatatcaccccagcttttttctgctcatgaaggttagatgcctgctgcttaagtaattcctctttatctgtaaaggctttttgaagtgcatcacctgaccgggcagatagttcaccggggtgagaaaaaagagcaacaactgatttaggccatctggcggtgttgatacagcgggtaataatcttacgtgaaatattttccgcatcagccagcgcagaaatatttccagcaaattcattctgcaatcggcttgcataacgctgaccacgttcataagcacttgttgggcgattatcgttacccaatctggataacgcagccatctgctcatcatccagctcgccaaccagaacacgataatcactttcggtaagtgcagcagctttacgacggcgactcccatcggcaatttctatgacaccagatactcttcgaccgaacgcgggtgttgcccgctttccagtcgggaaacctgtcgtgccagctgcattaatgaatcggccaacgcgcggggagaggcggtttgcgtattgggcgccagggtggtttttcttttcaccagtgagacgggcaacagctgattgcccttcaccgcctggccctgagagagttgcagcaagcggtccacgctggtttgccccagccggcgaaaatcctgtttgatggtggttccgaaatcggcaaaaatccttataaatcaaaagaatagcccgagatagggttgagtgttgttccaagtttgaacaagagttcacgcctggcctgagagagttgcaagcagcggtccacgctggttttgcccccaggtcgactctagaggatcccccacggcccgcgtttttccagctgtcgattgagttgtcgccgacctttttgataaaacatgtagattgatgtgtcatcagcgtcttcgggctttcccgcaagagcaaacacaacgtgatagccgttgtattcagctactgttccgtcagcgttttgcagcggccagctgtcccacacatcaagtccttttgcagactcaatatttttaatcgttgattgatcgaattgaggcacttggtatttttcgttttgctgctgtttagggatctgcagcatatcatggcgtgtaatatgagagacgccgtacgtttctttgtatgctttttggttattttctttcgcgaaggcttgagtcgctcctcctgccagaagtgcagtcgtaaaagtcagaactgtggcttgttttacaatttttttgatgttcatgttcatgtctccttctgtatgtactgttttttgcgatctgccgtttcgatcctcccgaattgatcttggcgcctcctcggtctcggtgtccactctggccacgcttgaggagtccttcagcccgctgctgcactgtgggagcccctctctgggctggccaaggccagagccagctccctctgcttgtggggaggtgtggagggcgctgctctgtggcgcctggtcccatcgaccttccaagggtgcccgctttccagtcgggaaacctgtcgtgccagctgcattaatgaatcggccaacgcgcggggagaggcggtttgcgtattgggcgccagggtggtttttcttttcaccagtgagacgggcaacagctgattgcccttcaccgcctggccctgagagagttgcagcaagcggtccacgctggtttgccccagcaggcgaaaatcctgtttgatggtggttccgaaatcggcaaaatcccttataaatcaaaagaatagcccgagatagggttgagtgttgttccagtttgggacaagagtccactattaaagaacgtggactccaaccgtcaagggcgaaaaaacgtctatcaaggcgatggcccactacctgaaccat

SEQ ID NO: 5679 - DNA, 15031 bp, Homo sapiens
  SIMILAR (2514)..(3023): 951254mologous to Cloning vector pBACe3.6 levansucrase,accession number U80929,Smith-Waterman Score=853.
  misc_feature (1)...(15031): n = a,t,c or g
atgtctaagcagcaaagcattgaagatgtgacctggattattctaaaagcattcagttttatgcattcacaaagagatggtttgaaattggaacttatgtttaaaagggaagcagagcataaatgttcagaaaatttgcagcctgacaatgtgatagaaaagaaaatctcattttctgaggggaaattcaagcaggctgcagaaatttgcataagtaacgagaaactgaatgctaatccccaagacaatggggaaaatgtctccagggcatgtcagagaccttggcagcagcccctgccatcacaggcccagaggactaggaggaaaaatggcttcctgggctgggcccagggcccctgctgctctgtactgcctcaggacatggcaccctgcttccaagctgcttcagctccagtcgtggctaaaaggggccaaggtacagctcaggtggttgcttcagagggtgcaagccccaagccttggcaggttccacgtgttgctgggcctacagtggactcttgttccaaactggaacaacactcaaccctatctcgggctattcttttgatttataagggattttgccgatttcggaaccacccatcaaacaggattttcgcctgttggggcaaaccagcgtggaccgcttgctgcaactctctcagggccaggcggtgaagggcaatcagctgttgcccgtctcactggtgaaaagaaaaaccaccctggcgcccaatacgcaaaccgcctctccccgcgcgttggccgattcattaatgcagctggcacgacaggtttcccgactggaaagcgggcagtgagcgcaacgcaattaatgggattttgccgatttcggaaccaccatcaaacaggattttcgcctgctggggcaaaccagcgtggaccgcttgctgcaactctctcagggccaggcggtgaagggcaatcagctgttgcccgtctcactggtgaaaagaaaaaccaccctggcgcccaatacgcaaaccgcctctccccgcgcgttggccgattcattaatgcagctggcacgacaggtttcccgactggaaagcgggcaagaatgccacttcctggccgctgactaccaagctcagctgtttggcagcctggagtggagcacattcactgccatgagggctttgcgtgtaacagtggactcttgttccaaactggaacaacactcaaccctatctcgggctattcttttgatttataagggattttgccgatttcggaaccaccatcaaacaggattttcgcctgctggggcaaaccagcgtggaccgcttgctgcaactctctcagggccaggcggtgaagggcaatcagctgttgcccgtctcactggtgaaaagaaaaaccaccctggcgcccaatacgcaaaccgcctctccccgcgcgttggccgattcattaaatgcagctggcacgacaggtattcccgactggaaagcgggcagtgagcgcaacgcaattaatcttttctttacgtttaaatcagtccattgttcctgctgattctgtcatcggacaatatgtcaaacccctgaagttttgtggcaaccacaatctgatcaacgggtcaccatcactaacgccgatgctcagcaggccaagggattttgccgatttcggaaccaccatcaaacaggattttcgcctgctggggcaaaccagcgtggaccgcttgctgcaactctctcagggccaggcggtgaagggcaatcagctgttgcccgtctcactggtgaaaagaaaaaccaccctggcgcccaatacgcaaaccgcctctccccgcgcgttggccgattcattaatgcagctggcacgacaggtttcccgactggaaagcgggcagtgagcgcaacgcaattaatggattttgccgatttcggaaccaccatcaaacaggattttcgcctgctggggcaaaccagcgtggaccgcttgctgcaactctctcagggccaggcggtgaagggcaatcagctgttgcccgtctcactggtgaaaagaaaaaccaccctggcgcccaatacgcaaaccgcctctccccgcgcgttggccgattcattaatgcagctggcacgacaggtttcccgactggaaagcgggcagctgtctgcaaagggccattcccaacttcaacagatccctaaacagcagcaaaacgaaaaataccaagtgcctcaattcgatcaatcaacgattaaaaatattgagtctgcaaaaggacttgatgtgtgggacagctggccgctgcaaaacgctgacggaacagtagctgaatacaacggctatcacgttgtgtttgctcttgcgggaagcccgaaagacgctgatgacacatcaatctacatgttttatcaaaaggtcggcgacaactcaatcgacagatgggaaaaacgcgggccgtgtctttaaagacagcgataagttcgacgccaacgatccgatcctgaaagatcagacgcaagaatggtccggttcttgcaccctttacatttgacggaaaaatccgtttattttacattgactattccggtaaacattccggcaaccaaagcctgacatcagcgcaggtaaatgtgtcaaaatctgatgacacactcaaaatcaacggagtggaagatcacaaaacgatttttgacggagacggaaaaacatatcagaacgttcagcagtttatcgatgaaggcaattatacatccggcgacaaccatacgctgagagaccctcactacgttgaagacaaaggccataaatgccttgtattcgaagccaacacgggaacagaaaacggataccaaggcgaagaatctttatttaacaaagcgtactacggcggcggcacgaacttcttccgtaaagaaagccagaagcttcagcagagcgctaaaaaacgcgatgctgagttagcgaacggcgccctcggtatcatagagttaaataatgattacacattgaaaaaagtaatgaagccgctgatcacttcaaacacgactttaagaaagaaaggccttaatggttgtgagagccctgatgctgacgattactttgagcacagtccactctcggaggacagattcagcaaactaaatgaagatagtgattttattttcaaacgagggccctgtaagttgcagcaagcggtccacgctggtttgccccagcaggcgaaaatcctgtttgatggtggtttcgaaatcggcaaaatcccttataaatcaaaagaaatagcccgagatagggttgagtgttgttccagtttggaacaagagtccactattaaagaacggggactccaacgtcaaagggcgaaaaaaccttctttcacggcgatggcccactactttaatgatgacagcccggaagcgaggaaaataacccggcgctggagaataggtgaagcagcggatttagttggggtttcttctcaggctatcagagatgccgagggggcagggcgactaccgcacccggatatggaaattccaggacgggttgagcaacgtgttggttatacaattgaacaaattaatcatatgcgtgatgtgtttggtacgcgattgcgacgtgctgaagacgtatttccaccggtgatcggggttgctgaccataaaggtggcgtttacaaaacctcagtttctgtttatcttgctcaggatctggttatgaacgggctacgtgttttgctcgcggaaggaaacgatttccaaggaacagtctccatgtatcacggatgggtaccatatcttcatattcatgccgtaagacactgtgctggctttctatcttggcgcaaaaggaccattttgcttatgcaataaagcccacttgctggccggggcttgacattattccttcctgtctggctctgcaccgtattgaaactgagttaatgggcaaatttgatgaagtggactcttgttccaaactggaacaacactcaaccctatctcgggctattcttttgatttataagggattttgccgatttcggaaccaccatcaaacaggattttcgcctgctggggcaaaccagcgtggaccgcttgctgcaactctctcagggccaggcggtgaagggcaatcagctgttgcccgtctcactggtgaaaagaaaaaccaccctggcgcccaatacgcaaaccgcctctccccgcgcgttggccgattcattaatgcagctggcacgacaggtttcccgactggaaagcgggcagtgagcgcaacgcaattaatagctctcctgtgccagaaatgcattattcctgccctgtcctccccctcgcagcctccaaaggctggcaaattgtcccccacggtccctgttttcaaaaatgcagctggctgtagacagtgtgacaatctaaaaacttgtcacacttcacatggatctgtcatggcggaaacagcggttatcaatcacaagaaacgtaaaaatagcccgcgaatcgtccagtcaaacgacctcactgaggcggcatatagtctctcccgggatcaaaaacgtatgctgtatctgttcgttgaccagatcagaaaatctgatggcaccctacaggaacatgacggtatctgcgagatccatgttgctaaatatgctgaaatattcggattgacctctgcggaagccagtaaggatatacggcaggcattgaagagtttcgcggggaaggaagtggttttttatcgccctgaagaggatgccggcgatgaaaaaggctatgaatcttttccttggtttatcaaacgtgcgcacagtccatccagagggctttacagtgtacatatcaacccatatctcattcccttctttatcgggttacagaaccggtttacgcagtttcggcttagtgaaacaaaagaaatcaccaatccgtatgccatgcgtttatacgaatccctgtgtcagtatctggactcttgttccaaactggaacaacactcaaccctatctcgggctattcttttgatttataagggattttgccgatttcggaaccaccatcaaacaggattttcgcctgctggggcaaaccagcgtggaccgcttgctgcaactctctcagggccaggcgcaagaagatccttataggaagaaaaagcttcaggagaaaagagaaggaaatttacaaaatttaaattggagtaaaagtcgaacatgtagaaagaacaagaaaaggggtgttgctccagtctcaaggtttggcactgatatgcagatgattaatttcacaactggccagatgctatcagcagctgaagagcatctacagaaaccagctgcaaaaacagaagcagaccaactggcttggtgcagagatctgacaacaaaaagttgggaaatagatgacagaatggctccagatgttctccttgcaggccaaggtgcagtctatgcaatcactaacacatcctgctgtacctggagtaatgcctctggccaagtggagagatcaacacagaaacttaaagagaaagccatctggctctctaagggattttgccgatttcggaaccaccatcaaacaggattttcgcctgctggggcaaaccagcgtggaccgcttgctgcaactctctcagggccaggcggtgaagggcaatcagctgttgcccgtctcactggtgaaaagaaaaaccaccctggcgcccaatacgcaaaccgcctctccccgcgcgttggccgattcattaatgcagctggcacgacaggtttcccgactggaaagcgggcagacaggacacttagagatatagagtctcagtccctgtcagtcacgtgcagtcacaaccatccctataagtcaggtctgacatctgaaacactcaacttgaaagcagtcactgggcaaaggagaagaaataacaatgtcatcaccttcatgaacacaactctgcattcctctcagatcttcgccttctctaaggacaaagtgattggcttttccattcccaatgttgactctgaaggcttgaagaaaaatcttgatgtggcacagctttgcctttgcctttataagagagagagactgagggattttgccgatttcggaaccaccatcaaacaggattttcgcctgctggggcaaaccagcgtggaccgcttgctgcaactctctcagggccaggcggtgaagggcaatcagctgttgcccgtctcactggtgaaaagaaaaaccaccctggcgcccaatacgcaaaccgcctctccccgcgcgttggccgattcattaatgcagctggcacgacaggtttcccgactggaaagcgggcaggattttgccgattcgggaaccaccatcaaacaggattttcgcctgctggggcaaaccagcgtggaccgcttgctgcaactctctcagggccaggcggtgaagggcaatcagctgttgcccgtctcactggtgaaaagaaaaaccaccctggcgcccaatacgcaaaccgcctctccccgcgcgttggccgattcattaatgcagctggcacgacaggtttcccgactggaaagcgggcagtggactcttgttccaaattggaacaccactcaacccttatctggggatattcttttgatttataagggattttgccgatttcggaaccaccatcaaacaggattttcgcttgctggggcaaaccagcgtggaccgcttgctgcaactctctcagggccaggcggtgaagggcaatcagctgttgcccgtctcactggtgaaaagaaaaaccaccctggcgcccaatacgcaaaccgcctctccccgcgcgttggccgattcattaatgcagctggcacgacaggtttcccgactggaaagcgggcatggggccatgcgcccctgataagaacggtttttggcccctttgccgttggagtcccacgttcctttaatagtggactgcttgttccaaagctggaacaacagctcaaccctgatctgcgggctgattcttttgatttataagggattttgccgatttcggaacccaccctcaaaacaggaattttcgcctggtggggcaaaaccagcgtggcccgctagctgcacttttctcagggccagacggtgaagggcaatgcagctgttgcgccgtctcactggtgaaaaaaaaaaccaccctggcgcccaatacgcaaaccgcctctccccgcgcgttggccgattcattaatgcagctggcacgacaggtttcccgactggaaagcgggcagtgagcgcaacgcaattaatggattttgccgatttcggaaccaccatcaaacaggattttcgcctgctggggcaaaccagcgtggaccgcttgctgcaactctctcagggccaggcgcccaacattcaaatggaagttctgggtctgacacccattggtctgaagatgcccatctctgaccttaatactgtggccaaggagtggaacatgctgaatgggattcaaaccaacaaggtagaagagggagcagaaatccttaaagctctcacctctcctgctggggtcgggggtgcagagaagaagggattttgccgatttcggaaccaccatcaaacaggattttcgcctgctggggcaaaccagcgtggaccgcttgctgcaactctctcagggccaggcggtgaagggcaatcagctgttgcccgtctcactggtgaaaagaaaaaccaccctggcgcccaatacgcaaaccgcctctccccgcgcgttggccgattcattaatgcagctggcacgacaggtttcccgactggaaagcgggcaatgtttagctgtgtccagagtttcttccttccggtgggttcgtggtctcgctgacttcaggagtgaagctgcagacctttgcatggactcttgttccaaactggaacaacactcaaccctatctcgggctattcttttgattaataagggattttgccgatttcggaaccaccatcaaacaggattttcgcctgctggggcaaaccagcgtggaccgcttgctgcaactctctcagggccaggcggtgaagggcaatcagctgttgcccgtctcactggtgaaaagaaaaaccaccctggcgcccaatacgcaaaccgcctctccccgcgcgttggccgattcattaatgcagctggcacgacaggtttcccgactggaaagcgggcagtgagcgcaacgcaattaatggttcggtttagtgcttattggctcctcgacctcaaacaacttaattgggtgatggttcatgtagtggcccatcgccctatcacacgatttatcgcctttgaccgttggagtccacgttctttaatagtggactcttgttccaagctggaacagcactcaaccctatctcgggctattcttttgatttataagggattaggccgatttcggaaccaccatcaaacaggattttcgcctgctggggcaaaccagcgtggaccgcttgctgcaactctctcagggccaggcggtgaagggcaatcagctgttgcccgtctcactggtgaaaagaaaaaccaccctggcgcccgatacgcaaaccgcctctccctggattttgccgatttcggaaccaccatcaaacaggattttcgcctgctggggcaaaccagcgtggaccgcttgctgcaactctctcagggccaggcggtgaagggcaatcagctgttgcccgtctcactggtgaaaagaaaaaccaccctggcgcccaatacgcaaaccgcctctccccgcgcgttggccgattcattaatgcagctggcacgacaggtttcccgactggaaagcgggcatgactcttgttccaaactggaacaacactcaaccctatctcgggctattcttttgatttataagggattttgccgatttcggaacccaccatcaaacaggattttcgctgctggggcaaaccagcgtggaccgcttgctgcaactctctcagggccaggcggtgaagggcaatcagctgttgcccgtctcactggtgaaaagaaaaaccaccctggcgcccaatacgcaaaccgcctctccccgcgcgttggccgattcattaatgcagctggcacgacaggaaacagctatgaccatgattacgaattcgagctcggtacccgcatgcgcagtgcccaggccgcactgaaggccacgcaggcccaggcggcggccgccaaggcggccatcgaggcggccaaggcccaggtcaccggctcggtctcggccgtgaccgcggccgcggccaccgtgcagcgcatcgatgccgagctcgacgacagcacgctgaccgccccgcgcgatgggcgcgtgcagttccgcctggcccagcccggcgagggattgtgccgatttcggaaccaccatcagtcaggatcttcgcctgctggggcaaaccagcgtggaccgcttgctgcaactctctcagggccaggcggtgaagggcaatcagctgttgcccgtctcattggtgaaaagaaaaaccaccctggcgcccaatacgcaaaccgcctctctccgcgcgttggccgattcattaatgcagctggcacgacaggtttcccgactggaaagcgggcagtgagcgcaacgcaattaatggattttgccgatttcggaaccaccatcaaacaggattttcgcctgctggggcaaaccagcgtggaccgcttgctgcaactctctcagggccaggcgggattttgccgatttcggaaccaccatcaaacaggattttcgcctgctggggcaaaccagcgtggaccgcttgctgcaactctctcagggccaggcggtgaagggcaatcagctgttgcccgtctcactggtgaaaagaaaaaccaccctggcgcccaatacgcaaaccgcctctccccgcgcgttggccgattcattaatgcagctggcacgacaggtttcccgactggaaagcgggcagaacctgtctgcctcctgctgcagttcatggagtctgggctctccccagctttgctccaagattgtagtgggcctggcagcagggagaagccaggcagtgggaatagacacttccaagcctgcaaggacagggagggccttcccaagctgcaagagtgcagggatgcctgggtctgcaacgacaattgggcagctgcagctgcacacaggataacagggctcctgcctgttccatggagcagcagcctgggtcttatagccacgatttggggattttgccgatttcggaaccaccatcaaacaggattttcgcctgctggggcaaaccagcgtggaccgcttgctgcaactctctcagggccaggcggtgaagggcaatcagctgttgcccgtctcactggtgaaaagaaaaaccaccctggcgcccaatacgcaaaccgcctctccccgcgcgttggccgattcattaatgcagctggcacgacaggtttcccgactggaaagcgggcagttctggacaatagatgtgagagagttgttgtgcgcaaccaccaggctatggccttaacagaattgcctgtgctttctgcgtcttatatctttcatctgcatgctgtgatgttatatagaaataagattttagcaacatcagccttagaaatcagaggggtcaaacccgaggcaattctacgggcaaaaggaggaaataagcccactcagaaacaaggaaaagggggttccacctcacaatacaaagaggctcgaaataatttgagggattttgccgatttcggaaccaccatcaaacaggattttcgcctgctggggcaaaccagcgtggaccgcttgctgcaactctctcagggccaggcggtgaagggcaatcagctgttgcccgtctcactggtgaaaagaaaaaccaccctggcgcccaatacgcaaaccgcctctccccgcgcgttggccgattcattaatgcagctggcacgacaggtttcccgactggaaagcgggcaccaatatagaaacaaaggaaaaaagatattcgaggctctccgggtagagcaccaacactatctgaaacgtcaacaaaagtggggattttgccgatttcggaaccaccatcaaacaggattttcgcctgctggggcaaaccagcgtggaccgcttgctgcaactctctcagggccaggcggtgaagggcaatcagctgttgcccgtctcactggtgaaaagaaaaaccaccctggcgcccaatacgcaaaccgcctctccccgcgcgttggccgattcattaatgcagctggcacgacaggtttcccgactggaaagcgggcagtgagcgcaacgcaattaatctggatcgcgggtccccggcgcagcactacatcgcgttatctaacccataaggctcgaaaacagccagcgacgctttcacagtgggctttaggtatttccacgcaagctcccaaaaaacaaaaatcatcccctcacccgccccacaaaactcagacaaattcaaaggagcccctgtgcccacatcattccatcccccccaggaatacccaagtccagacatctgagctacctcaaaagaattgtgccaggggattttcgcctgctggggcaaaccagcgtggaccgcttgctgcaactctctcagggccaggcggtgaagggcaatcagctgttgcccgtctcactggtgaaaagaaaaaccaccctggcgcccaatacgcaaaccgcctctccccgcgcgttggccgattcattaatgcagctggcacgacaggtttcccgactggaaagcgggcagtgagcgcaacgcaattaatatctcagaagagggcctggcagctgacacccgcaaagaggaagagcgagctggctgaggctggtgactccgagaggcttcaggaggacagacctggcatcctgcaaaacctgctgactgcagctgactgtggatgccatggagtaacccgactgcaggggcagatggcggggagcaaatcccaccctggccagcctgccagcctcctccagggagccactcagaaaagccctgtgggaatcccgtgggcaaaggaaacatgcacttggctagtctcagctcagcagaatgaagccaaggtagagaggtgggatgagctggaaaaggagaaacttgaaactcagtgcagctacaagagatgccgagaaagcaggcgtactaccgcacccggatatggaaattcgaggacgggttgagcaacgtgttggttatacaattgaacaaattaatcatatgcgtgatgtgtttggtactcttattgcgacgtgctgaagacgtatgtccaccggtgatcggggttgctgcccataaaggtggcgtttacaaaacctcagtttctgttcatcttgctcaggatctggctctgaaggggctacgtgttttgctcgtggaaggtaacgacccccagggaacagcctcaatgtatcacggatgggtggcggatcttcatattcatgcagaagacactctcctgcctttctatcttggggaaaaggacgatgtcacttatgcaataaagcccacttgctggccggggcttgacattattccttcctgtctggctctgcaccgtattgaaactgagttaatgggcaaatttgatgaaggtaaactgcccaccgatccacacctgatgctccgactggccattgaaactgttgctcatgactatgatgtcatagttattgacagcgcgcctaacctgggtatcggcacgattaatgtcgtatgtgctgctgatgtgctgattgttcccacgcctgctgagttgtttgactacacctccgcactgcagtttttcagatatgcttctgtgatctgctcaagaacgtgggggatctatagagccgcacggcaggtttcaacccagacgtggggtatagagcaaccaaaattgagaaaaggcatgtatgaagaagttcagaatactacagaaacacagtttggatatttggctcaggattttcatccttttaatcagagagaccggcagcattttacctctgccatagagatgtgtggctctttacacttgagagagatggaagaaatttctacgcagcaaagcattgaagagatgacttgggtgctgttaagagcattcagttttcaaagggacacagagcataagagtttgaaaaatttgcagcctgacaacaattctatagaaaagaaaatcccattttctgaggagaaattccagccagctcctgaaatttgtgtgagtaacaagaagccaaatgtgaatcgcatagacaatgaggaaaatttctatagggcatatcagaggtcttcccggcagcccctcccatcacaggcttggaggcataggaggaaaaagtggttttgtgggctgggcatagggttcccaagctgtgcgcagcatatggactcggtgccttgcatcccagttactctagccgtggctgaaaaaggccaatgtcagctcgggccctggcttcagagcgtgcaacccataaggcttggcagcttccatggggtgttgagcctgcaggagtttgagcagcagggcactgaaaaaacaccggcgttcggtcgaagagtatctggtgtcatagaaattgccgatgggagtcgccgtcgtaaagctgctgcactcaccgaaagtgattatcgtgttctggttggcgagctggatgatgagcagatggctgcattatccagattgggtagcgattatcgcccaacaagtgcatatgaacgtggtcagcgatacgcaagccgattgcagaatgaatttgctggaaatatttctgcgctggctgatgcggaaaatatttcacgtaagattattacccgctgtatcaacaccgccaaattgcctaaatcagttgttgctcttttttctcaccccggtgaactatctgcccggtcaggtgatgcacttcaaaaagcctttacagataaagaggaattacttaagcagcaggcatctaaccttcatgagcagaaaaaagctggggtgatatttgaagctgaagaagttatcactcttttaacttctgtgcttaaaggggatctactagagccgaacggcngatcagcggtcggggaccgcggtcccacttgtattgtcgatcagactatcagcgtgagactgcgattccatcaatgcctgtcaagggcaaaccgtgtatttttaccagagcttggtgcacacagagagttttattacaaaggatacatctttagtcaggaaagcaaagatcatatatactgccagagactcaagccccttctttacaagaacttgcaaatcctcagttttgtcgtgcacctccgaagcagagcagacaaaggccataaataccttgtattcgaagccaacacgggcacagaaaacgtataccaaggcgaagtatctttatttaacaaagcgtactacggcggcggcacgaacttcttctgtaaagaaagccagaagcttcagcagagcgctaaaaaacgcgatgctgagttagcgaacggcgccctcggtatcatagagttaaataatgattacacattgaaaaaagtaatgaagccgctgatcacttcaaacacggtaactgatgaaatcgagcggcgcgaatgttttcaaaatgaacggcaaatggtacttgttcactgattcacgcggttcaaaaatgacgatcgatggtattaactcaaacgatatttacatgcttggttatgtatcaaactctttaaccggcccttacaagccgctgaacaaaacagggcttgtgctgcaaatgggtcttgatccaaacgatgtgacattcacttactctcacttcgcagtgccgcaagccaaaggcaacaatgtggttatcacaagctacatgacaaacagaggcttcttcgaggataaaaaggcaacatttgcgccaagcttcttaatgaacatcaaaggcaataaaacattccgttgtcaaaaacagcatcctggacgactgacgggcagacatcccgcgaaaatcctgtttgatggtggttccgaaatcggcaaaatcccttataaatcaaaagaatag

SEQ ID NO: 5680 - DNA, 3107 bp, Homo sapiens
  SIMILAR (34)..(2991): 1001254mologous to Homo sapiens receptor protein-tyrosine kinase,accession number L36645,Smith-Waterman Score=5200.
aagcggcaggagcagcgttggcaccggcgaaccatggctgggattttctatttcgccctattttcgtgtctcttcgggatttgcgacgctgtcacaggttccagggtataccccgcgaatgaagttaccttattggattccagatctgttcagggagaacttgggtggatagcaagccctctggaaggagggtgggaggaagtgagtatcatggatgaaaaaaatacaccaatccgaacctaccaagtgtgcaatgtgatggaacccagccagaataactggctacgaactgattggatcacccgagaaggggctcagagggtgtatattgagattaaattcaccttgagggactgcaatagtcttccgggcgtcatggggacttgcaaggagacgtttaacctgtactactatgaatcagacaacgacaaagagcgtttcatcagagagaaccagtttgtcaaaattgacaccattgctgctgatgagagcttcacccaagtggacattggtgacagaatcatgaagctgaacaccgagatccgggatgtagggccattaagcaaaaaggggttttacctggcttttcaggatgtgggggcctgcatcgccctggtatcagtccgtgtgttctataaaaagtgtccactcacagtccgcaatctggcccagtttcctgacaccatcacaggggctgatacgtcttccctggtggaagttcgaggctcctgtgtcaacaactcagaagagaaagatgtgccaaaaatgtactgtggggcagatggtgaatggctggtacccattggcaactgcctatgcaacgctgggcatgaggagcggagcggagaatgccaagcttgcaaaattggatattacaaggctctctccacggatgccacctgtgccaagtgcccaccccacagctactctgtctgggaaggagccacctcgtgcacctgtgaccgaggctttttcagagctgacaacgatgctgcctctatgccctgcacccgtccaccatctgctcccctgaacttgatttcaaatgtcaacgagacatctgtgaacttggaatggagtagccctcagaatacaggtggccgccaggacatttcctataatgtggtatgcaagaaatgtggagctggtgaccccagcaagtgccgaccctgtggaagtggggtccactacaccccacagcagaatggcttgaagaccaccaaagtctccatcactgacctcctagctcataccaattacacctttgaaatctgggctgtgaatggagtgtccaaatataaccctaacccagaccaatcagtttctgtcactgtgaccaccaaccaagcagcaccatcatccattgctttggtccaggctaaagaagtcacaagatacagtgtggcactggcttggctggaaccagatcggcccaatggggtaatcctggaatatgaagtcaagtattatgagaaggatcagaatgagcgaagctatcgtatagttcggacagctgccaggaacacagatatcaaaggcctgaaccctctcacttcctatgttttccacgtgcgagccaggacagcagctggctatggagacttcagtgagcccttggaggttacaaccaacacagtgccttcccggatcattggagatggggctaactccacagtccttctggtctctgtctcgggcagtgtggtgctggtggtaattctcattgcagcttttgtcatcagccggagacggagtaaatacagtaaagccaaacaagaagcggatgaagagaaacatttgaatcaaggtgtaagaacatatgtggacccctttacgtacgaagatcccaaccaagcagtgcgagagtttgccaaagaaattgacgcatcctgcattaagattgaaaaagttataggagttggtgaatttggtgaggtatgcagtgggcgtctcaaagtgcctggcaagagagagatctgtgtggctatcaagactctgaaagctggttatacagacaaacagaggagagacttcctgagtgaggccagcatcatgggacagtttgaccatccgaacatcattcacttggaaggcgtggtcactaaatgtaaaccagtaatgatcataacagagtacatggagaatggctccttggatgcattcctcaggaaaaatgatggcagatttacagtcattcagctggtgggcatgcttcgtggcattgggtctgggatgaagtatttatctgatatgagctatgtgcatcgtgatctggccgcacggaacatcctggtgaacagcaacttggtctgcaaagtgtctgattttggcatgtcccgagtgcttgaggatgatccggaagcagcttacaccaccaggggtggcaagattcctatccggtggactgcgccagaagcaattgcctatcgtaaattcacatcagcaagtgatgtatggagctatggaatcgttatgtgggaagtgatgtcgtacggggagaggccctattgggatatgtccaatcaagatgtgattaaagccattgaggaaggctatcggttaccccctccaatggactgccccattgcgctccaccagctgatgctagactgctggcagaaggagaggagcgacaggcctaaatttgggcagattgtcaacatgttggacaaactcatccgcaaccccaacagcttgaagaggacagggacggagagctccagacctaacactgccttgttggatccaagctcccctgaattctctgctgtggtatcagtgggcgattggctccaggccattaaaatggaccggtataaggataacttcacagctgctggttataccacactagaggctgtggtgcacgtgaaccaggaggacctggcaagaattggtatcacagccatcacgcaccagaataagattttgagcagtgtccaggcaatgcgaacccaaatgcagcagatgcacggcagaatggttcccgtctgagccagtactgaataaactcaaaactcttgaaattagtttacctcatccatgcactttaattgaagaactgcactttttttacttcgtcttcgccctctgaaattaaagaaatg

SEQ ID NO: 5681 - DNA, 879 bp, Homo sapiens
  SIMILAR (10)..(123): 1001254mologous to Homo sapiens receptor protein-tyrosine kinase,accession number L36645,Smith-Waterman Score=171.
tcattcccagtgccttcccggatcattggagatggggctaactccacagtccttctggtctctgtctcgggcagtgtggtgctggtggtaattctcattgcagcttttgtcatcagccggaggtaagcactgaagccactcactgtgcagcccccgaccttcccagtgtttatgatggtttttttctcttccacacaaagctaaggcttttgattgcgtcataaacttggcatctgcatcccaagtttcctccttgttgctttgatcttcccacacccctaccaaagctgctagctgtaccctggtggcaggctgagaggtccggaaggacccagctaattgtaggaaacaaagctgaagagcaagccagtgggagatttctagatgctttaagctgccaggtgttacgtttatccctctcttaagcctggactcatcccatcgtctgcccagaggctccagaggagtagtcattgatatgtgccccacatctgggccttctttgtctttgatgtgtaagaatctgcctcttccctgatcggcatccccatataccatcaactgtttcacaagatggggaggcttggaaagtcgaagggactgggccaactggtgtccttcataccctctgtgccccagtgccccaacagctccaggagggagaggtgcaagtgccaggacaaagctttttacaatgacttctgcctcttggcccagatatctgtcactgggctcatccattttgacactggtcattaactctgagaaccgaaaggtatctgtttgtgttgtgaactgctgtgttttgaaaaacatctgtgtgtccttggaactctcgactcccggctcgccctcctccaccctggtccaggtggccat

SEQ ID NO: 5682 - DNA, 963 bp, Homo sapiens
  SIMILAR (64)..(657): 451254mologous to Homo sapiens unknown protein,accession number M22333,Smith-Waterman Score=364.
atgggcaaagacttcatgactaaaacaccaacaccaatggcaacaaaagccaaaattgacaaatgggatctaaataaactaaagagcttctgtacagcaaaagatactatcgtcagagtgaacaggcaacctatagaatgggagaaaatttttgcaatctatccatctgacaaacggctaatagccacaatctacaaggaacttaaacaaacttacaagaaaaaaataaacaacctcatcaaaaagcaaacagggtgtggagcagacctccagcaaactccagcagacctgcagcagacgggactgagtgttagaaagaaaactgataaacagaaaggaatagcatcaacatcaacaaaaaggacgtccacacagaaaccccatccaaagatcaccaacatgaagaccaaagaaatacaaactaccataaaagaatactatgaacacctctatacaaataaactagaaaatctacaagaaatggataaattcctggacacatacaccttcccaggactaaaccaggaagaagtccaatccctgaatagaccaataacaagttctgaaattgaggcagtaattaatagcctaccaaccaaaaaaagtccaggaccagacagattcacagccgaattctaccagagggacatggatgaagctggaaaccatcattctcagcaaactaacacagggacagaaaaccaaacactgcatattctcactcataagtgggagttgaataatgagaacacatggacacagggaggggaatatcatactccagggcctgttagagtttgggggaatagaggagggatagcattaggagaaatacctaatgaatgcagctcctcaccagcaacagaccaaagctggatggagaatgactttgacgagttgaaagaagaaggcttcagacgattggtaataacaaacttctccgagctaaaggaggatgtttga

SEQ ID NO: 5683 - DNA, 1281 bp, Homo sapiens
  SIMILAR (797)..(889): 931254mologous to Homo sapiens putative p150,accession number U93574,Smith-Waterman Score=148.
atggataaattcctcgacacatacactctcccaagactaaaccaggaagaagttgaatctctgaatacaccaataacaggatctgaaattgaggcaataattaatagcttaccaaccaaaaaaagtccgggactagatggattcacagccaaattctaccagagggcaatcaggcaggagaaggaaataaagggcattcaattaggaaaagaggaagtcaagttgtccctgtttgcagatgacatgattgtatatctagaaaacgccatcatctcagcccaaaatctccttaagctgataagcaacttcagcaaagtctcaggatacaaaatcaatgtgcaaaaatcacaagcattcttacacaccaataacagacaaacagagagccaaatcatgagtgaactcccattcacaattgcttcaaagagaataaaatacctaggaatccaacttataagggacgtgaaggacctcttcaaggaaaactacaaaccactgctcaatgaaataaaagaggatacaaacaaatggaagaacattccatgctcatgggtaggaagaatcaatatcgtaaaaatggccatactgcccaaggtaatttatagattcaatgccatccccatcaagctaccaatgactttcttcacagaattggaaaaaacgactttcaagttcatatggaaccaaaaaagagcccgcatcgccaagtcaatcctaagccaaaagaacaaagctggaggcatcacgctacctgacttcaaactatactacaaggctacagtaaccaaaacagcatgggacatggatgaagctggaaaccatcattctcagcaaactatcacaaggacaaaaaaccaaacaccgcatgttctcactcataggtgggaattgaacaatgagaacacatggacacaggaaggggaacatcacacaccggggcttgttgtgcggaggagtccagaccctgagcagaacttcaaggctgtcaggtgtttggaccttcctgatcttcaagctcgtttttggctgtcctcacatttcatttcaaaccagccttccttcagtcccttagatgagataagccacgctctttcctgccttggggacttggcacaagccatgaaaaataactcccaagaaacagatcaggcaatcaccaaacctaacacagaatacaggacagcagtgaagccttcagttgtgggagcacttccagatatcaactcatttctaaagcttggaggcctgcatcgaatcactaatggctgcctccttgattga

SEQ ID NO: 5684 - DNA, 937 bp, Homo sapiens
  SIMILAR (5)..(658): 1001254mologous to Escherichia coli Potassium-transporting ATPase (EC 3.6.1.36), b chain (ATP phosphohydrolase (potassium- transporting), B chain),accession number D90708,Smith-Waterman Score=1074.
ggttattaaaacggtgatgattaccggcgataaccgtctgactgccgccgcgattgctgcggaagcgggtgtcgatgattttctcgccgaagcgacaccggaggccaagctggcattgatccgtcagtatcaggcggaaggtcgtttggtagcgatgaccggcgacggcaccaacgatgctccggcgctggcgcaggcagatgtcgcggtggcgatgaactccggcacccaggcggcgaaagaggcgggcaatatggtcgatctcgactctaacccgaccaagttgatcgaggtggtgcacattggcaaacagatgctgatgacccgtggctcgctgaccaccttcagcattgccaacgatgtggcgaaatacttcgccattattccggcggcattcgcggcaacgtatccgcagttaaatgcgctgaacatcatgtgcctgcattcgcccgactccgcaatcctcagtgcggtgattttcaacgccttgattatcgtctttttgattcccctggcgttaaaaggcgtgagttataaaccgcttaccgcttctgccatgttgcgccgtaacttatggatttacggtctgggtgggctgctggtgccgtttatcggtatcaaagtcattgatttactgctgaccgtttgcggtctggtggacatggatgaagctggaaaccatcattctcagcaaactatcacaagatcagaaaatcaaacaacgcacgttctcactcataagtgggagttgaacaacgagaacacatggacacagggaggggaacatcacacaccggggcctgtcaaggccaaatacagcaaggatcctctgtgcttcaaaagcacacctcgggcttcccctcaggtcttccttgccttaggcaaaaagggccagagaagtgagaaccgtctttgcattttgcccatcagcaagtag

SEQ ID NO: 5685 - DNA, 909 bp, Homo sapiens
  SIMILAR (404)..(631): 821254mologous to Homo sapiens putative p150,accession number U93564,Smith-Waterman Score=345.
atgagtgaactcccattcacaattgctacaaagagaataaaatacctaggaatacaacttaaaagtgatgtgaaggacctcttcaaggagaactacaaaccactgctcaatgaaataagagaggacacatacaaatggaaaaacactccatgctcatggataggaagaatcaatatcatgaatatggccatactgcccaaagtaatttatggattcaatgctatcctcatcaagctaccattgactttcttcaccgaattagaaaaaactactttaaagttcacacagagcctaaaaagagcccatatagccaagacaatcctaagtaaaaagaacaaagctggaggcatcatgctacctgacttcaaactatactacaaggctacagtaaccaaaacagcatgcactattcacaatagcaaagacttggaaccaaccgaaatgcccagcaatgatacgctggataaagaaaatgtggcatatatacaccatggaatactatgtagccacagcaaaggacgagttcatatcctttgcagggacatggatgaagctggaaaccatcattctcggcaaactaacacaggaacagaaaaccaaacactgcatgttctcactcataagtgggagttgaacgatgagaacacatggacacagggaggggaacatcacatatcggggcctgtcagaaccaacaacaaaaaccacatgattatctcaataggtgcagaaaaggcctttgacaaaattcaacagcctttcatgctaaaaactctcaatcaactaggtattgatggaacatacctcaaaataataagagatatttttgacagacccatagccaatatcttactgaatgggcaaaaacgggaagcatcccctttgaaaactggcacaagacaaggatga

SEQ ID NO: 5686 - DNA, 1983 bp, Homo sapiens
  SIMILAR (1594)..(1773): 1001254mologous to Homo sapiens bA16L21.4 (novel protein (supported by GENSCAN)),accession number AL135787,Smith-Waterman Score=315.
atgggagatggcaccagtgacttcgaccctatcggagacattgggattcgtcaatctaattactcatgtggagggtgcccaaggataccttatgtttggagagtcactggaagggctcacgggacccagactatagttgtattcatggctaaggtttattacggcaatgtaatgaggagggagaaagactcaggtggagcctggggaaatccatgggcaggcatcctactgccccctccctccacgaggaattgcacagtgcactcttccttcagcaatgaaaatatatttccccagcatacaagttcctgtgtagttgtacataatcaatatattggagcagatttcccctggagtaatttctcatttgtggtggaatacaattatgtggaagactcttgttggactaaacactgcaaagagttgaatattccttacatggcctttaaagtgattcttccagacacagttttagaaagaagcaccttgctggatagatttggaggttttcttttggaaattcagattccatatgtgttttttgcatctgaaggacttcttaatactccagacatacttcagctgctagaatccaaggacatggatgaagctggaaaccatcattctgagcaaactgtcacaaggacagaaaaccaaacactgcatgttctcactcataggtgggaattgaacaatgagaacacttggacacaggatggggaacatcacacaccggggcctgtcgtggggtggcgggagcttataattgccccaggagtagaagcaactgccttgataattcgacaaattgctgaccacagtttaatgacctcaaagagagatcctcatgaatggttggataaatcctggcttaaagtttcaccatctgaggaaaataggaatcagattagtaccttgtcttctcaaagttcagcttctgatttagactctgtcattcaagaacataatgaatattatcagtatttaggattaggagagacagtgcaggaagacaaaaccaccattttgaatgacaactcttccattatggaactaaaagaaatctcaagttttttaccacctgtgacttcatacaatcagaccagctactggaaagactccagctgtaaatctaatatagggcagaatactccttttctaattaatatagaatcaaggagaccggcttataactcctttctaaaccacagtgattcagagtcagatgtcttttctttgggtctaacacaaatgaactgtgaaactataaaatcaccaactgacactcagaagagagtgtcagttgtcccccgttttataaattctcagaaaaggagaacacatgaagcaaaaggtttcataaataaagatgtatcggaccctatcttttcactagagggcactcaatctcctcttcattggaactttaagaaaaatatatgggaacaagagaatcacccgttcaacttacaatatggtgcacagcagactgcatgtaacaaattgtactctcagaaaggtaatttattcactgatcagcaaaaatgtctatcagatgagtctgaaggcctcacatgtgaaagttcaaaagatgagactttctggagagaattaccatctgtccccagtttggatttatttcgtgcttctgattctaatgcaaatcaaaaagaattcaacagcctttatttctaccaaagagctggaaaaagtttaggacagaaaaggcaccatgaatcttcatttaactcaggagacaaggaatcattaacagaagagaaaacagaggcacaagagaagatgaccacagaagacagaggcagaggctggggttatgctaccacaaaccggagaatgccaaggattgctggcaaccaccaggagcctggggagaggcgtggaacccctcctccctcagaggccccagaaggatccaaccctgctaataccttgattttagacttcccacccccagaactgtga

SEQ ID NO: 5687 - DNA, 588 bp, Homo sapiens
  SIMILAR (325)..(486): 921254mologous to Homo sapiens guanylate cyclase activating protein 3,accession number AF110001,Smith-Waterman Score=265.
atggccagacactaccttggcattgtggaaattgataaggatgacgtcacgtccaaagtgacccaaatggagggaacaccctttatacttcaaaggtctctaactactactcttttttatcatgtgacaagaaagaagaggacaaaatctgaagaaattcagaagaagaaaggcattgaagaagttcagtgggacatggatgaagctggaaaccatcattctcagcaaactaacacaggaacagaaaaccaaacacctcatgttctcactcataagtgggagttgaacaatgagaacacatggacacagggaggggcctgtcggcgggatggatttgttgactttttggagtttattgctgctgtaaatctaatcatgcaagaaaaaatggagcaaaaattaaaatggtattttaagctgtatgatgctgatggaaatggttctattgacaaaaatgaactactggacatgttcatgattttaagaaattctaagcgggaaagggaccagctggaatcaagatgcatgattcatgcctacagaattgcaggagagagagtctacacctctcaggccagggaacactga

SEQ ID NO: 5688 - DNA, 600 bp, Homo sapiens
  SIMILAR (379)..(462): 681254mologous to Homo sapiens PRO1546,accession number AF116638,Smith-Waterman Score=113.
atggatgagaatctgccatctgagctgaaagccaatccaacacagacttcttatatgcccagcattaagagctatagaggggcaggtcaattaaaaatagctcaagaaagtggagtgtctgttcagggccattggtccatgaagagggaaggcttccagaaacttgaaagaacacataaaaattttcaaatgaagtttagcagatgggggatagctgtggggaagcttaatgagcagcatgattgtcataaggaggaggcagttactggaaccagttgtatgaaagagctgaaggacaagagctacagaaggatacagcaacacagggacatggatgaagctggaaaccatcattctcagcaaactatcagaagaacagaaaaccgaacactgcatgctctcactcataagtgggaattgaacaatgagaacacatggacacaggaagatccatctactcctgtcaactctactgccactaatcgaatccaagtcacatcatctggactttggcaaaaggcttcatcagtctccccacttctacccgtgcccacccttccctggtccagattccacataatagctcaagggatcttttaa

SEQ ID NO: 5689 - DNA, 858 bp, Homo sapiens
  SIMILAR (411)..(286): 901254mologous to Homo sapiens Human secreted protein, SEQ ID NO: 7217,accession number G03136,Smith-Waterman Score=194.
atgacctcttacaatgaacaaaacaagaaaccagtgactgaccctaatgagatggcaatacatgaggactctaaccaagaattcaaaatagcggttgtaaatgaaactcagagatctccaagaagctcccccactgagcaccttatgacccccccacccctgcccaccagagaacaacaaccccctttgactgtaattttccactacctacccaaatcctataaaacggccccacccctgtctcctttcccagactctcttttcggactcagccagcctgcacccagggacatggatgaagctggaaaccatcattctcagcaaactaacacaggaacagaaaaccaaacactgcatgttctcgctcacaagtgggagttgaacaatgagaacacatggacacagggaggggaccgtcatacaccggggccttcttggacaattttcccaacaacttataaacaagtcagaattcagcaatacggtgtgcagagagaaatcaggcagggtcttgcaagtgaatatggagagtccattatgaatgattcaggacgcacttcaggaccaaactaccccaaagggtccaatcactgttttcctctagctcttctatttggaccaccttctaaggtcttctcacaaagtggcttcttatctcagcacagaaagcagaagcagaggttctattactgtactttttataagatgttcagaaccatagctgtcactgtggtgctactcttactgttactgttaccggtggcagagacccgaatcaccctgagtaaccagcggcagattcgtaccagtcggcagcaacttaaattcttgccttctcggaagaaagaatttgactga

SEQ ID NO: 5690 - DNA, 696 bp, Homo sapiens
  SIMILAR (342)..(187): 811254mologous to Homo sapiens Human secreted protein, SEQ ID NO: 7217,accession number G03136,Smith-Waterman Score=215.
atgcaaagccttctggaaatccacaagctgaagatgcttgcacaatggagaacaattgaaggagtgagtctgggcagtgagcagattggaggctatttcattattagcaatgtgctggaagagaactctagaacagaagttgataaaaattcaggagcttttattgaattaaagccacatttgcctgaagaagtcagcaaagtcactgactggaacatggatgaagctggaaaccatcattctcagcaaactaacacaggaacagaaaaccaaacactgcatgttctcactgataagtgggagttgaacaatgagaacacatggacacagggaggggaacatcacacactgggcctgtcatgggatgggggaagggaaatggatgaagctggaagccatcatcctcagcaaactaagacaggaacagaaaagcaaacactgcatgttttcaacactcacaagtgggagttgaacaatgagaacacatggacacaggaaaggtgtgaagcatttaatatgggaattatgaacacacttcgacatgtgaaagaatggagatccagaaagccaccactgaacatctcaacttgtaaagctgaagtgggagtttcctcagattcacatggaagatgctacaattctcaaaaatctctagaagtttctatcaagtactcaaacatcaacagaaaatcatga

SEQ ID NO: 5691 - DNA, 2466 bp, Homo sapiens
  SIMILAR (937)..(1248): 991254mologous to Cloning vector pSacBII SacB,accession number U09128,Smith-Waterman Score=535.
  misc_feature (1)...(2466): n = a,t,c or g
atgacccttacaagctccgggagaaagtcccctctccgactccctcccggtgcattggtggaggccctattcggggtctgtgagatctccgcggcggtttcccactcagatcctagacttgtggggatcagaaagcgtgggtcgccggactcgttcagcgagcggaacagggacatggatgaagctggaaaccatcattctcagcaaactaacacaagaacagaaaaccaaacactgcatgttctcactcatatgtgggagttgaataatgagaacacatggacacaggggtggcggcatcacacaccgggacctataggaagnagatcccctactttacttatgcatgtgcactacatcaaagttatatcctggagagaactcttgttgatttggctccgagctgccaatgcatctatcaaccccggagttgagcagtcaccctccggggatccaaagacagtcacgggcttccctttcctgcggctggaggccgcagactgggtggaagaggcatctgtccccaagggcgtgcacattgccctctccagccaagagcagcgtgctggggaccctcgtgatttggaagcaccttctaacttagttatttctgagcgaacccatcgttcttttagagtgagctggacaccaccttctgacagtgtggatcgatataaggtggaatactatccagtttctggagggaaacgtcaagaagtcgtgcgaacacctggggtcccggatctccgcttgcctgccatcatcccccaggctgcttggctgctggctcatctgcccgcaccgtccgccccgccgactgagctccccacaaagcacacagaggcgcagagccagcgctgttggagtcttttattgtgttctgtcaccgaggtcgcagccccgagccaggtagtaaaagaagctccaccttctttccacacgggaacagaaaacggataccaaggcgaagaatctttatttaacaaagcgtactacggcggcggcacgaacttcttccgtaaagaaagccagaagcttcagcagagcgctaaaaaacgcgatgctgagttagcgaacggcgccctcggtatcatagagttaaataatgattacacattgaaaaaagtaatgaagccgctgatcacttcaaacacggtaactgatgaaatcgagcgcgcgaatgttttcaaaatgaacggcaaatggtacttgttcactgattcacgcggttcaaaaatgacgatcgatgagaataaaatacctaggaatccaacttacaagggacgtgaaggacctcttcaaggagaactacaaaccactgctcaaggaaataaaagaggatacaaacaaatggaagaacattccatgctcatggataggaagaatcaatatcgtgaaaatggccttactgcccaagcttccacaacctccaccctcaggcatataaggctataccgcaccctgcttcccttgggaaaacctgatataatcaggacaataacaatgctggtaaactcttcaaagccaacaggaacccagctttgggttgtcagcagccagtatgttcaaagacagatggcttcagattctaagggaatgaacacctgtagtatggtcaaagccaggaaatattcaaagcctctgctggtgacacccaggcaaacagcatctggagtggacctccagcaaactccaacagatcttcagctgagggtcccgactgttagaaggaaaactgacaaacagaaaggaaatccacaccaaaaccccatccatatgtcaccatcatcaaaaaccaaaggacacagttcctcaccagcaacggaacaaagctggatggataatgactttgacgagctgagagaagaaggcttcagacgatcaaattactctgagctatgggaggacattcaaaccaaaggcaaagttgaaaactttgaaaaaaatttagaagaatgtataactagaataaccaatacagagaagtgcttaaaggagctgatggagctgaaaaccaaggctcgagaactacgtgaagaatgcagaagcctcaggagccgatgcaatcaactggaagaaagggtatcagtgatggaagatgaaatgaataaaatgaaggacatggatgaagctggaaaccatcattctcagcaaactatcacaaggacaaaaaaccaaacactgcatgttctcacttataggtgggaattgaacaatgagaacacttggacacaggaaggggaacatcacacactggggcctgttgtgggacttggaaaattgccttttttcatggctccaattctggtggctccaagtcagaagtctgcgtgtgaggaccactgccatggctgtgcttatggatggaaaaatacacccatgaaggaacgcttgctgccaatgaagtttaaaaaatttattgttcctcctttaacctggactttcggacttgaaagccctgtttag

SEQ ID NO: 5692 - DNA, 873 bp, Homo sapiens
  SIMILAR (544)..(870): 991254mologous to Homo sapiens hypothetical protein,accession number AL136759,Smith-Waterman Score=585.
atggatgaagctggaaatcatcattctcagcaaactatcacaaggacagaaaaccaaacaatgcatgttctcactcataagtgggagttgaacaatgagaacgtatggacacaggtgtacaaggaaagctctccacataaggcagctgctgcccagggtgccggcaagaaaaaaggctttgtgaattactatggaccacagagatttgggaagggaaggaaagttcacacagaccaaattggactagctttgctgaagaatgaaatggatgctaaaggcacactttcattgatgcctgaattcaaagtgcgtgagagagcattgttggaggcattgcaccgctttggcatgaccgaggaaggttgtatccaggcatggttctctttaccccattccatgcgcatattctatgttcacgcatataccagcaaaatttggaatgaggcagtatcttacagacttgaaacctatggagcaagagtagtgcagggtgatttggtctgtttggatgaagacattgatgacgagaatttcccaaatagtaaagtggttcttccagtacttggatacaatattcagtacccgaagaacaaagtagggcagtggtaccatgacatacttagcagagatggactacagacatgtaggtttaaagtacctactctgaaactgaatataccaggttgctatagacagattttgaaacatccctgtaatctctcataccaactaatggaagatcatgacattgatgtcaaaacgaaaggttcccacattgatgaaacagctttgtctcttttgatctcttttgatcttgatgcttcatgctatgctaccgtttgtctgaaggaaataatgaagcatgacgtttaa

SEQ ID NO: 5693 - DNA, 716 bp, Homo sapiens
  SIMILAR (396)..(494): 931254mologous to Homo sapiens PRO1546,accession number AF116638,Smith-Waterman Score=182.
ttttgttgtaaaactgtaaaataagcaaggccaaatatttattgtttggcaacacatagagatatatagagttttacatgtaaaattacctataaatgtcaacagcacattgacatggtaaatacgaagttcaaaatgggatatccctggcatggaatagagagctgggatggcggagggccacacgggaagctgcaatagaatttttgatgtttgcttcattctctaggtgatgtgttcactggtgttcatcttatcatgtttttaaattgacaagcatgttacatatacaccacagaatactatgcagccataaaaaatgatgagttcatgtcctttgtagggacatggatgaagctggaaaccatcattctcagcaaactgtcacaaggacaaaaaaccaaacaccgcatgttctcactcataggtgggagttgaacaatgagaacacatggacacaggaaggggaacatcacacaccggggcctgttatgcttgattctgctcctcctacccttggacatcagactccaggttcttcagcctttggactctgggacttgcaccagaggcttaggcttcctaggccacagactaaaggctccactgtcggcttcccgggttctgaggctttcaaacttggactgggccactactggctttcctttttccccagcttgcagacggcctacagagggactttgccttttaatcat

SEQ ID NO: 5694 - DNA, 2283 bp, Homo sapiens
  SIMILAR (130)..(447): 561254mologous to Homo sapiens Human secreted protein, SEQ ID NO: 6833,accession number G02752,Smith-Waterman Score=272.
atataataataataaataaataaataaataattaaaaaaatttaaaaacaaccctctttaaaaaaaaaaaaaagaaataccatttgatccagcaataccattactgggtatatacccaaaggatttataaatcattctactataaagacacatgcacacgtatgtttactgcagtactattcacaataacaaagactgggaaccaaccccaaatgtcccatccaatggatagacctggattaagaaaatgtggccccttatacacccatggaatacctatgcagccataaaagaaggatcagttcatgtccctttgcagggacatggatgaagctggaagccatcatcctcagcaaactaacacaggaacagaaaaaccaaacactgcatgttctcactcataggtgggagttgaacaatgagaacacatggacacagggtggggaatatcacacactggggcctgttgacggcttccagaagaaagaagaggcagcaattggtgctattctgcagcctctgctggtgatacagacagtgttgggagtggacctccagcaaactctagcagacctgcagcagaggggcctgttagaagaaaaactaacaaacagaaaaaaaatagcacatacagtcagagaccacatccaaagggaacacaactcctctccagcaagggaacaaaactggatggagaatacgtttgatgaattgacacaagtaggcttcagaaggtgggtaataaactcctctgagctaaaggagcatgacctaacccaatgcaagaaaggaacatggatgatgctggaaaccatcattttcagcaaactaacacaagaacagaaaaaccaaacactgcatgttctcactcataagtgggagttgaacaatgagaacacatggacacagggaggggaacatcacacactgggtcctgtctggaggatgtttcaaatctatgtagtggccgaaagaatgttagacaagattccaagtttggcttttggactgttggacttacgccagtggtttgccaggggctgttggtcatttggccatagactgaaggctgcacggatcacagctcctcgcttagcaagggaacaaaactggatggagaatgagtttgacaaattgacagaagtggtcttcagaaggtgggtaataacaaagtccaagctaaaggagcatgctctaacccaatgcaaggaagataagaaccttgaaaaaaaggaactggccacacaacagaagatgagcagcaggacagccagtgaagcttcatctgtatttacagccactccccattgctaccattactacctaagctccgcctcttatcacatcagtggcagcattagattccctgtactggaaaaaatcagattacacatgggcttggagaataagtgcaaggttttattgagtggtggaagtagctctcagcagatgtatggggacttagaaggcggatggaatgggaaggtggtctttccctggagttgggctgttcaggagccagcctctcctccaaccacccttggccaaatttccctcactgtctgttgttccaccgtcaatggtctgccagcatctgttgatgtgttcttctgcagggaggcattgcctcgaaacctccaaaagtttcctgctaaagacctaggctgcatcttactccagtacatagacaaccttctgctaggatactccacagcagtcgggtgtgcaagaaggatggatgccttgcttcgacacctggaggactgtgggtataaggtgtccaagaagaaagctcagatctgcagacagcagacagagggagaacaaacaataagagaaagatggataaagttatcagatggaagaatagctgtgccacagctgctaggagctgcagttgtgcttgctgtacataaaactatccatttaggccaagaatcacttgaaaaactgttaggccagtatttctacatctcacacttgccagctcttgctaaaacagtagcacagcaatgtgttacctgtcaacaacgccatgcaaagcaaggcccctctgttcctcctggcatacaagcctatagagtggcttcttttgaaaatcttcaagtagacttcacagagatgcctaaatgtggagatcaaggactagaacgtggctccactgtggccttggtagaagggaccccagatcattatcctgaccactcccacagctataaaggtagaaggaatcccaaactagattcacacagctgcgtgaagcctgcaaccgctaagacctag

SEQ ID NO: 5695 - DNA, 872 bp, Homo sapiens
  SIMILAR (3)..(872): 1001254mologous to Homo sapiens HSPC089,accession number AF161352,Smith-Waterman Score=1448.
gaaagagatacagggatgctgtggaagagaaattggcaaagcttcagaagcataattcagaactggaaacacagaaagaacaaatacagctgaagcttcaagagaagactgaagagttaaaagaaaaaatggacaacctcaccaagcagctctttgatgatgtacaaaaggaagaacggcaaagaatgcttcttgaaaaaagttttgaactgaaaacacaagactatgagaagcagattcagtctttgaaagaagaaattaaagctctcaaggatgagaagatgcaactccaacacctggtggagggggagcacgtcacttctgatggcttgaaggcggaagtggcccgcctgagcaagcaggtcaagacaatctctgagttcgaaaaagagatagaactacttcaggcacagaagatagatgtggagaaacatgtgcagtcacaaaaacgggaaatgagagaaaagatgtcagagatcaccaaacaacttctcgaaagctatgacattgaagatgtaagaagcaggctctctgtggaagatctggaacatttaaatgaggatggagaactttggtttgcttatgaaggactaaagaaagcaacacgtgttttggagagccatttccagtctcagaaggattgctatgaaaaggagattgaagctttgaacttcaaagtggtgcatctcagtcaagaaatcaaccacctgcagaagttattcagagaagaaaatgacatcaatgaaagcatccgtcatgaagttaccaggctaacatcagagaacatgatgatcccagactttaaacagcaaattccagaattggagaaacagaagcaagatcttgaaatccgcctgaatgaacaagctgag

SEQ ID NO: 5696 - DNA, 1474 bp, Homo sapiens
  SIMILAR (64)..(1161): 981254mologous to Homo sapiens Human cell cycle related protein CCRP-1,accession number Y31732,Smith-Waterman Score=1910.
tccaagctgaattccggggacggctgctggagcggcgcccgccgcggctcagcgcattcccgctctccgcttccctctccgctgcgtccccgcgcgaagatggcaaccgaggggctgcacgagaacgagacgctggcgtcgctgaagagcgaggccgagagcctcaagggcaagctggaggaggagcgagccaagctgcacgatgtggagctgcaccaggtggcggagcgggtggaggccctggggcagtttgtcatgaagaccagaaggaccctcaaaggccacgggaacaaagtcctgtgcatggactggtgcaaagataagaggaggatcgtgagctcgtcacaggatgggaaggtgatcgtgtgggattccttcaccacaaacaaggagcacgcggtcaccatgccctgcacgtgggtgatggcatgtgcttatgccccatcgggatgtgccattgcttgtggtggtttggataataagtgttctgtgtaccccttgacgtttgacaaaaatgaaaacatggctgccaaaaagaagtctgttgctatgcacaccaactacctgtcggcctgcagcttcaccaactctgacatgcagatcctgacagcgagcggcgatggcacatgtgccctgtgggacgtggagagcgggcagctgctgcagagcttccacggacatggggctgacgtcctctgcttggacctggccccctcagaaactggaaacaccttcgtgtctgggggatgtgacaagaaagccatggtgtgggacatgcgctccggccagtgcgtgcaggcctttgaaacacatgaatccgacatcaacagtgtccggtactaccccagtggagatgcctttgcttcagggtcagatgacgctacgtgtcgcctctatgacctgcgggcagatagggagggttgccatctttttcccaaagaaagcatcatatttggagcatccagcgtggacttctccctcagtggtcgcctgctgtttgctggatacaatgattacactatcaacgtctgggatgttctcaaagggtcccgggtctccatcctgtttggacatgaaaaccgcgttagcactctacgagtttcccccgatgggactgctttctgctctggatcatgggatcataccctcagagtctgggcctaatcatcttctgacagtgcactcatgtatacctgagaatttgaaatcttcacatgtaaatagatattacttctagaggagcttagagtttattgcagtgtagcttaggggagcaacccatggctcacaggtcactaagcgtctccaatatgactattaaaactgtcacctctggaaatacactagtgtgagccttcagcactgcgagaataccttcaagtacagtatttttcttttggaacactttttaaaatgtatctgtttttaaggttattctaaattatagtagcctcaactcattctgtcaccagta

SEQ ID NO: 5697 - DNA, 2711 bp, Homo sapiens
  SIMILAR (282)..(761): 791254mologous to Homo sapiens Human cell cycle related protein CCRP-1,accession number Y31732,Smith-Waterman Score=610.
gcgcgaagatggcaaccgaggggctgcacgagaacgagacgctggcgtcgctgaagagcgaggccgagagcctcaagggcaagctggaggaggagcgagccaagctgcacgatgtggagctgcaccaggtggcggagcgggtggaggccctggggcagtttgtcatgaagaccagaaggaccctcaaaggccacgggaacaaagtcctgtgcatggactggtgcaaagataagaggaggatcgtgagctcgtcacaggatgggaaggtgatcgtgtgggattccttcaccacaaacaagatcctgacagcgagcggcgatggcacatgtgccctgtgggacgtggagagcgggcagctgctgcagagcttccacggacatggggctgacgtcctctgcttggacctggccccctcagaaactggaaacaccttcgtgtctgggggatgtgacaagaaagccatggtgtgggacatgcgctccggccagtgcgtgcaggcctttgaaacacatgaatctgacatcaacagtgtccggtactaccccagtggagatgcctttgcttcagggtcagatgacgctacgtgtccgcctctaatgacctgcgggcagataggggaggttgccatctattccaaagaaagcatcatatttggaagcatccagcgttggacttctccctcagtggtcgccctgctgtttgctggatacaatgattacactaatcaacgtctggggatgttctcaaagggtccccgggtcttccatccttgtttggacatgaaaaccgcgttagcactctacgagtttcccccgatgggactgctttctgctctggatcatgggatcataccctcagagtctgggcctaatcatcttctgacagtgcactcatgtatacctgagaatttgaaatcttcacatgtaaatagatattacttctagaggagcttagagtttattgcagtgtagcttaggggagcaacccatggctcacaggtcactaagcgtctccaatatgactattaaaactgtcacctctggaaatacactagtgtgagccttcagcactgcgagaataccttcaagtacagtatttttcttttggaacactttttaaaatgtatctgtttttaaggttattctaaattatagtagcctcaactcattctgtcaccagtagaattcagcagttaatatattccatattatttctttgaatcaattcattttcagagcactttaaagtctgatatttctcgatgtgcactgtgatgcctggaaccttcctctggaagtgctgattttatggactgaggactggtgactggtctgtgatagaagcaaattccaattccaaatgtaattagacaaaaatcatttttttagaatgtgtttttattgtaaaagtatctttttcagcttcctgttctattgtcttttttcagatacaacatttttgtctatggtgaactgctgtaaatgacgcagagaaatgcctaaaaaggacaggtggtttgactcatggatgatgatgatgtcactgtgccacttggacagggcgttttctctgaattgaagggaaagccaatggtgtttgtaaacaaatgcttctgagagcaaagaaaagtcttctgtgtgggaacacaagatagtaaacttatttaaaaacctattagtagaattagtggaaacacttaggttaaagtgaatcttgtccatataaattatattcatggccgggcgcggtggctcacgcttgtaatcccagcactttgggaggccgaggcgggcggatcacgaggtcaggagttcgagaccacggtgaaaccctgtctctactaaaaaatacaaaaaattagccgggcgtggtggcgggcgcctgtagtcccagctactcggagaggctgaggcaggagaatggcgtgaacccgggaggtggagcttgcagtgagccgaggtcgagccactgcagcctgggtgacaaagcgagactccgtctcaaaaaaaaaaaaaaaaattatattcatatgtattgcattgcaattataattacatatgcagattgattgatagtcatgaataataacgtctgctcctcttacatagaaagaaaaacgatattaaaagaagatcttctctttatttgagactcagaattccttctagaagaaggaagtgctttttgttataggatcccttcttttcctttttttgtttttttgtaagatgtagatgcttattctttgctttagaaaacttctcacttaaaaagatggcatgcacctaggggaataaaaggtcacctcagacaccaggtgtcattcctggtgaggcctgcctcgtcggtggcctggggtctgccggcaggttctggctgcacctgaaggctgcgtgcaccttgtcccctggacaggtctcctttcctggccctgctccagcccagcccttcttctagtggtagctctggctttgcaggcccagctccaggccctgctcctcagagagactcttccagagctggagctgggcacagccataagacaggactggaccagatgctcctgtaaacatccaggggtgtgccaggcccaccctcacaactgcttgttcaggtatcgtgatgggccactcggtccaaaatcagccaggccatcttttccatcatctcacttcaaataaacataataattataaaaaaaaaaaaaaaaa

SEQ ID NO: 5698 - DNA, 1578 bp, Homo sapiens
  SIMILAR (655)..(1086): 971254mologous to Homo sapiens myosin 5c; myosin Vc,accession number AF272390,Smith-Waterman Score=712.
atgcagaaacagtacctgggtccagatatgctttcctgcggcgctttcctctgttacctcgtttcatcctcacagcagcatggacgatttgactccaaaagaattgttcagcagctgcgagcctgcggcgttttagaaacgattcgcattagtgcacagagctacccttccaggtggacatacatcgagttctacagtcgctacggcattctcatgaccaagcaagagctttccttcagcgataaaaaggaggtgtgcaaggtggttttacacagactcatccaggattctaatcagtaccagtttggtaaaaccaaaattttcttcagagcaggacaagtggcttatttagagaaacttcgattggataaactgaggcagagttgtgttatggtacaaaagcacatgcgtggctggctccagaggaaaaaattcctccgagagagacgagccgccctgataatccagcagtacttccggggtcagcaaactgtgaggtatgttggaatcaaggaacacatgtggaactgtggggctttctgtgctgatcatctccggcggggaggactcatcaaggacaagggacctttctcctgtgacccagggtgcagacgtgcatgggtcccctttgtggtcgtgagcattagggcaagaaagacaatctctgagttcgaaaaagagatagagctacttcaggcacagaagatagatgtggagaaacatgtgcagtcacaaaaacggcaaatgagagaaaagatgtcagagatcaccaaacaacttctcgaaagctatgacattgaagatgtaagaagcaggctctctgtggaagatctggaacatttaaatgaggatggagaactttggtttgcttatgaaggactaaagaaagcaacacgtgttttggagagccatttccagtctcagaaggattgctatgaaaaggagattgaagctttgaacttcaaagtggtgcatctcagtcaagaaatcaaccacctgcagaagttattcagagaagaaaatgacatcaatgaaagcatccgtcatgaagttaccaggctaacatcagagaacatggcccagcccccgagcctcgcacgttcggcagccccggcctggccccggcccctcctgcccatggcggtggccgagctgtacacgcagatgctggaggaacataaggctgtgatcctacagaaatacgcacgggcgtggctggccagacgcagattccagagtatccgacgattcgtgcttaatattcagcttacttacagggtccagcgtttgcagaaaaagttggaagatcagggtgcaagaaacagaggctttgaaagctcagaattggcagacagggccacagagactcagagaagcactagactaggagtcagggtgcctgggtcagggctttgctacctgactggatgtgacaagaaagccatggtgtgggacatgcgctccggccagtgcgtgcaggcctttgaaacacatgaatctgacatcaacagtgtccggtcagtgagtagaatgttcatgccacctctctgttctgccggcattgcctggcttgggtaa

SEQ ID NO: 5699 - DNA, 510 bp, Homo sapiens
  SIMILAR (44)..(313): 381254mologous to Caenorhabditis elegans Similar to cuticle collagen,accession number U41011,Smith-Waterman Score=103.
gtacccatgcggccagtaggtgtcgctgttcccctgccggcgggagccaggagccccgcgcgggcccccagcgccactcagccttccgctcccggcaggttcgcagacccaccggagctcccgagagagggccgctctacccgcccccgccccgggactgtgcccgtgctcacctggctaccaccgtagagacactgccggcctaaggaagtaccttcggggagagaaaggagagacgggtctgttggggcgaaacatgggccccgacggaagcggctccgagccggcttctctcgtggctcccaactctccctcctttctcttcacgtgccatgggcggcggtggggcactgagggcctcctggtaaaatcccaagaggggagattcaaccggggttccatatgggctttacgaataaacaagaggttgaaaatcccagcttcgtgggagctagctacagaaagagtggattggtttcaatattcttgcctcaaaaaaaaaaaaaaaaa

SEQ ID NO: 5700 - DNA, 1395 bp, Homo sapiens
  SIMILAR (499)..(1389): 901254mologous to Homo sapiens putative p150,accession number U93563,Smith-Waterman Score=1432.
atgaattggagtgggctgctgactcatgggctagcagaggcagccatgaaacatgcaaatcagcaatcccttcttccaggtctgtcccaacagttgagagactctcctccccagaccagccctagtgttggtacaggagcaaccgacaccaaaaagaagaaaataaataatggcactaaccctgagacaaccacttctggtggttgccactcacctgaggatgtgagtcttggctggccaggctcctggagacagagggcccaaggggtggtggaggtttcctcagctgagaaatggggtgggggcaaatggtctaaggttctgggaacctctaagtcagatgagggagaggccttgagggtcagccgcacgcctgagaggcaggacagacccaaagtgtggtttggagtaatattcatacggcatggactttaccaagatggcgtatttaagtttacagtttacatccctgataactatccagatggtgactgtccaagaataaaatacctaggaatccaacttacaagggatatgaaggacctcttcaaggagaactacaaaccactgctcaatgaaataaaagaggatacaaacaaacggaagaacattccatgctcatgggtaggaagaatcaatattgtgaagatggccatactgcccatagtaatttatagattcaatgccatccccatcaagctaccaatgactttcttcacagaattggaaaaaattactttaaagttcatatggaaccaaaaaagagcgtgcattgccaagacaatcctaagccaaaagaacaaagctggaggcatcatgctacctgacttcaaactatactacaaagatacagtaaccaaaacagcatggtacttgtaccaaaacagagatatagaccaatggaacagaacagagcccacagaaataacaccacacatctacaactatctgatctttgacaaacctgacaaaaacaagaaatggggaaaggattccctatttaataaatggtgtcgggaaaactggctagccatatgtagaacactgaaactggatccgttccttacaacttttacaaaaattaattcaagatggattaaagacttacatgttagaccgaaaaccataaaaaccctagaagaaaacctaggcaataccattcaggacataggcatgggcaaggacttcgtgactacaacactcaaagcaatggcaacaaaagccaaaatagacaaatgggatctaattaaactaaagagctactgcatggcaaaagaaactaccatcagagtgaacaggcaacctacagaatgggagaaaatttttgcaatctactcatctgacaaagggctaatatccagaatctacaaagaactcaaacaaatttacaattaa

SEQ ID NO: 5701 - DNA, 1563 bp, Homo sapiens
  SIMILAR (46)..(456): 731254mologous to Homo sapiens putative p150,accession number U93567,Smith-Waterman Score=510.
atgaggctaaacatgaagaactctaagacggcagaaccacttgaagaaaatgtcaatgaaaacatatctgaaacaggtctcagtcgagaagtttattttgccaaggttaaggatgtgcctgtgacacagcctcaggagatcctgatgacatttacccacggtgtcccacaccacacctattccaaaattgaccacatagttggaagtaaagctctcctcagcaaatgtaaaagaacagaaattataacaaactatctctcagaccacagtgcaatcaaactagaactcaggattaagaaactcactgaaaaccgcccaactacatggaaactgaacaacctgctcctgaatgactactgggtacataacgaaatgaaggcagaaataaagacgttctttgaaaccaacgagaacaaagacacaacataccagaatctctgggacacattcaaagcgggccacaagccccccaacaccgcagggcctgtgctcatgaaggtgccccggtggctccagacccgccttgtcgtggccaagccggggcacctcctgcctcccctggctgaccacaccctctccagaagttacgccagaaaagatcaacttgcagcatgccagaaggtcttccctagcttttccaagcagcagtttgaatcttatatagaacattccataaccacggaacatttggttcgcgacgccaatttcttgaggatgaggagaaacacaactgcctctgccaagagcccaggtggccacagagctgatctgaccaaccctcctcctgaacaggagttggaagatggtctccagaacccaccccagcccacctggggccttccagaacccattcccttccatttgccatttaaactggagggcaagggctctcagaggagatgcttctggctacttgagaccaatacacatgcatcaaagagccagtacgtgccaggctccaccatgaggttgatcaaaactaaatcaggaaatcagtggtgcctacagaaaccagtgtttatgattcacatctttcaaggcaggaatgggaagcaaatgcttctgggggatcgcgatgacatggaggtgaattcctccagcaaatgtgattgtggagttaccgcgtgtgccacgccaggcccactggagctgcccaagactgtggtcagcctctctgctcccatggaagcaactggagagaagagtgagaaatatgagtcaaaaagttgtgtggcgacgtgggcatcccaggggctcctcttaggaggaaatgagaagcaaaggctgcagatgctcacatcgagtgttcttggaaaggctgttgacctgagcgccagggagataattccagatgcgggcaccattggggttggttttctcctccctcctggtggggatggagggcacaggatgcagacttttctctttgtctgtacttcaagtgcctcctgccaagtagaaaatgaagagtcagtccgtgtgctgggctcagagccctgccgttttagtggcttcatggatggcttggcacaactagggagcaatggtgtctcccacacctga

SEQ ID NO: 5702 - DNA, 325 bp, Homo sapiens
  SIMILAR (322)..(158): 381254mologous to Rattus norvegicus 5E5 antigen,accession number D37934,Smith-Waterman Score=78.
ctatctcttgcatagtgaaagctggttgcgattggagggattgccattcccattgtgcttgcagccctcctccatcttccagactgtcctctttccccccatgcggggtgagatggcccgggaatgagccttcccagcagaaaaacttacatctagaatgtcgatcatcacagggcgctgcggcctcactcccacgtccacgggcaggcccagcccctccctggccttcaggtgacctcagctgcccggctggccccaactccaccgcacaacgcagactgcgggtccccaggcctggacccctggccccgtcccgcccgcgcat

SEQ ID NO: 5703 - DNA, 431 bp, Homo sapiens
  SIMILAR (264)..(410): 771254mologous to Homo sapiens trans- prenyltransferase,accession number AF118395,Smith-Waterman Score= 163.
  misc_feature (1)...(431): n = a,t,c or g
atgggaaagggaaagcctttcgaccaattattgtggcgctaatggcccgagcatgcaatattcatcataacaactcccgatccgatgtccagttttcacaagctgattgctgagaaggttctaggcggcgtctgttaaaaagcattgctttctgttaattagacatgtgcaagccagccagcgcgccatagccttaattgcagaaatgatccacactgctagtctggttcacgatgacgttattgacggtgcaagtcctcggaagagggaaaacacacagtttaataaggatctgggggtggaaaagaaggctgttccttgctggaggtttaattctttctgcagcatctatagctctggcacgaattggaaatacaactgttatatctattttaacccaagttattgaggnttggtgcgtggtggatttt

SEQ ID NO: 5704 - DNA, 858 bp, Homo sapiens
  SIMILAR (1)..(717): 1001254mologous to Homo sapiens trans- prenyltransferase,accession number AF118395,Smith-Waterman Score= 1231.
atgcccgcgcaggctcataggcagaagggacttgacttgtctcagataccctattttaatcttgtgaagcatttaacacctgcctgtccaaatgtatatagtatatcacagtttcatcacacaaccccgtacagcaaaacacacagtggtgagaaatacaccgatcctttcaaactcggttggagagacttgaaaggtctgtatgagggtattagaaaggaacccctcatatcaacaacagaacttaaggaaatctctgagtactactttgatgtaaaaggaaaagcctttagaccgattattgtggtgctaatggcccgagcatgcaatattcatcataacaactcccgacatgtgcaagccagccagcgcgccatagccttaattgcagaaatgatccacactgctagtctggttcacgatgacgttattgacgatgcaagttctcgaagaggaaaacacacagttaataagatctggggtgaaaagaaggctgttcttgctggagatttaattctttctgcagcatctatagctctggcacgaattggaaatacaactgttatatctattttaacccaagttattgaagatttggtgcgtggtgaatttcttcagctcgggtcaaaagaaaatgagaatgaaagatttgcacactaccttgagaagacattcaagaagaccgccagcctgatagccaacagttgtaaagcagttcataggcggaagggacttgacttgtctcagctctgtccattgagtgggtctagaaacgatgacacccagtactcaaattctggtttcttaacaccattttccaccaaaaggaatgtgggctccttggagaacagtgaataa

SEQ ID NO: 5705 - DNA, 681 bp, Homo sapiens
  SIMILAR (19)..(96): 801254mologous to Homo sapiens Human secreted protein, SEQ ID NO: 6566,accession number G02485,Smith-Waterman Score=115.
  misc_feature (1)...(681): n = a,t,c or g
agtcttgctctgtcgcccaggctagagtgcagtgagctgagatcatgccactgcactccagcctgggtaacagagcgagaccctatctcaaaaaaaaattattgcttaggtactaataatgacattataaatttattttaatgatatttttgaaggataaaatatatgtgtgtatataaatggatttgtatgtaaaatatactttgaggatatattatatatattataaacaatgattagtttaaatgttcaacaagttcatggaatgttcgggtatcagtttacaatatatgattcttcgttcctgaccaacagtttcctgctctacgaaacgcactcttttgccttgaagcggcattggacagtggtgtcactaatggctacaatccatgcaattctagcttatgcttttgccttagctgggaaaagagaagccagtgggaatctttactccaaaccctggatcaatctgccaccaaacctaaataatggcatctactgggaaagagaaaggaaacccaagacagaagaatttccatcctttattccctgggcncttctgctcagctgagaagagttgcttgtgtgttggctgcattnccggaaatcctgacccacctatgctagtaagatgtccagtgctnccacagatgattccaggngcttctccaccagccctgg

SEQ ID NO: 5706 - DNA, 3603 bp, Homo sapiens
  SIMILAR (88)..(2202): 451254mologous to Gallus gallus ovomacroglobulin, ovostatin,accession number X78801,Smith-Waterman Score=1630.
atgcctcgccctgcttcggctcgcacacggtgcgcgcacccactgacctgcgcccactgtcctgcactccctagtgagatgaacccggatcctcaaaacaatcggatttttcaaaggcaaaatgtgacttctttccgaaatattacccaactctcgttccaactgatttcagaaccaatgtttggagattactggattgttgtgaaaagaaactcaagggagacagtgacacaccaatttgctgttaaaagatatgtgctgcccaagtttgaagttacagtcaatgcaccacaaacagtaactatttcagatgatgaattccaagtggatgtatgtgctaagtacaactttggccaacctgtgcaaggggaaacccaaatccgggtgtgcagagagtatttttcttcaagcaattgtgagaaaaatgaaaatgaaatatgtgagcaatttattgcacagttggaaaatggttgtgtttctcaaattgtaaatacaaaagtcttccaactctaccgttcgggattgttcatgacatttcatgtcgctgtaattgttacagaatctgggacagttatgcagatcagcgagaagacctcagtttttatcactcaattgcttggaactgtaaactttgagaacatggatacattctatagaagagggatttcttattttggaactcttaaattttcggatcccaataatgtacctatggtgaacaagttgttgcaactggagctcaatgatgaatttataggaaattacactacggatgagaatggcgaagctcaattttccattgacacttcagacatatttgatccagagttcaacctaaaagccacatatgttcgacctgagagctgctatcttcccagctggttgacgcctcagtacttggatgctcacttcttagtctcacgcttttactcccgaaccaacagcttcctgaagattgttccagaaccaaagcagcttgaatgtaatcaacagaaggttgttactgtgcattactccctaaacagtgaagcatatgaggatgattccaatgtaaagttcttctatttgatgatggtaaaaggagctatcttactcagtggacaaaaggaaatcagaaacaaagcctggaatggaaacttctcgttcccaatcagcatcagtgctgatctggctcctgcagccgtcctgtttgtctatacccttcaccccagtggggaaattgtggctgacagtgtcagattccaggttgacaagtgctttaaacacaaggttaacataaagttctctaacgagcagggcttacctggttccaatgctagtctctgtcttcaagcggcgcctgtcttattctgtgccctcagggctgtggataggaatgtccttctactgaaatctgaacaacagctgtcagctgaaagtgtgtataacatggttccaagtatagagccgtatggttatttctaccatggcctcaatcttgatgatggcaaggaagacccttgcattcctcagagggatatgttctacaatggtttatattacacacctgtaagcaactatggggatggagatatctataatattgtcaggaacatgggtctaaaagtctttaccaatctccattaccgaaaaccagaagtatgtgtgatggagagaaggctgccactccctaagccgctttatctggaaacagaaaattatggtccaatgcgtagtgttccgtctagaattgcatctagtggaatcagaggggagaatgctgactatgtagaacaggctataattcaaacagtaagaacaaacttcccagagacatggatgtgggacctcgtcagtgtcgattcctcaggctctgccaatctttcgttcctcattcctgatacgataacccaatgggaggcaagtggcttttgtgtgaatggtgacgttggatttggcatttcctctacaaccactctagaagtctcccaacctttctttattgagattgcctcacccttttcggttgttcaaaatgaacaatttgatttgattgtcaatgtcttcagctaccggaatacatgtgtagagatttctgttcaagtggaggagtctcagaattatgaagcaaatattcataccttgaaaatcaatggcagtgaggttattcaagctggagggaggaaaacaaacgtctggactattatacctaagaaattgggtgccaaagcctccaagcagggagttttggacttgccaaacgatgtagtagaagggtcagccagaggctttttcactgttgtgggggatattctaggacttgccttgcagaatctggttgttctccaaatgccctatggaagtggagagcagaatgctgccctactagcatctgatacttatgttctggactatctgaaatctactgagcaactgacagaggaagttcaatctaaggctttctttctcttatctaatgcggcattggacagtggtgtcactaatggctataatcatgcaattctagcttatgcttttgccttagctggaaaagagaagcaagtggaatctttactccaaaccctggatcaatctgccccaaaactaaataatgtcatctactgggaaagagaaaggaaacccaagacagaagaatttccatcctttattccctgggcaccttctgctcagactgagaagagttgctacgtgctgttggctgtcatttcccggaaaattcctgacctcacctatgctagtaagattgtgcagtggcttgcccaacggatgaattcccatggaggcttttcttccaaccaggctccggtagattgcaaacgacctgctttctttgtgatcccggctgcattcggacccctgtcagacagtaaatcccaagatcaaaacactgtcacctttagcagtgaaggatccagtgagattttccaggttaacggtcataaccgcctactggtccaacgttcagaagtaacacaggcacctggagaatacacagtagatgtggaaggacacggttgtacatttatccaggccacccttaagtacaatgttctcctacctaagaaggcatctggattttctctttccttggaaatagtaaagaactactcttcgactgcttttgacctcacagtgaccctcaaatacactggaattcgcaataaatccagtatggtggttatagatgtaaaaatgctatcaggatttactccaaccatgtcatccattgaagagggttttggtcgagcagacagtttccctttttctgttgagcagagcaaccttgtgttcaacattcagccagccccagccatggtctacgattattacgaaaaaggcctaatccaacgttgcccatcccgttggagcaaaggcattgcttgtgcagaggatcggccaggacgtcctatgcttgcatccttactcaccagcatggctatggcacaagaggctttccgaagcagctgctcaggtggctcagcctggaaactggggcaggctgtgagggagcgtcttcctgagccctcagtatgtcatccacgagggacaggatgggctctggggacttgttctttgccccttccagagctgaaaccagaatga

SEQ ID NO: 5707 - DNA, 4140 bp, Homo sapiens
  SIMILAR (880)..(2739): 431254mologous to Gallus gallus ovomacroglobulin, ovostatin,accession number X78801,Smith-Waterman Score=1379.
atggaccaacaagcaatatatgctgagttaaacttacccacagactcaggcccagaaagttcttcaccttcatctcttcctcgggggatggaaagaaggaagaaagaaagaaagaaagaaaagaaagaaagaaagaaagaaagaaagaaagaaagaaagaaagaaagaaaggaagaaagaaagaaagaaaggaaagaaagagaaagaaaagaagaaagaaagaaaggagagaaagaaaaagaaagagagagaaaggaaaggaaagaaagaaaaagagaaggaggaaggaaggaaggatggaaggaaggaaggaaaaatattttacataccgttcagctggatattacggcctttttaaagaccgtaaagaaaaataagcacaagttttatccggcctttattcacattcttgcccgcctgatgaatgctcatccggagttccgtatggcaatgaaagacggtgagctggtgatatgggatagtgttcacccttgttacaccgttttccatgagcaaactgaaacgttttcatcgctctggagtgaataccacgacgatttccggcagtttctacacatatattcgcaagatgtggcgtgttacggtgaaaacctggcctatttccctaaagggtttattgagaatatgtttttcgtctcagccaatccctgggtgagtttcaccagttttgatttaaacgtggccaatatggacaacttcttcgcccccgttttcaccatgggcaaatattatacgcaaggcgacaaggtgctgatgccgctggcgattcaggttcatcatgccgtttgtgatggcttccatgtcggcagaatgcttaatgaattacaacagtactgcgatgagtggcagggcggggcgtacaactttggccaacctgtgcaaggggaaacccaaatccgggtgtgcagagagtatttttcttcaagcaattgtgagaaaaatgaaaatgaaatatgtgagcaatttattgcacagttggaaaatggttgtgtttctcaaattgtaaatacaaaagtcttccaactctaccgttcgggattgttcatgacatttcatgtcgctgtaattgttacagaatctgggacagttatgcagatcagcgagaagacctcagtttttatcactcaattgcttggaactgtaaactttgagaacatggatacattctatagaagagggatttcttattttggaactcttaaattttcggatcccaataatgtacctatggtgaacaagttgttgcaactggagctcaatgatgaatttataggaaattacactacggatgagaatggcgaagctcaattttccattgacacttcagacatatttgatccagagttcaacctaaaagccacatatgttcgacctgagagctgctatcttcccagctggttgacgcctcagtacttggatgctcacttcttagtctcacgcttttactcccgaaccaacagcttcctgaagattgttccagaaccaaagcagcttgaatgtaatcaacagaaggttgttactgtgcattactccctaaacagtgaagcatatgaggatgattccaatgtaaagttcttctatttgatgatggtaaaaggagctatcttactcagtggacaaaaggaaatcagaaacaaagcctggaatggaaacttctcgttcccaatcagcatcagtgctgatctggctcctgcagccgtcctgtttgtctatacccttcaccccagtggggaaattgtggctgacagtgtcagattccaggttgacaagtgctttaaacacaaggttaacataaagttctctaacgagcagggcttacctggttccaatgctagtctctgtcttcaagcggcgcctgtcttattctgtgccctcagggctgtggataggaatgtccttctactgaaatctgaacaacagctgtcagctgaaagtgtgtataacatggttccaagtatagagccgtatggttatttctaccatggcctcaatcttgatgatggcaaggaagacccttgcattcctcagagggatatgttctacaatggtttatattacacacctgtaagcaactatggggatggagatatctataatattgtcaggaacatgggtctaaaagtctttaccaatctccattaccgaaaaccagaagtatgtgtgatggagagaaggctgccactccctaagccgctttatctggaaacagaaaattatggtccaatgcgtagtgttccgtctagaattgcatctagtggaatcagaggggagaatgctgactatgtagaacaggctataattcaaacagtaagaacaaacttcccagagacatggatgtgggacctcgtcagtgtcgattcctcaggctctgccaatctttcgttcctcattcctgatacgataacccaatgggaggcaagtggcttttgtgtgaatggtgacgttggatttggcatttcctctacaaccactctagaagtctcccaacctttctttatggagattgcctcaccctttccggttgttcaaaatgaacaatttgatttgattgtcaatgtcttcagctaccggaatacatgtgtagagatttctgttcaagtggaggagtctcagaattatgaagcaaatattcataccttgaaaatcaatggcagtgaggttattcaagctggagggaggaaaacaaacgtctggactattatacctaagaaattgggtgccaaagcctccaagcagggagttttggacttgccaaacgatgtagtagaagggtcagccagaggctttttcactgttgtgggggatattctaggacttgccttgcagaatctggttgttctccaaatgccctatggaagtggagagcagaatgctgccctactagcatctgatacttatgttctggactatctgaaatctactgagcaactgacagaggaagttcaatctaaggctttctttctcttatctaatgcggcattggacagtggtgtcactaatggctataatcatgcaattctagcttatgcttttgccttagctggaaaagagaagcaagtggaatctttactccaaaccctggatcaatctgccccaaaactaaataatgtcatctactgggaaagagaaaggaaacccaagacagaagaatttccatcctttattccctgggcaccttctgctcagactgagaagagttgctacgtgctgttggctgtcatttcccggaaaattcctgacctcacctatgctagtaagattgtgcagtggcttgcccaacggatgaattcccatggaggcttttcttccaaccaggctccggtagattgcaaacgacctgctttctttgtgatcccggctgcattcggacccctgtcagacagtaaatcccaacttaaattttcggatcccaataatgtacctatggtgaacaagttgttgcaactggagctcaatgatgaatttataggaaattacactacggatgagaatggcgaagctcaattttccattgacacttcagacatatttgatccagagttcaacctaaaaatatcacagccacagctctgtcttgagagagtcaagaatgagggctatttattttgtgatgttacaggtctgcccacatcagtgcccaccaggaaaactgctgcttgtgttatcaagaatttaaaggccatgctatccatcatgtgttacctcacattggtgttccccgcttctttcactcagaatgctaactcttcagagacacaggaaagtgccagtttcaacaaatgtcaggcaccgtgtatgaaatctaacaatgcgctcatcgtcatcctcggcaccgtcaccctggatgctgtaggcataggcttggttatgccggtactgccgggcctcttgcgggatatcgtccattccgacagcatcgccagtcactatggcgtgctgctagcgctatatgcgttgatgcaatttctatgcgcacccgttctcggagcactgtccgaccgctttggccgccgcccagtcctgctcgcttcgctacttggagccactatcgactacgcgatcatggcgaccacacccgtcctgtggatctacccactagtcaattcaccatcttgttga

SEQ ID NO: 5708 - DNA, 1357 bp, Homo sapiens
  SIMILAR (465)..(956): 521254mologous to Homo sapiens alpha-2-macroglobulin precursor,accession number M11313,Smith-Waterman Score=422.
ctagtggaatcagaggggagaatgctgactatgtagaacaggctataattcaaacagtaagaacaaacttcccagagacatggatgtgggacctcgtcagtgtcgattcctcaggctctgccaatctttcgttcctcattcctgatacgataacccaatgggaggcaagtggcttttgtgtgaatggcgacgttggatttggcatttcctctacaaccactctagaagtctcccaacctttctttattgaaattgcctcacccttttcggttgttcaaaatgaacaatttgatttgattgtcaatgccttcagctacctgaatacatgtgtagagatttctgttcaagtggaggagtctcagaattatgaagcaaatattaatacctggaaaatcaatggcagtgaggttattcaagctggagggaggaaaacaaacatctggactattatacctaagaaattgggtgccaaagcctccaagcagggagttttggacttgccaaatgatgtagtagaagggtcagccagaggctttttcactgttgtgggggatattctaggacttgccatgcagaatctggttgttctccaaatgccctatggaggtggagagcagaatgctgccctactagcatctgatacttatgttctggactatctgaaatctactgagcaactgacagaggaagttcaatctaaggctttctttctcttatctaatggttatcaaaggcaattatctttcaaaaactctgatggttcctatagtgtgttttggcagcagaatcagaaaggaagcatatggctcagtgctcttacttttaagacattggagagaatgaaaaaatttgtattcattgatgaaaatgttcaaaaacagaccttaatctggctttcaagccaacagaaaacaagcggctgctttaagaatgatggccagcttttcaaccacgcctgggagtttcctgctctacgaaacgcactcttttgccttgaagcggcattggacagtggtgtcactaatggctacaatcatgcaattctagcttatgcttttgccttagctggaaaagagaagcaagtggaatctttactccaaaccctggatcaatctgccacaaaactaaataatgtcatctactgggaaagagaaaggaaacccaagacagaagaatttccatcctttattccctgggcaccttctgctcagactgagaagagttgctatgtgctgttggctgtcatttcccggaaaattcctgacctcacctatgctagctctggtagattgcaaacgacctgctttctttgtgatcccgggctgcattcggacccctgtcggacagtaaatcccaa

SEQ ID NO: 5709 - DNA, 267 bp, Homo sapiens
  SIMILAR (182)..(205): 871254mologous to Homo sapiens AD022 protein,accession number AF223469,Smith-Waterman Score=38.
aaaagcggcgacttctgtgtgtggagtttgcctcggtcgcaagctgcgatgccgcagtggctcagtgcttcctggccgagaacgactgggagatggaagtacgctttcgctgtcctcgcttccggctccattacctaggtcggtggagcgcacaaacctcatcccttgtgcctttgtttttcagagggctctgaactcctacttctctctgagcccaagacctagtaagtgatgaggggagcgggagccagtccgcacggaggcagt

SEQ ID NO: 5710 - DNA, 360 bp, Homo sapiens
  SIMILAR (141)..(16): 971254mologous to Homo sapiens Human secreted protein encoded by gene No. 105,accession number Y27671,Smith-Waterman Score=215.
tttttctggattttaaggtagccttccgtggttgtgtatctttacttccactgctcttggggtcaactgagttacctgtcccacgggaagtactcggtaagggagtattaggagaaaaggaagatggatcgctactggcattacgagtccggaatgaatcatcagctagtgaaagcacagaagtctttcctaaccctgagacagaagttgtatatcctgttgtagaacttttactagcacatttctctaagttgccatattttgcatgaaaagcttgattattaaaaggctggcttcgaatcagtttggatttcttgatttctttactcgtcgatggggtgacagaagagggtccaggaa

SEQ ID NO: 5711 - DNA, 1773 bp, Homo sapiens
  SIMILAR (1643)..(1768): 1001254mologous to Homo sapiens Human secreted protein encoded by gene No. 105,accession number Y27671,Smith-Waterman Score=221.
atgaggaagattacaggaggagtaggttttagggagagatcagtgaaggtgcgagcaactgagattccaactagatatccaaaggaagccctgcatgttgcaggagtggaaatgcagttaacggctgcgatgtcatttctgaccattctgcaggacgaatcagtgtcaattcatgcatatacccactcattcctccaagtcattctcctgcatctggagcacagggacacaggtgtcagcaatgcatggctggaaactcttctgtctgttatagaagtattgccaaaagaaaccctacggcatgagattttgaatccacttgtttccaaggcacaactttcccaaacagtccagtctcgtttagttagttgtaaaattttaggaaaattgaccaacaaatttgatgcccacaccattaagcgagaaatacttcctctggtaaaatcactctgtcaagatgtagaatatgaagttcgatcttgtatgtgtcggcaattagaaaatatagcccagggcattgggacagaacttacaaaaagtgtggtgctccctgaattaatagaactttctagggatgaaggcagcagtgtacgacttgcagcttttgaaactttggttaatctgcttgatatatttgatacaggaattttcactccagatcagcacttgagatttttggaattttataagaaactttgtacattgggtttgcaacaagaaaatggacacaatgaaaaccagattccaccccaaatcctagagcaggagaagaaatatatttcagtacggaagaactgtgcttataactttccggccatgattgtttttgttgatcctaaaaacttccacatggaactctattctacattcttctgcctttgccatgaccctgaagtaccagtcagatacactattgctatttgcttttatgaagtactagatgctcttatagatcatcttccagaaatcttggaacttatgtctactggtggagaaagcagtgttcaagaaaataagttatcttctctgcctgacttgattccagcactcacagctgctgaacagcgagctgcagcctctttaaaatggagaactcatgagaagctacttcagaaatatgcctgcctgccacatgtcatatcaagcgatcagatttattaccgtttcttacaaagaatgttcacaatcatgatgacaaataatgttttacctgtccaaaaggcggcttcacgaactctatgcatttttctgcgttataatcgtaaacaagaacagagacatgaggtcattcaaaaattaattgaactgaaatctactctgaagattcctgctgataagcatctacttcagcagttagaaatgtgtgtgaggaaactcctgtgtcaagaaaaagataaagatgttctggctattgtaaaaagagaacaattagagaaagaaaagcaacagaatgatggaaggcccatgagtgataaaatgtttgaaaagaaacgtaaagaaatcaagaaatccaaactgattcgaagccagtcttttaataatcaagcttttcatgcaaaatatggcaacttagagaaatgtgctagggagcagcagctgactagtttggctggagtgtggaatgattcattccggactcgtaatgccagtagcgttccatcttccttttctcctaatactcccttaccgagtacttcccgtgggacaggtaactcagttgaccccaagagcagtggaagtaaagatacacaaccacggaaggctaccttgtaa

SEQ ID NO: 5712 - DNA, 463 bp, Homo sapiens
  SIMILAR (1)..(186): 911254mologous to Homo sapiens Human secreted protein, SEQ ID NO: 6720,accession number G02639,Smith-Waterman Score=325.
gcaaagacttggaaccaacccaaatgcccatcaatgatagactggataaagaaaatgtggcacatatacaccatggaatactatgcagccataaaaaaggatgacttcatgtcctttgcagggacatggatgaagctggaaaccatcattctcagcaaactaacgcaagaacagaaaaccaaacactgcatttctcactcataagtgggagttgaacaatgagaacacatggacacagggagggaacatcacacaccagggctggttggggagtgcagggctagaggagggatagcattaggagaaatacctaatgtaaatgccgggttcctgggtgcagcaaaccaccatggcacgtgtatacctatgtaacaaacctgcacattctgcatatgtatcccagaacttaaactataattaaaaaaacttttaaaataaataaataaaagtgcattccaaaaaa

SEQ ID NO: 5713 - DNA, 3097 bp, Homo sapiens
  SIMILAR (1235)..(3097): 981254mologous to Homo sapiens 05-JAN-1996 Human protein p164 coding sequence,accession number V17260_cd1,Smith-Waterman Score= 3033.
atgaagatggcggacgcgaagcagaagcggaacgagcagctgaaacgctggatcggctccgagacggacctcgagcctccggtggtgaagcgccagaagaccaaggtgaagttcgacgatggcgccgtcttcctggctgcttgctccagcggcgacacggacgaggtcctcaagctgctgcaccgcggcgccgacatcaattacgccaatgtggacggactcactgccctgcaccaggcttgcattgatgacaatgttgatatggtgaagtttctggtagaaaatggagcaaatattaatcaacctgataatgaaggctggataccactacatgcagcagcttcctgtggatatcttgatattgcagagtttttgattggtcaaggagcacatgtaggggctgtcaacagtgaaggagatacacctttagatattgcggaggaggaggcaatggaagagctacttcaaaatgaagttaatcggcaaggggttgatatagaagcagctcgaaaggaagaagaacggatcatgcttagagatgccaggcagtggctaaatagtggtcatataaatgatgtccggcatgcaaaatctggaggtacagcacttcacgttgcagctgctaaaggctatacggaagttttaaaacttttaatacaggcaggctatgatgttaatattaaagactatgatggctggacacctcttcatgctgcagctcattggggtaaagaagaagcatgtcgaattttagtggacaatctgtgtgatatggagatggtcaacaaagtgggccaaacagcctttgatgtagcagatgaagacattttaggatatttagaagagttgcaaaagaaacaaaatctgctccatagtgaaaaacgggacaagaaatctccactaattgaatcaacagcaaatatggacaataatcagtcacagaagacctttaaaaacaaagagacgttgattattgaaccagagaaaaatgcatcccgtattgaatctctgggaacaagaaaaggttgatgaagaagaagaaggaaagaaggatgagtctagctgctctagtgaagaagatgaggaagatgactccggaatcagaagctgaaacagataagacaaaacccctgggcttctgtaactaatgccaacacttctagtacacaagcagctcctgtagctgttacaacacctactgtgtcatcaggtcaagcaacacctacatcacctattaaaaagtttccaaccacagctacaaaaatttctcccaaaggaagaagagagaaaagatgagtctcctgcaacttggaggttaggacttagaaagacgggcagctatggtgcacttgctgaaatcacagcatctaaagagggtcagaaagaaaaagatactgcaggtgttacacgttcagcttcaagtcccagactttcctcctctttggataataaagaaaaggagaaagatagtaaaggaactaggcttgcatatgttgcacctacaataccaagacgactagccagtacatctgacattgaagagaaagaaaacagagattcttcaagtttgcgaacaagtagttcatatacaaggagaaaatgggaagatgatcttaaaaaaaatagctcagttaatgaaggatcaacgtatcataaaagttgctcctttggtagaagacaagatgatttgattagttctagtgttccaagcaccacatcaacaccaacagttacctctgcagctgggcttcagaaaagcctgctttccagcacaagcactactacaaagattacaacgggttcttcctcagcaggcacacaaagcagtacctcaaatcgtttgtgggctgaggatagtactgagaaagaaaaggacagtgttcctacggcagtgaccattcctgttgctccaactgttgtaaatgctgcagcttctaccacaaccctgactacaactactgctggcactgtctcctccacaacagaggtcagggagagacgcagatcatacctcactcctgttagggatgaagagtctgaatcccaaagaaaagcaagatctagacaagcaagacaatctagaagatcaacacagggagtgacattaactgatcttcaagaagctgagaaaacaataggaagaagtcgttctacccgaaccagagaacaagaaaatgaagaaaaagaaaaagaggaaaaagagaaacaagataaagagaaacaagaagaaaagaaggagtcagaaacatctagagaagatgaatataaacaaaagtactccagaacgtatgatgagacttaccagcgttataggccagtatcaacttcaagttcaaccactccatcctcttcactttctactatgagcagttcactgtatgcttcaagtcaactaaacaggccaaatagtcttgtaggcataacttctgcttactccagaggaataacaaaagaaaatgaaagagagggagaaaaaagagaagaggagaaagaaggagaagataaatcacaacctaaatcaatcagagaacgacgacgaccaagagagaaaagaagatctacaggagtttcattttggacacaagatagtgatgaaaatgaacaagaacaacaatcagacacagaagagggatccaataagaaagaaactcagacggattccatttctagatatgaaaccagttctacatcagctggtgatcgatatgattccttgctgggtcgctctggatcatacagttacttagaagaaagaaaaccttacagcagcaggctagaaaaggatgactcaactgactttaaaaagctttatgaacaaattctagctgaaaatgaaaagctgaaggcacagctacatgatacaaatatggaactaacagatcttaaattacagttggaaaaggccacccagagacaagaaagatttgctgatagatcactgttggaaatggaaaaaagggaacgaagagctctagaaagaagaatatctgaaatggaagaagagctcaaaatgttaccagacctaaaagcagacaaccagaggctaaaggatgaaaatggggccttgatcagagttataagcaaactttccaaataa

SEQ ID NO: 5714 - DNA, 785 bp, Homo sapiens
  SIMILAR (119)..(589): 951254mologous to Homo sapiens Human laminin A chain,accession number W50892,Smith-Waterman Score=781.
ttcacggtgaccaggtgctacgcagtggcccaggaaggaacatactttgacggaagcggatatgcagctcttgtcaaagagggctacaaagtccagtcagatgtgaacatcacactggaagtttcgaacctctcgcagaaatggcgtcttcctggggatcagcactgccatagtgcatgccattggactagagcttgtggacggcaaggtcttgttccatgtcaacaatggtgctggcaggataacagctgcatatgagcccaaaaccgccactgtgctctgtgatggaaaatggcacactcttcaagctaacaaaagcaaacaccgtatcactctgattgttgacgggaacgcagttggcgctgaaagtccacacacccagtctacctcagtggacaccaacaatcccatttatgttggtggctatcctgctggtgtgaagcaaaaatgcctgcgcagccagacctcgttccgcgggtgtttgaggaagctagctctgattaagagcccgcaagtgcagtcctttgacttcagcagagcgttcgaactgcacggagttttccttcattcctgtcctgggaccgagtcctgaacttcaagcagaatcctcagttggaatcattgctaatattttgaggagaagtgtatgtgtgaattaagaatctcttcagttcatatttcatttccaactcaggttaagtgtttctggggagagatgttgtgtttacgttacactaaaaccacatgtgcaacaaatacctccattaaatggtctaaaatgtaaa

SEQ ID NO: 5715 - DNA, 817 bp, Homo sapiens
  SIMILAR (367)..(236): 901254mologous to Homo sapiens unnamed protein product,accession number AK001174,Smith-Waterman Score=196.
tttgttttttccctaccaaaatgtaggatctttttggcatataatacatgatagcagctctctcgaggatattttaagaacttggttggggtttaatcacccattctgcttgaggatttatacgatatacatccaatatataagcatctggatccaagcaatgctctcctatatttcctccaatttcatataacctttggttctgaatcttaatacattctgatgaaccatgactgttttcatattgaaattttgccaatatgtctttggctttggtttgattgttgagttgaatggccatggacaccttggagagaagtggagcatggacccgtatgactccttccggcacagacagatgccttttttccttctgccctaccagactccaggttcttcaggtttggactctgtgacttgcaccacaagactcccgaggggctctcagactttaggtctcagacttggggctgcttccagaatgagccgagctatgggtttctctggtcttcagcttgcagattcccctatgcgcagagggccccgtggtcttcgtcagcgctcagtcaagacaaacaggggactccatactcacctgcttcagaagagagcccagcagctgcccacctcccgctggccccgtgggtatgcagctcggtggaccatgcagacctatgtggattgtgccttccgagctgtgatagaagagttaaaaataaattatttaggcagacagaataaggaagtccttgtgaccctgcctcgcacctgccacgtgggtccagccacactgtcccggcagacgctctcaccttag

SEQ ID NO: 5716 - DNA, 1897 bp, Homo sapiens
  SIMILAR (981)..(1052): 291254mologous to Homo sapiens laminin A chain,accession number X58531,Smith-Waterman Score=40.
ctagggatgattttgccttaaggaaatatttggcaatacctggaaaccgatgttgtttccaaatgttcttgtttttgaagagtaacttatcagtttttcagcaccggggcgtgagaggatgctgccagcctctgatgggtgagaagccagggatgctgctgatcccgctccagtgcacaggacagcccgtttccctaatgtgatcaaccacatgtgtttctcaccagggctttcactgttaagggaagtgacagaatcacaccgggtgttttccctctgctgaaagttgctctgctgcccttcttttaccattttacaacataaattccagtagggcaagttgtcggggccccctgaagtcttgggggtgacagtaagttggccccgggaatttagccctctgactataaaacttgctccaagccccagctcagtgagacagatttgagcatttcctcctgtctccttgccatttgagttgaaataaacctttcttgctgcaaaacttggtgcttcagtgttctttccattttgcatgggcaaaccgacccagtttggtttagtgacactaacgggtatgaagaaggtatcggagcctcctagccatccatccacaggtgtgacctcagctggcggtggctcttcttgccctcccatgctgctgtctttaatactttctatttcccgccagaaatcctccatggaggcgctgtctacggaggcttctgagttggaacggctgaaggcaggaggatggagggattcattggagagcatcctgttaattcttcggcagcgaggaatggattttctgttttcatattgaaattttgccaatatgtctttggctttggtttgattgttgagttgaatggccatggacaccttggagagaagtggagcatggacccgtatgactccttccggcacgtcagactgcttcagaagagagcccagcagctgcccacctcccgctggccccgtgggtatgcagctcggtggaccatgcagacctatgtggattgtgccttccgagcttccatacagtacaatttcaagaagaaaaagcaaatgggtatcacaaagtgatgggagatgtgtccagatccgttttgcagtctgaggcaggaaattgacccgatgcttcccgttgacttccttcagacattcagaaactgtgctagagactgactgtcccatgaggaacaaccaacacggtgggccaggatctagaatgtcagagccttcatatcccactgtagctggtttccgcagaaacatgaaaccaaagaccacccacagcccagcaaagaggttctcggtgcacgtgcactgccgctgagacgggcaggtgcctcttctgagcccagctgcccaggagctgcctttgaaaagtctgcattcctcccatggctggtgctacagaaacagcacgtccacaactggcggctgcctttctctaagaaacatcttcatgcagagcacagtggcggttttgggctcatatgcagctgttatcctgccagcaccattgttgacatggaacaagacctaaaagcaaatatcttggaaaatgtctttggtcctcagtgcaacgaatgtcgagagggcaccttcgctctccgcgcagacaaccccctgggctgcagcccgtgcttctgctccgggctgtcccacctctgctcagagctggaggactacgtgaggaccccagtaacgctgggctccgatcagcctcttctgcgtgtggtttctcagagtaacttgaggggcacgactgagggggtttactaccaggcccccgacttcctgctggatgccgccaccgtccggcagcacatccgtgcagagccgttttactggcggctgccgcagcagttccaaggagaccaggtga

SEQ ID NO: 5717 - DNA, 4633 bp, Homo sapiens
  SIMILAR (2885)..(4069): 981254mologous to Homo sapiens KIAA0592 protein,accession number AB011164,Smith-Waterman Score=1990.
gtcacgccccgggcagcttggctggggctaggcttccggggctctgcggtcctcggcctgtgctggcagcctcggagcccaccgagccgggcggctgggatgatgaaccggacgacccccgaccaggagctggtgccggcgtcggagcccgtgtgggagcggccgtggtcggtggaggagatccgcaggagcagccagagctggtcgctggcggccgacgcgggcctactacagtttctacaggaattctcacagcaaactatctctaggacccatgaaatcaagaaacaagtggacggactaatccgggaaaccaaagccacagattgtcgcctgcataatgtcttcaatgacttccttatgctctctaatacccagttcatagagaatcgtgtatatgatgaagaagtggaggagccagtactcaaggctgaggcagaaaaaacagagcaggagaagacacgagagcagaaagaagtagatctcattcctaaagtccaggaggctgtgaactatggcttacaagtattggacagtgcctttgagcaacttgatatcaaagcaggaaactcagactccgaggaagatgatgctaatgggcgggtggaactgatccttgaaccaaaggatctatacattgatcgtcctttaccatatctcattgggtcaaagctgttcatggaacaagaagatgtaggtcttggagagctgtccagtgaagaaggctctgtaggcagtgatcgtggcagtattgtggacactgaggaagagaaagaagaggaggagtcagatgaagattttgcccatcacagtgacaatgaacaaaaccagcacaccacacaaatgagtgatgaggaagaggatgatgatggctgtgacctttttgctgactctgagaaggaggaggaagatattgaggacattgaagaaaatactagacctaaaagaagcagacctacatcgtttgcagatgagctggctgcccgcatcaagggggatgccatgggtcgagtggacgaggagccgacaaccttaccctcaggagaagcaaaacctcggaagacactcaaagagaagaaggaaaggagaactccttcagacgatgaagaggataacttattcgcaccccccaagctgaccgacgaggacttctcgccatttggctctggaggtggcctgttcagtggcggcaaggggctatttgatgatgaggacgaggagagtgacctcttcacggaagcctcccaggatcggcaagctggagcctctgttaaggaggagtcttcatcatccaaacctggaaagaaaatcccagcaggagctgtttctgtatttttaggagacacggatgtgtttggtgctgcctccgttccatcactgaaggagccacagaagcctgagcagcccactccaaggaaaagcccctatggtccccctcccactggcctctttgatgatgatgatggtgatgatgatgacgactttttctcggcaccccacagcaaaccttctaaaacacgcaaagtccaatccactgccgatatctttggtgacgaagaaggagatctgttcaaagaaaaagccgtagcatcgccagaagccactgtgagtcagacagatgaaaataaagcaagagcagaaaaaaaggttaccttatcttccagcaagaatctcaagccctcatcagaaacaaagactcaaaaaggcttattttcagatgaggaggactctgaggatttgttttcttctcaaagtgcgagtaacttaaaaggtgcatctctgctgcctggcaagctccccacgtcggtttccctgtttgatgatgaagatgaagaggataatctttttgggggtacagctgctaagaagcagacattgtctctacaagctcagagagaagagaaagcaaaagcctccgagctctccaaaaagaaagcatctgccctgttgttcagcagtgatgaggaggaccagtggaatattcctgcttcacagacccacttagcatctgacagcaggtctaaaggagaacccagggattctgggaccctccagagccaggaggccaaggctgtgaaaaagaccagtctctttgaggaagacaaagaagatgatctttttgccattgccaaggacagccaaaagaagacccagagagtgtcactcctctttgaagacgatgttgatagcggaggctctctgtttggctctcctcccacatctgttcctcctgcaacaaagaaaaaagagactgtctctgaggcaccacctttgctgttcagcgatgaagaagagaaggaggcacaacttggagtgaagtctgtggataagaaggttgagagtgccaaggagtcattaaaatttgggagaactgatgtggctgagtcagaaaaggaaggacttttgactagatctgctcaggaaacagtcaagcattctgatttattttcttcatcatccccatgggacaaaggaaccaagcctaagaaccaaaactgttcttagcttgtttgatgaggaagaggataaaattggaagattcaaaaccattatcccaggctccacagaaaagaagtaggaaagggctgcgattcctgatgcccaccccaagagcacaggtgtcttccaggatgaagagctgcttttcagccacaagctccaaaaggacaatgacccagatgttgacctttttgcgtggcaccaaaaaaaccaagctgttagagccaatagtcgggagcctgtttggggatgatgaagatgatgatcttttcagctctgccaagtcccagcctttggtacaagagaaaaagagagtagtgaaaaaagaccactctgttgactctttcaaaaaccagaaacatcctgaatccattcaaggtagtaaagaaaaagggcatatgggaagccagaaacacctcaggcaaatttagcgatcaacccagcggccttgctgcccacagcggcttcccagatctctgaagtaaagcctgttttgccagaattggcttttccttcatctgaacacagaaggagccacggtctggaaagtgtgcctgtccttcccgggagtggggaggccggtgtgagttttgatcttccagctcaggcagacaccttacacagtgcaaacaagagccgtgtcaagatgagagggaagcgtagaccgcagacccgtgcagctaggcggctggctgctcaggagtccagcgaggctgaggacatgagcatccccagaggacccattgcacagtgggctgatggcgccatttccccaaatggccatcggccacagctcagagcagccagtggagaagacagcactgaggaggccctggcagctgccgctgcaccttgggaaggtggtcctgtgcctggagtggacacaagcccctttgcaaagtctctgggtcattccagaggggaggctgacctttttgattctggggacattttttccacgggcactggatctcagtccgtggagagaacaaaacccaaggcaaagatagcagagaatcctgccaacccaccagtgggtggtaaagcaaagagccccatgtttcctgctctaggcgaggccagcagtgatgatgatctctttcagtctgctaaaccaaaaccagcaaagaaaacaaatccctttcctctcctggaagatgaggatgacctctttacagatcagaaagtcaagaagaatgagacaaaatccagtagtcagcaggatgtcatattaacaacacaagatatttttgaggatgatatatttgctacggaagcaattaaaccctctcagaaaaccagagagaaggagaaaacattggaatctaatttatttgatgataacattgatatctttgctgacttaactgtaaaaccaaaagaaaagtccaaaaagaaagtggaagccaagtctatatttgatgatgatatggatgacatcttctcctctggtatccaggctaagacaaccaaaccaaaaagccgatctgcacaggccgcacctgaaccaagatttgaacacaaggtgtccaacatctttgatgatcccctgaatgcctttggaggccagtagagcacacagggtatccacatgttaccctgcagctacattgttgagttagtgatgatgttgtatatgctgatggtcttaactggattacaaaaagcaaatactagaacagctagctcatcgttcacccaatgtacttggtatttttctgcactggtttaatcatgcttaatactacaaaacaaaaataaatatttcacagtggttggtttgttttgtttttaaaccacagtttgatttagttagccttgctggggccataatatgcttcagggtgtgtaaaagaagaaatctctttgtggctttcatgggcagggaatctcagagatagcaaatgccacctgaccagaagtctttgttatatggatgggaaccctaacttagggcttgggcaggggaaagagaaagaagatgagagattatacttcatgagtcttagcaatatgggagcaggttttcactgaattctgagggtgcctctgcatgtcctccaaggcaaagtttggcaaactgtggcccccccactgtcatattttgttaataaaattttattggaacacaatc

SEQ ID NO: 5718 - DNA, 1497 bp, Homo sapiens
  SIMILAR (250)..(651): 801254mologous to Homo sapiens KIAA0592 protein,accession number AB011164,Smith-Waterman Score=554.
atgaacatggaaccctttggaagtatagtgattgcccttgaccatgtagtcagggaagccggtcctcttacatactggctcagggctgtaggggagagtcctcagagagagcccgatggaggccatgtcgccttctgtgttccagccttggaagtcaacggtggtccttttccttcatttgttggtcaagatggtcacaatggcccatccaggtttatggggagaggccataggctccccttcttgatggaaggacttttgactagatctgctcaggaaacagtcaagcattctgatttattttcttcatcatccccatgggacaaaggaaccaagcctagaaccaaaactgttcttagcttgtttgatgaggaagaggataaaatggaagatcaaaacattatccaggctccacagaaagaagtaggaaagggctgcgatcctgatgcccaccccaagagcacaggtgtcttccaggatgaagagctgcttttcagccacaagctccaaaaggacaatgacccagatgttgacctttttgctggcaccaaaaaaaccaaggtacaagagaaaaagagagtagtgaaaaaagaccactctgttaactctttcaaaaaccagaaacatcctgaatccattcaaggtagtaaagaaaaaggcatatggaagccggaaacacctcagataatgctggatggctgtgctgtcatcaaggaatattgtcgaacacaagctgtattgttgactgaaacgcacagtagatacctgaaggggaagggaagtcctaggcaacagagtgagaccctctctcaaaaacagataaagtggacagaaaataggtcagtaaggactaatcatttaagggacaagcccccagaagagtggctactagagtgggaggaggaaaagcagaaggagaaagagttgaagataggcgaggctgtggtcccagtgctgaattctgccaagcagtgacttgattcatgaacactcactggatgctgactctgtttctcttctgagtgctggggtagaggagaggagaggtggagcacagttcttgcttttatgagcttatgttctaggaagttcaagtatttttttcaggtagtatgaaatagcaggaagaggaagcaggctaaagggacacagagtgattgagggctattttaagtagaatgataaggaagagcctgtctagagagctatttgaacagtgacctgactgaagggacaacagaaagcagtgcgtgttgtcttaagccttccttaatgcctccattacctctccattctatcagtcctctctattaagtatcttgtcttcagaggccagaccccacaatccaaattcgtgatcagttcattgcgaatatcctagcaccatccacgcgcttactcgataatagcctgattcctcccagttccaagcactcatctacgattgctattttatctaggtaacaaaattattttatatatcttattttttgagac

SEQ ID NO: 5719 - DNA, 2196 bp, Homo sapiens
  SIMILAR (622)..(1683): 831254mologous to Homo sapiens aconitate hydratase,accession number U87939,Smith-Waterman Score=1541.
atggtgccctacagcctactggttacttggctgcagaaagctctgggtgtgcggcagtaccatgtggcatcagtcctgtgccaacgggccaaggtggcgatgagaccctttgagcctaagtacatccactatgacctgctagagaagaacattaacattgtttgcaaatgattgaaccggcctctgaccctctcagagaagatcgtgtacagacacccggatgaccccaccagccaggaaattgagcggggcgggacgtacctgcagcagtggccggacagcgtgaccatgcaggatggacggcccagatggccatgctgcagttcatcagcagcaggctcccaaggtgaccatgccatccaccatccactgtgaccatctgattgaggcccagctcgggagtgagaaagacctgcaccaggccaaggacatcaaccacgaagtttataatttcctggcaactggaagtgtcaaatatggcttgagcttctggaagcctggatctggaatcattcaccagattattctggaaaactatgaatatcctggggttcttctgattggcactgactcccacacccccaatggtggcagcctggggggcatctgcattggagttgggggtgccgagctgtggatgtcatgactgggatcccctgggagctgaagtgccccaaggtgattggcgtgaagctgatgggctccctctctggttggacctcacccaaagatgtgatcctgaaggtggcaggcatcctcaccatgaaaggtggcacaggtgcaatcgtggaataccacgggcctgttgtagactccatctcctgcactggcatggtgacagtctgcaacatgggcttagaaattgggaccaccacttccgtgttccattacaacctcaggatgaagaagtacatgagcaagacctgccaggcagacattgccaatctagctgatgaattcaaagatcacttggtgcctgaccctgggtgccattatgaccaactaattgaagttaaccccagtgaactgaagctgcacatcaatgggcccttcacccctgacctggctcaccctgtggcagaagtgggcaaggtggcagagaaggaagaatggcctctggacatctgagtgggtctgtggggcagctgcaccaattcaagctatgaagatatggggtgctcagcaggtgtggccaagcaggcactggcccatggcctcaagtgcaagtcccagttcactattactccatgctccgagcagatccgtgcctccattgagcaggatggctatgcacagaccttgagggatgtgggtggcatcgtcctggccaatgcttgtggcccctgcattggtcagttgcacagaaaggacatcaacaagcaggagaagaacataattgtcacctcctacaacaggaacttcatgggccacaatgacacgaaccccgagacccatgccttcatcacatccccagagactgtcacagccctggccattgtgggaaccctcaagttcaacccagagaccaactacctgacaggcaaggatggcaagaagttcaagctggaggctccggatgcagatgagcttccccaagcagagtttggcccagggcaggacacctaccagcacccccgcatggggtaccactgaccacatctcagctgccggcccctgactcaagttccgtgggcacttggacaccatctccaacaacttgctcagtggtgccatcaacattgaaaatggcaaggccaactctgtgcacgatgctgtcacccacgagtttggccccttccctgacactgcccgctacaagaaatatggcatcagttgggtggtgattggggactagaactatggcaagggctcaagctgggagcacgccgcgctggagcctcgccacctcagggggccgggccatcatcaccaagagctttgccaggattcacgagaccaacctgaggaggcagggcctgctgcccctgaccttcgctgacccagctgacaacaagattcaccttgtggacaagctgaccattcagagcctgaaggacttgacgctggcaagcccctgaagtacatcgtcaagcaccccaggaaatcaacctcctgaaccacaccttcaacgagacggagatcgagtggttcagggccggcagtgccctctacagaacgaaggagcagcagcaatga

SEQ ID NO: 5720 - DNA, 1205 bp, Homo sapiens
  SIMILAR (3)..(629): 881254mologous to Homo sapiens dJ347H13.1 (aconitase 2, mitochondrial (Aconitate Hydratase, EC 4.2.1.3, Citrate Hydrolyase)),accession number AL023553,Smith-Waterman Score=965.
caatggcccatggcctcaagtgcaagtgccagttctccatcactccaggttccgagcagatccgcgccaccattgagcgggacggctatgcacagatcttgagggatatgggtggcattgtcctggccaatgcttgtggcccctgcattggccagtgggacaggaaggacatcaagaagggggagaagaacacaatcgtcacctcctacaacaggaacttcacgggccgcaacgacgcaaaccccgagacccatgcctttgtcacgtccccagagattgtcacagccctggccattgcgggaaccctcaagttcaacccagagaccgactacctgacgggcacggatggcaagaagttcaggctggaggctccggatgcagatgagcttaacaaaggggagtttgacccagggcaggacacctaccagcacccacccaaggacagcagcgggcagcatgtggacgtgagccccaccagccagcgcctgcagctcctggagccttttgacaagtgggatggcaaggacctggaggacctgcagatcctcatcaaggtcagcagcatggggacggcaggacagccccaccctgccagggccccccgtcccctgagcatcgggaagggccatgaacctggaggaagtgagcacagtcaagacgcagagctagatctggccagcctccgtctggggccctcagccatccagcagcagctgatcagagccacctccagtgggtgtgggcagattgtcacagccctggccattgcgggaaccctcaagttcaacccagagaccgactacctgacgggcacggatggcaagaagttcaggctggaggctccggatgcagatgagcttcccaaaggggtatttattcgcgataagctcatggagcggcgtaaccgtcgcacaggaaggacagagaaagcgcggatctgggaagtgacggacagaacggtcaggacctggattggggaggcggttgccgccgctgctgctgacggtgtgacgttctctgttccggtcacaccacatacgttccgccattcctatgcgatgcacatgctgtatgccggtataccgctgaaagttctgcaaagcctgatgggacataagtccatcagttcaacggaagtctacacgaaggtttttgcgctggatgtggctgcccgcacccggtgcaagttgcgatgcccgatctga

SEQ ID NO: 5721 - DNA, 1428 bp, Homo sapiens
  SIMILAR (921)..(1418): 701254mologous to Homo sapiens mitochondrial aconitase,accession number U80040,Smith-Waterman Score=584.
taatgtgtgtggagatataaggtgtgtaatgaaggagctgtttacaggataccatggaagctcagaggagggagccccttaagaacaagcctagttaacccccctccccaaaagggccagggttctcttcaggtactcctgctgtgagacaagaatggcagaatgactcccatgccctgacagttggacgagatcaagctcccaaggcgccgtctgctttcatgggtttgctcttccagatgctggaagcatcttcaccccattttcttactgcattttccagaccttgtagatacaatatattctcttttaaaacaaacacagacgtgacccgtctttgtcaatgtgacccgatctttgcacaaaatggtgccctacagcctactggttacttggctgcagaaaggaagaacattaacattgtttgcaaatgattgaaccggcctctgaccctctcagagaagatcgtgtacagacacccggatgaccccaccagccaggaaattgagcggggcgggacgtacctgcagcagtggccggacagcgtgaccatgcaggtgattggcgtgaagctgatgggctccctctctggttggacctcacccaaagatgtgatcctgaaggtggcaggcatcctcaccatgaaaggtggcacaggtgcaatcgtggaataccacgggcctgttgtagactccatctcctgcactggcatggtgacagtctgcaacatgggcttagaaattgggaccaccacttccgtgttccattacaacctcaggatgaagaagtacatgagcaagacctgccaggcagacattgccaatctagctgatgaattcaaagatcacttggtgcctgaccctgggtgccattatgaccaactaattgaagttaaccccagtgaactgaagctgcacacccatggcctcaagtgcaagtcccagttcactattactccatgctccgagcagatccgtgcctccattgagcaggatggctatgcacagaccttgagggatgtgggtggcatcgtcctggccaatgcttgtggcccctgcattggtcagttgcacagaaaggacatcaacaagcaggagaagaacataattgtcacctcctacaacaggaacttcatgggccacaatgacacgaaccccgagacccatgccttcatcacatccccagagactgtcacagccctggccattgtgggaaccctcaagttcaacccagagaccaactacctgacaggcaaggatggcaagaagttcaagctggaggctccggatgcagatgagcttgagtgcggcgcctccccagcaaccccccctccccctcttcccccctcccccagctggtgtcatgttcaagttcggctctacatgcatcataagcggatccgatccatccagccatggcttcttattc

SEQ ID NO: 5722 - DNA, 615 bp, Homo sapiens
  SIMILAR (1)..(609): 981254mologous to Homo sapiens dJ347H13.1 (aconitase 2, mitochondrial (Aconitate Hydratase, EC 4.2.1.3, Citrate Hydrolyase)),accession number AL023553,Smith-Waterman Score=1069.
attctggaaaactatgcgtaccctggtgttcttctgattggcactgactcccacacccccaatggtggcggccttgggggcatctgcattggagttgggggtgccgatgctgtggatgtcatggctgggatcccctgggagttgaagtgccccaaggtgattggcgtgaagctgacgggctctctctccggttggtcctcacccaaagatgtgatcctgaaggtggcaggcatcctcacggtgaaaggtggcacaggtgcaatcgtggaataccacgggcctggtgtagactccatctcctgcactggcatggcgacaatctgcaacatgggtgcagaaattgtggccaccacttccgtgttcccttacaaccacaggatgaagaagtacctgagcaagaccggccgggaagacattgccaatctagctgatgaattcaaggatcacttggtgcctgaccctggctgccattatgaccaactaattgaaattaacctcagtgagctgaagccacacatcaatgggcccttcacccctgacctggctcaccctgtggcagaagtggggcaggtggcagagaaggaaggatggcctctggacatcctagtggacgcc

SEQ ID NO: 5723 - DNA, 381 bp, Homo sapiens
  SIMILAR (295)..(236): 501254mologous to Homo sapiens Human secreted protein, SEQ ID NO: 5576,accession number G01495,Smith-Waterman Score=64.
tcaaggtgtacaataatagagtagagacagccaagtagcaatatatttctgagttgcaattccttgcctccactgtgagacaaaccccagccacatctccagcacacaagaacttccaaacgcctgaaccgcagcagccaggcattcctccagaacctcctcccccaggagcttgctacaagtgctggaaatctggccatcaggccaaggaatgcctgcagcctgggattcctcgtaagccgcgtcccatctctggcagccactcccagagccccctggaactctggcccaaggctctctgactgactccttcccagatcttctcggcttagcagctgaagactgacactgcccgatcgcctcggaagccctgtagaccat

SEQ ID NO: 5724 - DNA, 452 bp, Homo sapiens; identical to SEQ ID NO: 240
  SIMILAR (170)..(262): 701254mologous to Homo sapiens Human secreted protein, SEQ ID NO: 5576,accession number G01495,Smith-Waterman Score=118.
  misc_feature (1)...(452): n = a,t,c or g

SEQ ID NO: 5725 - DNA, 648 bp, Homo sapiens
  SIMILAR (647)..(534): 841254mologous to Homo sapiens Human secreted protein, SEQ ID NO: 5576,accession number G01495,Smith-Waterman Score=166.
gcatgatctcacttatttgtgggatctaatatagtcaaacccgttgaaacagatagtagagtggtgataacatgtacctgcaaaccgttgccccttggccaatgcttgggttcaggtatatgcacaccaatgacaaggtccattttttggaagatatatcttaggaaaagcctgcacaggtctggagatgggcttagagccatttggaaagggtgttcttgggtacttgctacccatggtaatctagaagcggcagtgcagtctccaggtgagcatcctcttggttccataagcccacgtacctgactcttctttctgtccaagagctttgacttcttcactgacttcccatccctgccactcatcacatagccactttttctcgaccaggtccccaaagacctctcccttctacatgtacaggttacctgtaaagggaagcccatcagactaacagcagacatctcagacacttaccaaggaagagctccaccaggttcagagcctgcatggagggttcctagcaactcacctggcagccactcccagagcccctggaactctggcccaaggctctctgactccttcccagatcttctcggcttagcgactgaagactgatgctgcccgatcgcctcggaatcccca

SEQ ID NO: 5726 - DNA, 411 bp, Homo sapiens
  SIMILAR (240)..(353): 841254mologous to Homo sapiens Human secreted protein, SEQ ID NO: 5576,accession number G01495,Smith-Waterman Score=159.
atgatcgggtcagagaaaaagcacaaggcagctcagaggtattacttctcagtatggcatccccatttgaaacagctgcaaaacaagccacagcttgggaatgtggcaaggtttcagcagcgtggaggtgaaaggcaagagttgcatggacagattctctgcaaggtgctgagcaaggtagcagacatgccaggtcttgagtgcattgtgtctagaggtagagcacagaggaggaaaagggggattctgaggcgatcgggcagcttcagtcttcagctgctaagccaagaaggtctgggaaggagtcagagagccttgggccagagttccaggggctctgggagtggctgccaaggtgagtgggacagtccgatttccagtggggtcccgcacagatgggacgcggcttag

SEQ ID NO: 5727 - DNA, 357 bp, Homo sapiens
  SIMILAR (40)..(153): 841254mologous to Homo sapiens Human secreted protein, SEQ ID NO: 5576,accession number G01495,Smith-Waterman Score=165.
atgggggctgtctgtgaagccttgcggcagtacagcccaggggcttccgaggcgattgggcagcgtcagtcttcagctgctaagccaagaagatctgagaaggagtcagagaaccttgggccagagttccaggggctctgggagtggctgccagtaccacaagtcctagctagagaaatcagggatgaaaaagaaataaaaggcatccaaattggaaaagagcaagtcaagttgtccctttttgatgatgacataatcttaaatatagctaaacgtacagaccaccaaaaaactgttagaatggataaactaattgagtcaattgcaggatataaatcagcatataaaactcactag

SEQ ID NO: 5728 - DNA, 942 bp, Homo sapiens
  SIMILAR (562)..(930): 641254mologous to Homo sapiens reverse transcriptase homolog= pol {retroviral element},accession number S61070,Smith-Waterman Score=403.
atgaaagtctggaagaattacaccattgaagatgccactgttgctacagaaaaagctgtgaaagccatcaagcctaaaacaataaattcctactggaaaaactgtgtccagatgttgtgcatgaccttaaggacttacaacagagacaatcaaacaaatcatgaaagagatagcggatatggcaaaaatgatgtgttggaggggggttcaagatatgaatcttggagaatcttggagttaatagacagcacacaggaggaattaatggaaggagatttgatggagctgcgtcccatctctgcgggaccccactggaaattggactgtccaactatcccagcagccactcccagagcccctggaactctggcccaaggctctctgactccttcccagatcttcttggttcagcagctgaagactgatgctgcccgatcgcctcggaagcctcctggaccatcacagatgctttgggtaactcttacagtggagggatcttctccctttcctcatatttctaatcttcccattccaaacccggaccacacttggtttattgatggcggttcttctaaacccaatcaattttcaccagctaaagctggatatgctgtcatgtcccacacctctattattgaagctgctgcacttcctccctccaccacttcccaacaagccaaactgattgctttaactcgtgtgctctctctagctaaaggaatgcacattaacatttatactgactccatatatgctttccacatcctccataaccatgctgccatctgggtcaaaagaggcttccttaccacacaaagctcttccactaataatgcctccctaatagaggcccttaaggttgttctcctgccagccaaggctggaatcattcattgtaaaggacaccagaaacctactgatcttattgcaaaaaaaaaataa

SEQ ID NO: 5729 - DNA, 420 bp, Homo sapiens; identical to SEQ ID NO: 448
  SIMILAR (106)..(219): 841254mologous to Homo sapiens Human secreted protein, SEQ ID NO: 5576,accession number G01495,Smith-Waterman Score=161.

SEQ ID NO: 5730 - DNA, 294 bp, Homo sapiens
  SIMILAR (30)..(110): 741254mologous to Homo sapiens Human secreted protein, SEQ ID NO: 5576,accession number G01495,Smith-Waterman Score=78.
ccctgtgagagttacctagagcatctgtgatggtcctgtaggcttctgaggcgattgggcagtgtcagtcttcagctgctaagctgagaagatctgggaaggagtcagtcagagagccttgggccagagttccaggggctctgggagtggctgccagagagacagatagtaaatattttgggctctgtgggccatatggtctctatggcaactactcatccctgccactgtcacaagaaagcagccatagatggaggttaccaacgacagttagaggtaactattgatctctga

SEQ ID NO: 5731 - DNA, 819 bp, Homo sapiens
  SIMILAR (1)..(426): 861254mologous to Homo sapiens putative p150,accession number U93565,Smith-Waterman Score=672.
atgagtgaactcccattcacaattgctacaaagaaaataaaatacctaggaatacaacttacaacggatgtgaaggacctcttcaaggagaactacaaaccactgctcaatgaaataaaagaggacacaaacaaatggaagaacattccatgctcatggataggaggaatcaatatcatgaaaatggccattctgcccaaggtaatttatagattcaatgctctccccatcaagataccaatgactttcttcacagaattggaaaaaactactttaaatttcatatggaaccaaaaacgagcccgcatagccaaaacaatcctaagcacaaagaacaaagctggaggcatcacactagctgacttcaaactgtactacaagcctacactagtcaaaacagcatggtactggtaccaaaacagagaagaaaacctaggcaataccattcaggacataggcatgggcaaaaacttcatgactaaaacaccaaaagcaatggcaacaaaagccaaaatagacaaaagggatctaattaaaccaaagagcttctgcatagcaaaagaaactaccatccgtatgaacaggcagcctacagaatgggagaaactttttgcaatctacccgtctgacaaagcgctaatatccggaatctacaaagatcttaagcaaatttacaagaaaaaaaacaaccccatcaaaaagtgggcaaaggagatgaacagacacttctcgaaagaagacatttatgcagccaacagacacgtgaagaatgctcatcatcactggtcatcagagaaatgcaaatcaaaaccacaatga

SEQ ID NO: 5732 - DNA, 600 bp, Homo sapiens
  SIMILAR (482)..(372): 721254mologous to Homo sapiens putative p150,accession number U93570,Smith-Waterman Score=135.
tcatatccttggcccactttttgatggagttgtctttttcttgtaaatttgtttaagttctttgtagatgctggatattagccctttgtcagatgggtagattgcaaagattttctcccattctttaggttgcctgttcactctggtgatagtttcttctgctgtgcagaagctctttagtttaattagatcccatttgtcaattttggcttttgttgccattgcttttggtgttttagtcatgaagtctttgcccatgcctatgtcctgaatggtactgcctaggttttcttctagggtttttatggttttaggtctaacatttaagtctttaatccatcttgaattaatttttgtataaggtgtgaggaagggatccagtttcagctttctacatatagcttgggcagtatggccattttcatgatattgattcttccaatccatgagcatggaatgttcttccgtttgtttgtgtcctcttatttcattgagcagtgatttgtagttctccttgaagaggtccttcacatcccttgtaagttgtattcccaggtattttattctctttgtagtaattgtgaatgggagttcactcat

SEQ ID NO: 5733 - DNA, 1047 bp, Homo sapiens
  SIMILAR (364)..(1044): 941254mologous to Homo sapiens putative p150,accession number U93574,Smith-Waterman Score=1172.
atgattgtatatctagaaaacaccattgtctcagcccaaaatctccttaagctgataagcaacttcagcaaagtctcaggatacaaaatcaatgtacaaaaatcacaagcattcttatacaccaacaacagacaaacagagagccaaatcatgagtgaactcccattcacaattgcttcaaagagaataaaatacctaggaatccaacttacaagggatgtgaaggacctcttcaaggagaactacaaaccactgctcaaggaaataaaaaaggatacaaacaaatggaagaacattccatgctcatgggtaggaagaatcaatatcgtgaaaatggccatactgcccaagaattggaaaaaactaaagttcatatggaaccaaaaaagagcccacatcgccaagtcaatcctaagccaaaagaacaaagctggaggcatcacactacctgacttcaaactatactacgaggctacagtaaccaaaacagcatggtactggtaccgaaacagagatatagatcaatggaacacaacagagccctcagaaataatgccgcatatctacaactatctgatctttgacaaacctgagaaaaacaagaaatggggaaaggattccctatttaataaatggtgctgggaaagctggctagccatatgcagaaagctgaaactggatcccttccttacgccttatacaaaaatcaattcaagatggattaaagacttaaacgttagacctaaaaccataaaaaccctagaagaaaacctaggcattaccattcaggacataggcatgggcaaggacttcatgtctaaaacaccaaaagcaatggcaacaaaagccaaaattgacaaatgggatctaattaaactaaagagcttctgcacagcaaaagaaactaccatcagagtgaacaggcaaactacaaaatgggagaaaattttcgcaacctactcatctgacaaagggctaatatccagaatctgcaatgaactcaaacaaatttacaagaaaaaaacaaacaaccccatcaaaaagtga

SEQ ID NO: 5734 - DNA, 528 bp, Homo sapiens
  SIMILAR (199)..(525): 971254mologous to unidentified cloning vector 29kD protein essential for the replication of mini F plasmid,accession number AB015619,Smith-Waterman Score=554.
atgactgaactcccattcacaattgctacaaagagaataaaatacctaggaatccaacttacaagggatgtgaaggacctcttcaaggagaactacaaaccactgctcaaggaaataaaagaggacacaaacaaatggaagaacattccatgctcatgggtaggaagaaacaatatcgtgaaaatggccacactgcccaagaaccggtttacgttgtttcggcttagtgaaacatatgaaatcaccaatccgtatgccatgcgtttatacgaatccctgtgtcagtatcgtaagccggatggctcaggcatcgtctctctgaaaatcgactggatcatagagcgttaccagctgcctcaaagttaccagcgtatgcctgacttccgccgccgcttcctgcaggtctgtgttaatgagatcaacagcagaactccaatgcgcctctcatacattgagaaaaagaaaggccgccagacgactcatatcgtattttccttccgcgatatcacttccatgacgacaggatag

SEQ ID NO: 5735 - DNA, 480 bp, Homo sapiens
  SIMILAR (115)..(333): 981254mologous to Canis familiaris Band4.1-like5 protein,accession number AJ401272,Smith-Waterman Score=381.
atgagtgaactcccattcacaattgctacaaagagaataaaatacctgggaatacaactcacaagggatgtggaggacctcttgaaggagaactacaaaccacagctcaaggaacattggttggatggtacaaaaagcatcaaaaagcaagtaaaaattggttcaccctattgtctgcatcttcgagttaagttttattcctcagaaccaaataaccttcgtgaggagctaacccggtatttatttgttcttcagttaaaacaagatattctcagtggaaaattagactgtccctttgatacagcagtgcaattggcagcttataatctgcaagaacattgccttctttttcttctctttcatgtaattgcgccctttccacctaaagtgttgaaacgtcatactctacctgataagtctgtaaatgctaagattgggccttcggctaactttttccttaaaagaaatgcagttatgtag

SEQ ID NO: 5736 - DNA, 1443 bp, Homo sapiens
  SIMILAR (1)..(576): 891254mologous to Homo sapiens putative p150,accession number U93564,Smith-Waterman Score=890.
atgtccctgtttgcagatgacatgattttatctgtagaaaaccccatcgtctcaccccaaaatctccttaagctgataagcaacttcagcaaagtcttaggatacaaaatcaatgtgcaaaaatcacaagcattcctatacaccaataacagacaaagagggagccaaatcatgagtgaactcccattcacaattgctacaaagagaataaaatacctgggaatccaacttacaagggatgtgaaggacctcttcaaggagaactacaaaccactgctcaatgaaataaaagaggacaaaaacaaatggaagaacattccatgctcatggataggaagaataaatatcatgaaaatggccatacagcccaaggtaatttatagattcaatgccatccccatcaaactaccagtgactttcttcacagaattggaaaaaactactttgaggtccatatggaaccaaaaaagagcccacatagccaagacaatcctaagtaaaaagaacaaagctggaggcatcacgctacctgacttcaaactatactacaaggctacagtaaccaaaacagcatggtgttttagcaaagcagtgctgctgccacctctcaacaccactgctatagtgtctatccacgatgaacaatggaatgctagaaggtcttctcttgctagccacaaagaagcagatgccaccatctgtgtgaccaccaaggcctggagacgtaggaggcaaaaacggttttgtggactgggccgagggtccctgtgctgtgtgcagcctagggacttggtgccctgtgtcctagccactccagttgtggctgaaagtggccaatgtaaaactcagaccatggcttcagagagtcacctgctgtttcctgactttttaatgattgccattctaactggtgtgagatggtatctcattgtggttttgatttgcatttctctgatggccagtgatgattttgtggcaccaaatgtagataagatactgtctgatagagaacaagaatttggaatattagcgacagaagaaggaaaaacagaaaaggcagccacgtatacaagggacatggatgaaattggaaatcgtcattctcagcaaactatcacaaggacaaaaaaccaaacaccgcatgttctcactcatagatgggaattaaacaatgagaacacatggacacaggaaggggaacatcacactctggggactgttgtggggtgggtggccttctacacagagtggaattgcatggaagttcacactgggcccacgctggcagtgtactggaatgaacacaaccagccaatccaaatttttgctaacaaggtaccagggaaatacaattatgttcacttcagcatcacagaaatggaaggaattcaatttctgcatggaatcccagaaattgaatcccagcatgggagaaagaaataa

SEQ ID NO: 5737 - DNA, 708 bp, Homo sapiens
  SIMILAR (55)..(519): 931254mologous to Homo sapiens putative p150,accession number U93564,Smith-Waterman Score=709.
atggggcctgaaatctgcacatccgacaagctctcagatgaggctgatgtcactgtgttggaagttctggccagggcaatcaggcaggagaaggaaataaagggtattcaattaggaaaagaagaagtcaaattgtccctgtttgcagatgacatgattgtatatctagaaaaccccatcgtctcagcccaaaatctccttaagctgataagcaacttcagcaaagtctcaggatacaaaatcaatgtgcaaaaatcacaagcattcttatataccaataacagacaaacagagagccaaatcatgagtgaactcccattcacaattgcttcaaagagaataaaatacctaggaatccaacttacaagggatgtgaaggacctcttcaaggagaactacaaaccactgctcaaggaaataaaagaggaacattccatcaaatggaagaacattccatcctcatgggtaggaagaatcagtatcatgaaaacggccatactgcccaaggtctacatccggataaaagacgatgaatggaatatttatcgccggtatacagagttcaggagtttgcaccacaagttacaaaacaagtaccctcaagtgagggcctacaacttcccacccaaaaaggccattggaaacaaggaagcagttctctgtcatggccgtgctttggatcccctggggagctttgaaaaccactga

SEQ ID NO: 5738 - DNA, 870 bp, Homo sapiens
  SIMILAR (262)..(564): 941254mologous to Homo sapiens putative p150,accession number U93563,Smith-Waterman Score=495.
atggagctgaaaaccaaggctcgagaactacatgaagaatgcagaagcctcaagagccaatgtgatcaactggaagaaagggtattagcgatggaagatgaaatgaatgaaatgaaactaaaccaggaagaagttgaatctctgaatagaccaataagaggctctgaaattgtggcaataatcaatagcttaccaaccaaaaagagtccaggaccagatgcattcacagccgaattctaccagaggtacaaggaggaactgctgataagcaacttcagcaaagtctcaggatacgaaaacaatgtacaaaaatcacaagcattcttatacaccaacaacagacaaacagagagccaaatcatgagtgaactcccattcacaattgcttcaaagagaataaaatacctaggaatccaacttacaagggatgtgaaggacctcttcaaggagaactacaaaccactgctcaaggaattaaaagaggatataaacaaatggaagaacattccatgctcatgggtaggaagagtcaatatcatgaaaatggccatactgcccaaggtatgggaggaactaaggcatctaaggtctggaatagaccccagcaaaccagcagcactacagaagaatgaccctacagttaaaagaaaatcaaacaaacagaaagcgacaacaaaaacaacatcaacagaaaagaccccacaaaaatcctattcaaaggtcagcgacctcaaaaatcaaaggagacggaagcatccaaccttaaatgctaccgtggggccagagcccccagaaagcactgactctggcaactgcaccggaacaacggaaggacacccctcctgtaaggggtttgagcttacaagatga

SEQ ID NO: 5739 - DNA, 1170 bp, Homo sapiens
  SIMILAR (628)..(1167): 991254mologous to Cloning vector pZC320 SopB,accession number U26464,Smith-Waterman Score=884.
atgaaggcgagctgccgcctaagagggaggagggtcctttcggctgccgctgctgctgttccgggacgccgcctggggagccagcccgctcagggcgagcggcgcggccacggaggcgccgaggaggagcgagccgccgccgggcagcggcgtgccctcgggggagagggcgccggagaggaggcggcggcgcggcggcgagggcgcggcgcgcgatggcagctgcttagcccggcgggcgcggagcagccccgagctgtggctggccaggcggatctggctctgaaggggctacgtgttttgctcgtggaagcccaaaatctccttaagctgataagcaacttcagcaaagtctcaggatacaaaatcaatgtacaaaaatcacaagcattcttatacaccaacaacagacaaacagagagccaaatcatgagtgaactcccattcacaattgcttcaaagagaataaaatacctaggaatccaacttacaagggatgtgaaggacctcttcaaggagaactacaaaccactgctcaaggaaataaaagaggacacaaacaaatggaagaacattccatgctcatgggtaggaagaatcaatatcgtgaaaatggccatactgcccaagatggctgcattatccagattgggtaacgattatcgcccaacaagtgcttatgaacgtggtcagcgttatgcaagccgattgcagaatgaatttgctggaaatatttctgcgctggctgatgcggaaaatatttcacgtaagattattacccgctgtatcaacaccgccaaattgcctaaatcagttgttgctcttttttctcaccccggtgaactatctgcccggtcaggtgatgcacttcaaaaagcctttacagataaagaggaattacttaagcagcaggcatctaaccttcatgagcagaaaaaagctggggtgatatttgaagctgaagaagttatcactcttttaacttctgtgcttaaaacgtcatctgcatcaagaactagtttaagctcacgacatcagtttgctcctggagcgacagtattgtataagggcgataaaatggtgcttaacctggacaggtctcgtgttccaactgagtgtatagagaaaattgaggccattcttaaggaacttgaaaagccagcaccctga

SEQ ID NO: 5740 - DNA, 963 bp, Homo sapiens
  SIMILAR (680)..(772): 771254mologous to Homo sapiens putative p150,accession number U93563,Smith-Waterman Score=123.
atgaccccagcttattacctggacagagtttcccggcagtggtacaaggacagggaactgaggcaaagcccagtagatgaggagatgcagctgggaatccagggagacctagacagacaaacagagagccaaatcatgagtgaactcccattcacaattgcttcaaagagaataaaatacctaggaatccaacttacaagggatgtgaaggacctcttcaaggagaactacaaaccactgctcaaggaaataaaagaggacacaaacaaatggaagaacattccatgctcatgggtaggaagaatcaacatcgtgaaaatggccatactgcccaaggcaatttatagattcaatgccatccccatcaagctaccaacgactttcttcacagaattggaaaaaactactttaaagttcatatggaaccaaaaaagagcccacatcgccaagtcaatcctaggccaaaagaacaaagctggaggcatcacgctacctgacttcaaactatactacaaggctacagtaaccaaaacagcatggcactggtaccaaaacagagatatagatcaatggaacacaacagagccctcagaaataacgccgcatgtctacaactatctgatctttaacaaacctgagaaaaagaagcaatggggaaaggattccctatttaataaatgggacatggatgaagttggaaaccatcattctcagcaaactatcacaaggacaggaaaccaaacaccacatgtttttactcatagatgggaattgaacaatgagatcacttggacacagggtgcgggacatcacacaccagggcctgttgtggggttgggggctggcagagggatagcattacgagaaatacctaatgcaaatgatgagttgatggtgcagcaaaccaacatggcacatatatacctatgtatcaaacctgcacgttgtgcagacgtaccctag

SEQ ID NO: 5741 - DNA, 1050 bp, Homo sapiens
  SIMILAR (592)..(1047): 981254mologous to unidentified cloning vector 29kD protein essential for the replication of mini F plasmid,accession number AB015619,Smith-Waterman Score=802.
atgaggaaaagccagcacaaaaaggctaaaaattccaaaaaccagaacacctcttctcttccaaaggatcacaactcctcaccagcaagggaacaaaactggatggagaatgagtttgatgaattgacagaagtaggctccagaagtattggaagttctggtcaggacaatcaggcaagagaaaaaataaaggatattcaaataggaagagaggaagtcaaattgtctctgtttgcagatgatatgattgtatatttggaaaaccccatcgtctcagccccaaatctccttaagctgataagcaacttcagccaagtctcaaaatataaaatcaatgtgcgaaaatcacaagcattcctatacaccaataatagacaaacagagagccaaatcatgagtgaactcccattcacaattgctacaaagagaataaaatacctaggaatacaacttacaagggatgtgagggacctcttcaaggagaactacgaaccactgctcaatgaaataaaaaaggacacaaacaaatggaagaaccattccatgctcatggataggaagaatcaatattgtgaaaatggccatactgcccaagaggatcccggcgatgaaaaaggctatgaatcttttccttggtttatcaaacgtgcgcacagtccatccagagggctttacagtgtacatatcaacccatatctcattcccttctttatcgggttacagaaccggtttacgcagtttcggcttagtgaaacaaaagaaatcaccaatccgtatgccatgcgtttatacgaatccctgtgtcagtatcgtaagccggatggctcaggcatcgtctctctgaaaatcgactggatcatagagcgttaccagctgcctcaaagttaccagcgtatgcctgacttccgccgccgcttcctgcaggtctgtgttaatgagatcaacagcagaactccaatgcgcctctcatacattgagaaaaagaaaggccgccagacgactcatatcgtattttccttccgcgatatcacttccatgacgacaggatag

SEQ ID NO: 5742 - DNA, 3835 bp, Homo sapiens
  SIMILAR (720)..(4): 881254mologous to Homo sapiens putative p150,accession number U93572,Smith-Waterman Score=1165.
tcaattcccacctatgagtgagaatatgcggtgtttggttttttgttcttgcgatagtttactgagaatgatggtttccaatttcatccatgtccctacaaaggacatgaactcatcattttttatggctgcatagtattccatggtgtatatgtgccacattttcttaatccagtctatcattgttggacatttgggttggttccaagtctttgctattgtgaatagtgccgcaataaacatacgtgtgcatgtgtctttatagcagcatgatttatagtcatttgggtatatacccagtaatgggatggctgggtcaaatggtatttctagttctagatccctgaggaatcgccacactgacttccacaatggttgaactagtttacagtcccaccaacagtgtaaaagtgttcctatttctccacatcctctccagcacctgttgtttcctgactttttaatgattgccattctaactggtgtgagatgatatctcatagtggttttgatttgcatttctctgatggccagtgatgatgagcattttttcatgtgtctgttggctgcataaatgtcttcttttgagaagtgtctgttcatatccttcgcccacttttggatggggttgtttgatttttttcttgaaaatttgtttaagttctttgtagattctggatattagccctttgtcagatgggtggattgcaaaaaattttctcccattctgtaggttgcctgttcactctgatggtagtttcttttgctgtgcagaagctcttcagtttaattagatcccatttgtctattttggcttttgttgccattgcttttggtgttttagtcatgaagtccttgcgaatgcctatgtcctgtatggtattgcctaggttttcttctagggtttttatggttttaggtctaacatttaagtctttaatcctttttgaattaatttttgtgtaaggtgtaaagaagggatccagtttcagctttctacatatggctagccagttttcccagcaccatttattaaatagggaatcctttccccatttcttgtttttgtcaggtttgtcaaagatcagatggttgtagataggcagcattatttctgagggctctgttcttgttccattgatctatatctctgttttggtaccagtaccatgctgttttggttactgtagccttgtagtatagtttgaagtcaggtagtgtgatgcctccagctttgttcttttgtcttaggattgacttggcaatgcgggctcttttttggttccatatgaactttaaagtagtttttttccaattctgtgaagaaagtcattggtagcttgatggggatggcattgaatctgtaaattaccttgggcaagtatggccattttcacgatattgattcttcctacccatgagcatggaatgttcttccatttgtctgtatcctcttttatttccttgagcagtggtttgtagttctccttgaagaggtccttcacatcccttgtaagttggattcctaggtattttattctctttgaagcaattgtgaactgggagttcactcatgatttgggtctctgtttgtcttttatgggtatataagaatgcttgtgatttttgcagattgattttgtatcctgagactttgctgaagttgcttatcagcttaagaagattttgggctgagatgatggggttttctaaatatacaatcatgtcatttgcaaacagggacaatgtgacttcctcttttcctaattgaatacccttttatttctttctcctgcctgattgccctggccagaacttccaacactatgttgaataggagcggtgagagagggcatccctgtcttgtgccagttttcaaagggaatgcttccagtttttgcccattcagtatgatattggctgtgggtttgtcatagatagctcttattattttgaaatacgtcccatcaatacctaatttattgagagtttttagcatgaagggttgttgaattttgtcaaaggctttttctgcatctattgagataatcatgtggtttttgtctttggctctgtttatatgctggattacatttattgatttgcgtatattgaaccagccttgcatcccagggatgaagcccacttgatcatggtggataagctttttgatgtgctgctggattcggtttgccagtattttattgaggatttttgcatcaatgttcatcaaggatattggtctaaaattctcttttttggttgtgtctctgcccggctttggtatcagaatgatgctggcctcataaaatgagttagggaggattccctctttttctattgattggaatagtttcagaaggaatggtaccagttcctccttgtacctctggtagaattcggctgtgaatccatctggtcctggactctttttggttggtaaactattgattattgccacaatttcagagcctgttattggtccattcagagattcaacttcttcctgttttagtcttgggagagtgtatgtgtcgaggaatgtatccatttcttctagattttctagtttatttgcgtagaggtgtttgtagtattctctgatggtagtttgtatttctgtgggatcggtggtgatatcccctttatcattttttattgtgtctatttgattcttctctctttttttctttattagtcttgctagcggtctatcaattttgttgatcctttcaaaaaaccagctcctggattcattgattttttgaagggttttttgtgtctctatttccttcagttctgctctgattttagttatttcttgccttctgctagcttttgaatgtgtttgctcttgcttttctagttcttttaattgtgatgttagggtgtcaattttggatctttcctgctttctcttgtaggcatttagtgctataaatttccctctacacactgctttgaatgcgtcccagagattctggtatgtggtgtctttgttctcgttggtttcaaagaacatctttatttctgccttcatttcgttatgtacccagtagtcattcaggagcaggttgttcagtttccatgtagttgagcggctttgagtgagattcttaatcctgagttctagtttgattgcactgtggtctgagagatagtttgttataatttctgttcttttacatttgctgaggagagctttacttccaactatgtggtcgattttggaataggtgtggtgtggtgctgaaaaaaatgtatattctgttgatttggggtggagagttctgtagatgtctattaggtctgcttggtgcagagctgagttcaattcctgggtatccttgttgactttctgtctcgttgatctgtctaatattgacagtggggtgttaaagtctcccattattaatgtgtgggagtctaagtctctttgtaggtcactcaggacttgctttatgaatctgggtgctcctgtattgggtgcataaatatttaggatagttagctcctcttgttgaattgatccctttaccattatgtaatggccttctttgtctcttttgatctttgttggtttaaagtctgttttatcagagactaggattgcaacccctgcctttttttgttttccatttgcttggtagatcttcctccatccttttattttgagcctatgtgtgtctctgcacatgagatgggtttcctgaatacagcacactgatgggtcttgactctttatccaacttgccagtctgtgtcttttaattgcagaatttagtccatttatatttaaagttaatattgttatgtgtgaatttgatcctgtcat

SEQ ID NO: 5743 - DNA, 384 bp, Homo sapiens
  SIMILAR (184)..(285): 971254mologous to Homo sapiens 10-formyltetrahydrofolate dehydrogenase,accession number AF052732,Smith-Waterman Score=166.
atgagctcctctgaagccgtccttccagcacagaaactccaagttgccctgatttgtgttcacaaaggcaccagttttcagcagtttagaggactgagtggttctcaaagtggtccagagagctctggggccccgatacactttcaaggcatcttcaaggggtatggcagcaacttccagcaggtgcaggccgtgaggctgatcgctgagggcaaagcccccagactccctcagcctgaggaaggagccacctatgaggggattcagaagaaggagacagccaaggccaagaatgtggaaacagacaacaaatgtccgatcagccagattgaccaggttaatatggtcttatcttgtacagaggaaatagggattcagccataa

SEQ ID NO: 5744 - DNA, 3234 bp, Homo sapiens
  SIMILAR (1)..(3231): 1001254mologous to Homo sapiens The ha3631 gene product is related to S.cerevisiae protein encoded in chromosome VIII,accession number D42046,Smith-Waterman Score=5568.
ccccggttccgctgtcttttctgtctacagtttgcgatccccgcgtccaggatggagcagctgaacgaactggagctgctgatggagaagagtttttgggaggaggcggagctgccggcggagctatttcagaagaaagtggtagcttcctttccaagaacagttctgagcacaggaatggataaccggtacctggtgttggcagtcaatactgtacagaacaaagagggaaactgtgaaaagcgcctggtcatcactgcttcacagtcactagaaaataaagaactatgcatccttaggaatgactggtgttctgttccagtagagccaggagatatcattcatttggagggagactgcacatctgacacttggataatagataaagattttggatatttgattctgtatccagacatgctgatttctggcaccagcatagccagtagtattcgatgtatgagaagagctgtcctgagtgaaacttttaggagctctgatccagccacacgccaaatgctaattggtacggttctccatgaggtgtttcaaaaagccataaataatagctttgccccagaaaagctacaagaacttgcttttcaaacaattcaagaaataagacatttgaaggaaatgtaccgcttaaatctaagtcaagatgaaataaaacaagaagtagaggactatcttccttcgttttgtaaatgggcaggagatttcatgcataaaaacacttcgactgacttccctcagatgcagctctctctgccaagtgataatagtaaggataattcaacatgtaacattgaagtcgtgaaaccaatggatattgaagaaagcatttggtcccctaggtttggattgaaaggcaaaatagatgttacagttggtgtgaaaatacatcgagggtataaaacaaaatacaagataatgccgctggaacttaaaactggcaaagaatcaaattctattgaacaccgtagtcaggttgttctgtacactctactaagccaagagagaagagctgatccagaggctggcttgcttctctacctcaagactggtcagatgtaccctgtgcctgccaaccatctagataaaagagaattattaaagctaagaaaccagatggcattctcattgtttcaccgtattagcaaatctgctactagacagaagacacagcttgcttctttgccacaaataattgaggaagagaaaacttgtaaatattgttcacaaattggcaattgtgctctttatagcagagcagttgaacaacagatggattgtagttcagtcccaattgtgatgctgcccaaaatagaagaagaaacccagcatctgaagcaaacacacttagaatatttcagcctttggtgtctaatgttaaccctggagtcacaatcgaaggataataaaaagaatcaccaaaatatctggctaatgcctgcttcggaaatggagaagagtggcagttgcattggaaacctgattagaatggaacatgtaaagatagtttgtgatgggcaatatttacataatttccaatgtaaacatggtgccatacctgtcacaaatctaatggcaggtgacagagttattgtaagtggagaagaaaggtcactgtttgctttgtctagaggatatgtgaaggagattaacatgacaacagtaacttgtttattagacagaaacttgtcggtccttccagaatcaactttgttcagattagaccaagaagaaaaaaattgtgatatagataccccattaggaaatctttccaaattgatggaaaacacgtttgtcagcaaaaaacttcgagatttaattattgactttcgtgaacctcagtttatatcctaccttagttctgttcttccacatgatgcaaaggatacagttgcctgcattctaaagggtttgaataagcctcagaggcaagcgatgaaaaaggtacttctttcaaaagactacacactcatcgtgggtatgcctgggacaggaaaaacaactacgatatgtactctcgtaagaattctctacgcctgtggttttagcgttttgttgaccagctatacacactctgctgttgacaatattcttttgaagttagccaagtttaaaataggatttttgcgtttgggtcagattcagaaggttcatccagctatccagcaatttacagagcaagaaatttgcagatcaaagtccattaaatccttagctcttctagaagaactctacaatagtcaacttatagttgcaacaacatgtatgggaataaaccatccaatattttcccgtaaaatttttgatttttgtattgtggatgaagcctctcaaattagccaaccaatttgtctgggccccctttttttttcacggagatttgtgttagtgggggaccatcagcagcttcctcccctggtgctaaaccgtgaagcaagagctcttggcatgagtgaaagcttattcaagaggctggagcagaataagagtgctgttgtacagttaaccgtgcagtacagaatgaacagtaaaattatgtccttaagtaataagctgacctatgagggcaagctggagtgtggatcagacaaagtggccaatgcagtgataaacctacgtcactttaaagatgtgaagctggaactggaattttatgctgactattctgataatccttggttgatgggagtatttgaacccaacaatcctgtttgtttccttaatacagacaaggttccagcgccagaacaagttgaaaaaggtggtgtgagcaatgtaacagaagccaaactcatagttttcctaacctccatttttgttaaggctggatgcagtccctctgatattggtattattgcaccgtacaggcagcaattaaagatcatcaatgatttattggcacgttctattgggatggtcgaagttaatacagtagacaaataccaaggaagggacaaaagtattgtcctagtatcttttgttagaagtaataaggatggaactgttggtgaactcttgaaagattggcgacgtcttaatgttgctataaccagagccaaacataaactgattcttctggggtgtgtgccctcactaaattgctatcctcctttggagaagctgcttaatcatttaaactcagaaaaattaatcattgatcttccatcaagagaacatgaaagtctttgccacatattgggtgactttcaaagagaataa

SEQ ID NO: 5745 - DNA, 1691 bp, Homo sapiens
  SIMILAR (313)..(104): 241254mologous to Bacteriophage P7 RepA protein,accession number J03308,Smith-Waterman Score=91.
tcgatcgtaaagttaggtgtctatggacctgtgtgaatgacagtggtaatgggcctcgtggaaggtccctgacgaaagcgcaaacggtccgcgtagtcctccctcctggaagggtattcactcttagtcgggaaaatgtcccggcggtactaactctcccatccctcttcccgtctcccgacggtcctggtatgaacatttttaagtgtactaatgtcataggtcgtatagcgccgcccgaaccaatcgccagcctccccgttccatccctaacgctcgtgcaaagaacactggagacaaacgaccgacctacaccatcccccttgaaccgcgcggacagcccccacaagcggcgacaatcatttaaggagccttctagtccaagatggcaattgaagcttccggcaacacatccaagtgtaagggaggaagaaggagtatgggaaacagggcaagaggatgcctgcaagctctgtcaggatgctttaatgaatttttccctgaagccccctctcattcccttgacccactggccaccatgctcttcctcaagacagggaagcctggggaaatggcctatttgttttaagctgagtatgttgtcacttccaacaatacaacagtgtcaaaaggaaagaagacaagacgaggagggtagagaaacaccgaacccacccgtaaaagaagaagtacaatcaagacacacacacccaatcctcgaggagtcgcccgagaaaaacaaagccaaaccttccccaacaaaaggcgcctcgccgtccgctctagaaatagagcgagagaagaacttacgaaaaagagacccacccggaccttcaaccaacgtacgcaaacataacaggaaaactgctagtaaccatcgaaagtcgttacgcagacccaaaattaacgtcaaaggaccccataccgcagtcccgctaaacaaccgtcattacctgtggactgtgtccagactgctcaaagatactcagtgctacagagttactcagtcctgcctgaagccctgcagacatccacggatgagctttctaagtgatacacgagagagctctccatgtattgagtttctccagggcaatcgaataggacaagcccacatcccaacaaggtgccgttctgggaaagctcccggaccatgtgaagtggggcttgcacagaaccacttcagagatcccaagatggcctcagaggattccagaagcagcagaattccagagaagataagtcgcgattgctcttgggagtcgtacgcgctagaggcccctattgctactattgaaatgtgtgagatgaaagggttctgcgacatgttcacccccacaggccaacgctacgacaacaacggccctccagatgctaggcggtatcccctggggaaacgcgtgtggaattttcacccgcccaccccctcaaacatacctaaacacgcacttgtctacgagataacaatttcgacaaacgtcctaacaacaccgaaaaaggaagagcacgagcacctaatacccttgcgctgtttccacctttccccccgtggtaccccgttccttcgcccccgtctatttagaaatgtcggcgaaagcaaaagacgtcgaagattagcccgggcgtatgagcgggccatacctgaatcggactcctatagtggcaagacttccgagagcccctgtttttga

SEQ ID NO: 5746 - DNA, 1082 bp, Homo sapiens
  SIMILAR (65)..(1033): 601254mologous to Homo sapiens Human secreted protein clone cb98_4,accession number Y29861,Smith-Waterman Score=1002.
  misc_feature (1)...(1082): n = a,t,c or g
ggaaggagctgctggacaggccgagggagcctacgtccgagaccgcgcagacgccgccgccatggtaagaaaatcatttttgagttacaacacaaccatctggggccctttggaactggtggagaagctgtaccccgaagcagaggaaataggagctagagtccgggatctacctggtctgaagacccctctgggtcgagcaagagcgtggcttcgattagccctcatgcaaaaaaaaatggccgattacttacgttgctcaattattcagagggatctcttgagtgagttttatgagtatcacgcactaatgatggaagaagaaggagcagcaattgttgggctgctggttggcctgaatgtgatcgatgctaatctgtgtgtgaagggagaggatttagactcacaagttggagtgattgattattctatgtatttaaagaatgaagaagatattggagatacagaaaggaatgttcaaattgctgccatattagaccaaaagaattatgttgaagaattaaatagacaactgaacagcacagtcagcagcctccattcaagagttgattcattagaaaagtcaaatactaagctgattgaagagttagcaatagcaaagaataacatcattaaactccaggaagaaaatcatcaattacgaagtgaaaataaattgattttaatgaaaacacagcagcacctagaggttaccaaagtagatgtggaaactgagcttcaaacatataagcattctcgtcaggggctagatgaaatgtacaatgaagccagaaggcagcttcgagatgaatctcagttacgacaggatgtagagaatgagctagcagtacaagttagtatgaagcatgagattgaacttgccatgaagttgctggagaaagatatccatgagaaacaagatactctgataggccttcgacaacaactagaggaagttaaagcaattaacatagagatgtatcaaaagttgcagggttctgaagatggcttgaaagaaaaaaaagaaataattgtccgcctgtattggtccgctctgtgtggcncgtaacgtagcggcggta

SEQ ID NO: 5747 - DNA, 1356 bp, Homo sapiens
  SIMILAR (1)..(321): 731254mologous to Homo sapiens Hypo-thetical protein KIAA0083,accession number W54360,Smith-Waterman Score=390.
atggccaggccaagtgataatagtaaggataattcaacatgtaacattgaagtcgtgaaaccaatggatattgaagaaagcatttggtcccctaggtttggattgaaaggcaaaatagatgttacagttggtgtgaaaatacatcgagggtataaaacaaaatacaagataatgccgctggaacttaaaactggcaaagaatcaaattctattgaacaccgtagtcagttagcaatagcaaagaataacatcattaaactccaggaagaaaatcatcaattacgaagtgaaaataaattgattttaatgaaaacacagcagcacctagaggttaccaaagtagatgtggaaactgagcttcaaacatataagcattctcgtcaggggctagatgaaatgtacaatgaagccagaaggcagcttcgagatgaatctcagttacgacagacaagcccacatcccaacaaggtgccgtctgggaaagctcccggaccatgtgaagtggggcttgcacagaaccacttcagagatccccagatggcctcagaggattccagaagcagcagaattccagagaaggtgggctccatcacaccacccccagacagggccgtgcctaagccacagggtggacaaaagcctgcagccccctacacgttcagagagccaccaggtaaactctgtaaagatttgctgataaatctcagggctgatacagccagcaggcagctggtctcagtccagcggctgaaccttactatatggctcattcacaccgcagaaaagccaggggcaagccaatgggggcctcgggaagtgggcgtgggccctgttgtttactctctcgtgctgctgtctgggtctggccttggtccaggcagggccaggatgtatggagcaaggaagatgggagaggccacatggaactccttgggtccgtgggataccacctgcaagatgggtgaagggaacggaatcacaggtgtccacggaggccaagagcccagctgccccagtgagttttatgagtatcacgcactaatgatggaagaagaaggagcagtaattgttgggctgctggttggcctgaatgtgatcgatgctaatctgtgtgtgaagggagaggatttagactcacaagttggagtgattgatttttctatgtatttaaagaatgaagaagatattggaaataaagaaaggaagctactgaaagatgtgttgccgaaaataagggagtatacaaagagagaagttagggaattcaggcaacaggagctcccacaaagggggaagcgtggtaacattttccaggtgctatacaaatgttcagaagcattacagttgtcattataa

SEQ ID NO: 5748 - DNA, 503 bp, Homo sapiens
  SIMILAR (1)..(420): 951254mologous to Homo sapiens putative p150,accession number U93564,Smith-Waterman Score=700.
atgggcaaggacttcatgtctaaaacaccaaaagcaatggcaacaaaagccaaaattgaaaaatgggatctaattaaactaaagagcttctgcacagcaaaagaaactaccatcagagtgaacaggcaacctacagaatgggagaaaatttttgcaacctactcatctgacaaagggctaatatccagaatctacaatgaactcaaacaaatttacaagaaaaaaacaaacaaccccatcaaaaagtgggtgaaggatatcaacagacacttctcaaaagaagacatttatgcagccaaaaaacacatgaaaaaatgctcatcatcactggccatcagggaaatacaaatcaaaaccacaatgagataccatctcacaccagttagaatggcgatcattaaaaagtcaggaaaaaacagggacatggatgaagctggaaaccatcattctcagcaaactatcgcaaggacaaaaaaccaaacacctcatgttctcactcacag

SEQ ID NO: 5749 - DNA, 348 bp, Homo sapiens
  SIMILAR (274)..(348): 841254mologous to Homo sapiens Human secreted protein, SEQ ID NO: 7217,accession number G03136,Smith-Waterman Score=111.
ctatggacttatgatcaggactatccctgtggacccaaccattaggacaacttcagtgagccttactgtcaggctggccaccatgaacccaagatctagacctgctccagtggacacaggctccaggtccaccccaccttcataagaaccaaaagtcaagtcagcactcacagtacctggatttaacttcatattgctgaaagaggcactaaagcggtaagcatctggaatgacaggtagtgcgggtgccgtgtggagagcatttttgtgccgagtgagaacatgcagtgtttgattttctgtccttgtgatagtttgctcagaatgatggtttccagcttcatccat

SEQ ID NO: 5750 - DNA, 438 bp, Homo sapiens
  SIMILAR (255)..(368): 351254mologous to Macaca nemestrina immunoglobulin alpha heavy chain,accession number AB013765,Smith-Waterman Score=60.
tcagagggagatgtctgtgaggaatctgggcggaggggtatacacttcaaaactgagcacttgactaggaggtgaccactggagtttggcttttggaaccaaagccttggagcagatgaactcacttttgtccgccgttctcggtatgtagagggtggtgtccaagccgctggacacgcgtcgccctccgtcggttaacacgtactccttcagttggccgttcaggaggaaggtgtcactccagttcacacacaccccacccaaagtgctgtccaccgaaaatggggctcggtactgaggcactgcaactatggttcggcagcccacctcattatgctcacaccatgcgtgaaccagattctgcatcaggaaggttgcagggttggcctttgacttgtacagaatcaggaccaggtggtcatggaagatccattccat

SEQ ID NO: 5751 - DNA, 2448 bp, Homo sapiens; identical to SEQ ID NO: 5149
  SIMILAR (1)..(2445): 1001254mologous to Homo sapiens NY-REN-45 antigen,accession number AF155110,Smith-Waterman Score=4250.

SEQ ID NO: 5752 - DNA, 1922 bp, Homo sapiens
  SIMILAR (1502)..(1582): 811254mologous to Homo sapiens putative p150,accession number U93567,Smith-Waterman Score=107.
atgggcaaggacttcatgactaaaacaccaaaagcaatggcaacaaaagccaaaattgacaaatgggatctaattaaactaaaaagtttctgcatagcaaaagaaactgtcatcagagtgaacaggcaacctacagaatgggagaaaatttttgcaatctacccatctgacaaagggctaatatccagaatctacaaagaacttaaacaaatttacaagaaaaaaacaaacaaccccatcaaaaagtgggcaaaggatatgaacagacacttctcaaaagaaaacattcatgcagccaacagacatatgaaaaaatgctcatcatcactggtcaccagagaaatgcaaatcaaaaccacaatgacataccatctcattccagttagaacaatgatcattaaaaagacaggaaacaacagatgctggagaggatgtgaagaaacagaaacgcttttacactgttggtgggagtgtaaactagttcaaccattgtggaagacagtgtggcgattcctcaaggatctagaactagagataccatttgacccagccatcccattactgggtatatacccaaaggattataaatcatgctgctataaagacacatgcacacgtacgttcattgtggcactattcacaatagcaaaggcttggaaccaacccaaatgtccatcaatgatagactggattaagaaaatatggcacatatacaccatggaatactatgcagccataaaaaaggatgagttcatgtactttgtaggaacatggatgaagctggaaaccatcattctgagcaaactatcgcatggacagaaaaccaaacaccgcatgttctcactcatagtattggaagttctggccagggcaatcaggcaagagaaagaaataaagggtattcaattaggaaaagaggaagtcaaattgtccctgtttgcagatgacatgattgtatatttagaaaaccccatcatgtcagccccaaatctccttaagctgataagcaacttcagcaaagtctcaggatacaaaatcaacgtgcaaaaatcacaagcattcctatataccaatatcagacaaatagagagccaaatcatgagtgaactcccattcacaattgctacaaagagaataaaatacctaggaatccaactttcaaggaatgtgaaagagctcttcaaggagaactacaaaccactgctcaaggaaataaaagaggacacaaacgattggaagaacattccatgctcatggataggaagagtcaacattgtgaaaatggccatgctgcccaaagtaatttatagattcagtgctatccccatcaagttaccaatgactttcttcacagaattggaaaaaactactttaaagttcatatggaaccaaaaaagagcctgcattgccaagacaatcctaagcaaaaagaacaaagctggaggcatcacgctacctgacttcaaactatactgcaaggctacagtaaccaaaacagcatgggacatggatgaagctggaaaacatcattctcagcaaactattgcaaggacagaaaaccaaacactgcatgttctcactctacaagtcatcgtcacaccttccaggggaagtcgcctggactaccgcggcctcaaattcagcctcccggatcttaccgctagctttccaggggaccgacaagggtgcagtgctcccagggttgccctctcccctggctggtccgcctctggttctcttcagagtcggtggctccacctggccagtcgtggatctcggacgctgtggcactcagcagggaaatcaggccgaagggaccaccagctgtacctgccagtctcctgcgccctcttcgcattcagcggcaggcagctgcggcttggtgaattccgcgaattccgcgctggccccgggaccccctg

SEQ ID NO: 5753 - DNA, 768 bp, Homo sapiens
  SIMILAR (133)..(255): 971254mologous to Homo sapiens Human cancer associated antigen precursor from clone NY-REN-45,accession number Y92338,Smith-Waterman Score=215.
atggatgaagctggaaaccatcattctgagcaaactattgcaaggacagaaaatcaaacacgtcatgttctcattcttgtgcagtactctgctaaagagagacaagtgtataaggccaatatgccgcaccaaggagtgttcagcctgggtgttcctgtagatgctctcttctttattggtaaccagttggtggccacgagtcatacagggaaagtgggagtgtggaatgctgtcactcagcactggcaggttaggacaggcttgagcacacttgtagctagagaggagagttgccagaaggacctgaagactgaaagaatggagattatttccggtcccataaaagtcaagagtgtatatgggatctacagcacagctagaaagctatctactgtacttaatagtattaaggatactttacctgttaaaaagagggaaaatgcaacaaaatatgagctccagggttatgctgtgcctcagtaccgagccccattttcggtggacagcaatttgtctgtggtgtgtgtgaactggagtgacaccttcctcctgaacggccaactgaaggagtacgtgttaaccgacggagggcgacgcgtgtacagcggcttggacaccaccctctacataccgagaacggcggacaaaaccttctttttccaggtcatctgcacgacttgacgaaggaagtgtttaaggacgccgttgattccaatatgatacctctactggacttggcttggacctaacaactcctgggaaaaagag

SEQ ID NO: 5754 - DNA, 801 bp, Homo sapiens
  SIMILAR (304)..(468): 361254mologous to Homo sapiens salivary proline-rich protein 1,accession number K02576,Smith-Waterman Score=72.
atggccggatcgcgtggacgtgacgtcgtatataccaacaacgaggaagaagaggggcaacgcataaccgcacatattaggacgcggggttacgcgcatttacatggaatattgccggacaaaggacgaactcacgaaacacccttcaacttgggtaccgacaaagattattcaccgcggcgatcccgtcgatcgggttgtttcgaaaatcacgaattattgtacattgcgcgggcagcttcatggcgagagccttggattggttggaatgagacattctatggagaacaggacaccatgcggcctgggcaccctcagggaccaccagagcagtccgtacgccgcagcctaactgaaggggccttggctcattctgggaaccctgtatcaaaaggagtccatgaagaccatcagctggataccgaggctggggccccacactgtggaacaaacccacagcttgctcaggaacattggggttcggaaaagaacaccagcttctttccgggtcaccaaggagactcgggacttgaagccctgctggcgactctaaaggacccctctgtcgcctggaaggaggtctcccaggacttggctgcttatttcacaggtgaaggggaaacagtagtaggaagggcagaatcaggtgctggccaaactcctgccatgggccagtccctgggctacccatgggagcccaaagggaataacatggcctctctccccagtgagaaattccctactgggaggagatcccatttatttggcagagtttctcccaacagtggaagcagactgtaa

SEQ ID NO: 5755 - DNA, 469 bp, Homo sapiens
  SIMILAR (35)..(160): 431254mologous to Homo sapiens gamma-glutamyltransferase 1,accession number AJ006854,Smith-Waterman Score=83.
tgatcgactggaggagaagggcagcctaactgaaggggccttggctcattctgggaaccctgtatcaaaaggagtccatgaaggaccatcagctggataccgaggctggggcccccacactgtggaacaaacccacagcttgcttcagggatccatcccaggaatcagtcaggacatcaaatccaacggcacagttcagaagatgtgaagccaaaaacccttcccgctgggataaaaggcattaaccatcagatcgagtctcccagtgcaaaggcggaagtctataagtgtggaaagaagctgtgctcttcctgtggggcttcctttgggtaaagggagctttcaatgatcatcgaggaccctcaatcttcttatttttcacattccagtgttttcaggtgtgggaatttgttaaagggccagcttggagatgcagtgagtgtgacggaatgttaggattccgaatggt

SEQ ID NO: 5756 - DNA, 517 bp, Homo sapiens
  SIMILAR (98)..(472): 321254mologous to Mus musculus polycystin,accession number Y13278,Smith-Waterman Score=161.
agttggaggccctgagaaccctaccctgatagacccagagaaccaaaacgtgaccctgaatggtcctgggggctgtgggacaagggaggactgtgtgctcagcctgggcagaacaaggactgaagcccacacagccctgtcccgactcagggccagcatgtggattgaccgcagcaccagggctgtgtctgtgcacttcactctctataaccctccaacccaactcttcaccagcgtgtccctgagagtggagatcctccctacggggagtctcgtcccctcatccctggtggagtcattcagcatcttccgcagcgactcagccctgcagtaccacctcatgcttccccagctggtcttcctggcactcagcctgatccacctctgtgttcaactctaccgtatgatggacaagggcgtcctcagctactggcgaaagccaaggaactggctggaggtagcctctcttgtgtcattttcttttgaaaaataacaataaactgtttatatcttgaaa

SEQ ID NO: 5757 - DNA, 2792 bp, Homo sapiens
  SIMILAR (471)..(821): 371254mologous to Homo sapiens Human PKD1 protein fragment 12,accession number W39181,Smith-Waterman Score=226.
atgccagtgtaggctatttatccttattggatgctgactatgacagaaaacctccaaacagatatttagctaaggcagtgaactatacagtacatttccagtggatccgatgcctgttttgggacaagagagagtggaaatctgaacgtttctctccacaaccagggacttctcctgaaaaagtgaactgcagctaccatcgcctcgcggcattcgctctcctaaggagaaagctgaaggccagttttgaagtgagtgacatttccaagctacagagccacccagaaaacttgcttcccagtatttttattatgggttctgtgattctttatggatttttggtcgctaaaagtagacaagtagatcatcatgaaaaaaagaaagctggttacatctttctgcaagaagcttccctgccgggccatcagctatatgcggtcgtcattgacactggcttccgagctccggccagcgctcctgcccaactgggcctgctgaggaagatccgcctctggcacgacagccgtgggccttccccaggctggttcatcagccacgtgatggtgaaggagctgcacacgggacagggctggttcttccctgcccagtgctggctgtctgccggcaggcatgatggtcgcgtggagcgggagctcacctgtctgcaagggggactcggcttccggaagcttttctattgcaagttcacagagtacctggaggatttccatgtctggctgtcggtgtacagcaggccctcctccagccgctacctgcacacgccgcgcctcaccgtgtccttctccctgctgtgcgtctacgcgtgtctcactgccctggttgctgctggagggcaagagcaggtgagagccatcgcttttccttatagcagcttccagatccgactacactgtggcccctttttgcctaagaaatcaacaaagctcacagttctccgagaaaagtttaaaccaggggaagcaagcctggctgcctggggaccagagaaggaacaggagggctctgcccggctcagcaaggtacctgcgacttgtcctcatggccctgttctcctgagcagccccttcattgctggggaacacgcttggcgaaccacctctttccttctgcaggaagccccggggtctgcccgagtggagccacacagcccacttagaggaggagcacagaccgaggcaccccatggtgggtcagaaagaaggggtctcagcagaggcctgaaacaggaaggaagtgaagcccagaagaattcagaaagccctgtgtgtctactcagtaaataccggcaggaccgtgggagagacactgtggagcagcaaggctcgggcgtgattgctcacacccagcagtggtttggagggactaatgccccagtggtcaagggcccttcagccttggtggagctctgcagtgtgggccatttgtgggaccgcttctttggcctgcagtttggggacaggatttctagcctacagatgttgaatcactctgtgaggatgggcaggtcttggctgcccgacaacaagctcgccaccctgctgggcgcatccaccatccaaggcccagctgaggggcaccagacagaggatgaggagagagagtcgcacacgggctgccctgagaagcaactttttatttttgttcttgcattaagaaatgccagaaactgcttgggtggcctgagaaacatcgctgactggtgggactggagtctgaccacacttctggatggcctgtacccgggaggcaccccgtcagcccgtgtgccgggggctcagcctggagctcttggaggaaaatgctacctaataggcagttccgtaattaggcagctaaaagtttttcctaggcatttatgcaagcctcccaggccattttcagcactcatcgaagactctattcctacatgtagtcccgaagttggaggccctgagaacccctacctgatagacccagagaaccaaaacgtgaccctgaatggtcctgggggctgtgggacaagggaggactgtgtgctcagcctgggcagaacaaggtcacgtgtccctgagagtggagatcctccctacgggagtctcgtcccctcatccctggtggagtcattcagcatcttccgcagcgactcagccctgcagtaccacctcatgcttccccagaggacagagaagatgcataaagccctgctgatgtgcttcagttcctgcaaatccataactaactttgagtttgggttagtgattaaaggcatgaatcaacagctggtcttcctggcactcagcctgatccacctctgtgttcaactctaccgtatgatggacaagggcgtcctcagctactggcgaaagccaaggaactggctggagctctccgtggttggagtgagcctcacctactatgcagtttccggccaccttgttactcttgctggagatgtcactaaccagtttcacagaggactttgccgagcatttatggacctcacccttatggcatcatggaatcaggtacacggtgtgctcagggccatgcagatagaggccatgcactgtgatgccatccaaaaggcagaggtcacacaaactctagaaggtgcgagacaacagatttgtttgatatcgagagatgatgctctgagctggcagatgggagtggccaggacagtgaagggcctgaagagcttgagacatgctttgaacactggggtatgtggattctgcgtggagcagaactcaagagcctggaattcccccagtgcctcgaggggacgctaa

SEQ ID NO: 5758 - DNA, 444 bp, Homo sapiens
  SIMILAR (412)..(35): 291254mologous to Archaeoglobus fulgidus chromosome segregation protein (smc1),accession number AE000995,Smith-Waterman Score=113.
taagatgatgatccgaaatccagtccatgaagacagttaaaagttcataaacttgcccattaagtggtaccttgtaagtttttgaaactggtgctttttcttgttttaaacttttcatttcatgaacagcatgggaacttcctttcaatctctgtattgtcataaactcgtacttcctctgtaaattatctaaacgagcttgaactcttttagcctgaatgtctatcttcctgttttcttcacttgcttcatttaactgtttttttaaggtatcattcaattctttcaatgcatcaaaagaggacctcagtctcttggtttctttattcttttccttaagaacttcggttaagtgttcaacttctgcatcatgctgctcttttataatttgaaatcttgtaagaacctcttcttcaacacctttaattttactcaaggcatttt

SEQ ID NO: 5759 - DNA, 1047 bp, Homo sapiens
  SIMILAR (415)..(945): 941254mologous to Homo sapiens ectodysplasin-A receptor protein,accession number AF130988,Smith-Waterman Score=824.
atgcccaaacgccccgatcggcccgtggcccgcttctctgcgttgttccacccgtcgccgcctatcccttatcccgcgtccatccggtcgagcccagcgaacccctatccatcgtactccgcgcccgggcaccgacggaacgcggaagccacccccaaacgattaaatgaagcaagtgaagaaaacaggaagatagacattcaggctaaaagagttcaagctcgtttagataatttacagaggaagtacgagtttatgacaatacagagattgaaaggaagttcccatgctgttcatgaaatgaaaagtttaaaacaagaaaaagcaccagtttcaaaaacttacaaggtaccacttaatgggcaagtttatgaacttttaactgtcttcatggactggatttcggatcatcatcttagcaaagtgaaacatgaagaatctggaatggatgaactctcaggccaaggacacctggccactgccctgatcattgcaatgtccaccatcttcatcatggccatcgccatcgtcctcatcatcatgttctacatcctgaagacaaagccctctgccccagcctgttgcaccagccacccggggaagagcgtggaggcccaagtgagcaaggacgaggagaagaaagaggccccagacaacgtggtgatgttctccgagaaggatgaatttgagaagctgacagcaactccagcaaagcccaccaagagcgagaacgatgcctcatccgagaatgagcagctgctgagccggagcgtcgacagtgatgaggagcccgcccctgacaagcagggctccccggagctgtgcctgctgtcgctggttcacctggccagggagaagtctgccaccagcaacaagtcagccgggattcaaagccggaggaaaaagatcctcgatgtgtatgccaacgtgtgtggagtcgtggaagagaccgtgtccacactggcatcatcatctgggaaacgtgatcagtcatttatcctagacttagctgccctctccctgccctcgagcatccccgatgtctga

SEQ ID NO: 5760 - DNA, 360 bp, Homo sapiens
  SIMILAR (1)..(360): 851254mologous to Mus musculus IB3/5-polypeptide,accession number X79131,Smith-Waterman Score=511.
atgaattttgataagaggcaacatgaagcaagaatccagcaaatggagaatgaaattcactatttgcaagaaaatctaaaaagtatggaggaaatccaaggccttacagatctccaacttcaggaagctgatgaagagaaggagagaattctggcccaactccgagagttagagaaaaagaagaaacttgaagatgccaaatctcaggagcaagtttttggtttagataaagaactgaagaaactaaagaaagccgtggccacctctgataagctagccacagctgagctcaccattgccaaagaccagctgaagtcccttcatggaactgttatgaaaattaaccaggagcgagcagag

SEQ ID NO: 5761 - DNA, 531 bp, Homo sapiens
  SIMILAR (247)..(456): 721254mologous to Mus musculus IB3/5-polypeptide,accession number X79131,Smith-Waterman Score=246.
atggtcagagacaggtttcactctagaagcctattgctcctaggccacaggcctgcacagcatattactgtgctaaataccgtaggtaatagtaacacaagtccctgtggacagcaaaatgcaatgccctttatctccagacctaaatcatttcctcaaccctatgtgataaagattgatgatggaggaagagataaatataggaaaaggtttcttcaggatactattgattctgtgtttccaagtcttccaacaaagaagaaacttgaagatgccaaatctcaggagcaagtttttggtttagataaagaactgaagaaactaaagaaagccgtggccacctctgataagctagccacagctgagctcaccattgccaaagaccagctgaagtcccttcatggaactgttatgaaaattaaccaggagcgagcagaggatgcaaatgctaatgagattaagatagcagatcataggagacaaaaatctaatgatgagagcccagagagacataatcatggaagacggtag

SEQ ID NO: 5762 - DNA, 516 bp, Homo sapiens
  SIMILAR (127)..(210): 961254mologous to Homo sapiens PRO2455,accession number AF116703,Smith-Waterman Score=161.
ttaagtttgtgtgtgttctaatacttctgcatctttaaagtcccaaagcgatacagtagaggcaaaggctggctgggtatgaatctgcattccatggaaatggtcctttttctcaatcatgtgtaggatataatgtgcaaagtaaaatcctgggttatagatcaaaagaaacctgttcgcttctatcatgattggaatgacaaagaggtaagttgtaaatatcatgccatctattactgcctttgctttcatttgcttgttggcaccagggactggtttcatggaagacaatttttccatgggtgggtgatgggggtgtggtttcaggatgaaactgttccacctcagatcatcaggcattagattcttgtaaggagcgcacaacctggatcccttgcacgtgcaattcacaatagggtttgggcttctgtgagaatctaatgctgccgctgatctcagagcctttgtacttgcagtttcctctccctgaactgagctttccatggattctctcat

SEQ ID NO: 5763 - DNA, 421 bp, Homo sapiens
  SIMILAR (61)..(288): 1001254mologous to Homo sapiens Spir-1 protein,accession number AJ277587,Smith-Waterman Score=370.
ggtagacgtagcagattagcaatgcggccacttagcatgtcttacagttttgacttgtcagatgtgactacccctgaatctacaaagaatcttgtggagtcatctatggtgaatggaggtttgacatcacaaacaaaagaaaacgggttaagtacctcacagcaggtgcctgcacagcggaagaagctcctcagagccccaactctggccgaactggacagctctgagtctgaggaagaaacgctgcacaagtcgaccagcagcagcagcgtgtctccctctttccctggaagagccagtccttggaggccgtgttcacaaggaagaagcctccaaaattcctgcccatatcatcaacaccccagccagagagacggcagccaccccagagacgacattccattgaaaaggaaacgcctac

SEQ ID NO: 5764 - DNA, 1089 bp, Homo sapiens
  SIMILAR (328)..(570): 921254mologous to Homo sapiens Spir-1 protein,accession number AJ277587,Smith-Waterman Score=363.
  misc_feature (1)...(1089): n = a,t,c or g
atggcgtactacctgggtattgctgctgattatttagggcccaaggactcattagtcagcagcacacagattctctctgcggcccatggccactgccaggaggtggaggaggggtggcatcagcaattcaagactgtctttcctaccctctttggtgcctctttcggtggtctgaagttaaaacctggccttctgcagcctcatagcaaagatgagggcatcattgctaccatcagcattgctaccgccctttcgggaggtttgcttgtaaagggagcacagaaatgggattgcactggagggcttgagttaattgctacccgtnaagtcattgaatctttgggaattattatttataaagcactggactatggtttgaaggagaatgaagaaagggaattaagccctcccctagagcagcttatcgatcacatggccaacacggtggaagctgacggtagcaatgatgagggctatgaggctgcagaagaaggcctgggagatgaagatgaaaagagaaaaatctcagctattcggtcatatagagatgtcatgaagaatgaagccgcggacccttgcagtgttccagttcttaaagatggtgtgcccggagtttcttccttcaaatgtttagatgtgtccggagttagtttcttctggtgggttcctggtctcactggcttcaggagtgaagctgcagacctttgcgagcctccaaaattcctgcccatatcatcaacaccccagccagagagacggcagccaccccagagacgacattccattgaaaaggaaacgcctactaacgtgaggcagttcctgccgccttccaggcagagttcccgctctcttagatggtttccagatcccgcgtttgcttgtttccgtctagagcagaaccaccaggtgacaagttctggaccattcccattgggacattacagagctgctacgggagcaagatgggccactcaagggcgctgcgtgccgggaagggcggcgcagggacagcgcaccagcaccccggccagaggccccgctgccttcaggactggggaggcaggcgccgcacagctccactcaagatga

SEQ ID NO: 5765 - DNA, 2079 bp, Homo sapiens
  SIMILAR (46)..(2073): 541254mologous to Homo sapiens FLJ00032 protein,accession number AK024442,Smith-Waterman Score=2075.
atgaaggagttcttgtcaacagcgcaaggcaacagagaagtgttccatgcagggacattgcaaatacatgaaagtcatcacaatggagatttttgctaccaggatgttgataaagatattcatgactatgaatttcaatggcaagaagatgaaagaaatggccatgaagcacccatgacaaaaatcaaaaagttgacaggtattacagaacgatatgatcaaagtcatgctagaaacaagcctattaaagatcagcttggatcaagctttcattcgcatctgcctgaaatgcacatatttcagaccgaagagaaaattgataatcaagttgtgaagtctgtccacgatgcttccttggtttcaacagcccaaagaatttcttgtaggcccaaaacccatatatctaataaccatgggaataatttctggaattcttcattactcacacaaaaacaggaagtacacatgagagaaaaatctttccaatgtaatgagagtggcaaagcctttaattacagctcactcttaaggaaacatcagataatccatttagcagacaaatataaatgtgatgtatgtggcaagctctttaatcagaagcgaaacctagcatgccatcgtagatgtcacactggtgagaatccttacaagtgtaatgagtgtggcaagaccttcagtcagacgtcatcccttacatgccatcgtagacttcatactggagagaaaccttacaaatgtgaagaatgtgacaaagctttccatttcaaatcaatacttgaaagacataggataattcatactgaagagaaaccatataagtgtaatgagtgtggcaagacctttaggcagaagtcaatccttacacgccatcatcgacttcatactggagagaaaccttacaagtgtaatgagtgtggcaagacctttagtcacaagtcatcccttacatgccatcatagacttcatactggagagaaaccctacaaatgtaatgagtgtggcaagacctttagtcacaagtcatcccttacatgccatcgtagacttcatactggagagaaaccttacaaatgtgaagaatgtgacaaagcttacagtttcagatcaaattttgaaatacatcggaaaattcatactgaagacaatgcttacaagtgtaatgagtgtggaaagacctttagccggacatcatcccttacatgccatcgtagacgtcatactggagagcaaccttacaaatgtgaagaatgtgacaaagctttccgtttcaaatcaaaccttgaaagacataggagaattcatactggagagaaaccatacaagtgtaatgagtgtggcaagacctttagtcggaagtcatacctcacatgccatcatagacttcatactggagagaaagcttacaagtgtaatgagtgcggcaagacctttagttggaagtcatcccttacctgccatcgtagacttcattctggagagaaaccttacaagtgtaaggagtgtggcaagaccttcaatcagcagttaacccttaaacgccatcgtagacttcatagtggagagaacccttacaaatgtgaagatagtgacaaagcttacagtttcaaatcaaaccttgaaatacatcagaaaattcatactgaagagaatccttacaagtgtaatgagtgtggcaagaccttcagtcggacgtcatcccttacatgccatcgtagacttcataccggagagaaaccttacaaatgtgaagaatgtgacaaagctttccgtgtgaaatcaaaccttgaaggacataggagaattcatactggagagaaaccttacaagtgtaatgagtgtggcaagacctttagtcggaagtcatattttatatgccatcatagacttcatactggagagaaaccttataagtgtaatgagtgtggcaagaactttagtcagaagtcatcccttatatgccaccatagacttcatactggagagaaaccttacaagtgtaatgagtgtggcaagacctttagtcagaagtcaaaccttacatgccatcgtagacttcatactggagaaaaacaagtgtaa

SEQ ID NO: 5766 - DNA, 450 bp, Homo sapiens
  SIMILAR (145)..(450): 951254mologous to Homo sapiens oxidation protection protein,accession number AF309387,Smith-Waterman Score=500.
cacttgtatgccttcttcattcagtggagtccagaaatatatgcagaagatactggcgaatataccagagaacctggatttatagtagtaaaaaagattgaggagtctgaaacaattgaggattctagtaatcaagcagcagccagagaatgggagattactacaagggaagacataaattcaaagcaggttgctacagtgaaagcagacctggagtctgaatcttttcgaccaaacctaagtgatcccagtgaacttttactgccagatcaaattgaaaagcttaccaagcatcttccaccaagaacaattggctatccatggactcttgtttatggtactggaaaacatggcacaagcttgaaaactctttatcgaacaatgacaggtttagacaccccagtgctgatggtgattaaagacagtgatggacaggtttttggtgcgtta

SEQ ID NO: 5767 - DNA, 1509 bp, Homo sapiens
  SIMILAR (931)..(1365): 981254mologous to Homo sapiens oxidation protection protein,accession number AF309387,Smith-Waterman Score=746.
  misc_feature (1)...(1509): n = a,t,c or g
cactgaaagcatcggaaccgccccggaatcccggtcgacccacgcgtccgcggacgcgtggggaattacttggtctataaggttaattttttggtcatattgaataaggcacattttttatatgctttggagatacgtgctacatccttttgttaaaaagtctttttagtgatactaattctgcgttcagcgcgtgaaaagtaaaataccacaattttaaaagtctaattatttttaattttgtttaatgacagagatatagatcagctatcaggaagggacttctgccattcaaagaaaatgacaggaagtaacactgaggaaatagactcaagaatccgagatgcaggtaatgatagtgccagcactgctcctaggagcactgaggagtctctttctgaagatgtgttcacagaatcagaactttcccctatacgagaggagcttgtatcttcagatgaactgcgacaagataaatcttctggtgcgtcatcagaatctgtgcaaactgtcaatcaggctgaagtagaaagtctgacagtcaaatcagaatctactggtactcctggtcacttaagatctgatactgaacattctacaaatgaagttgggactttatgtcataaaactgatttaaataatcttgaaatggccattaaggaagatcagattgcagataactttcaaggaatatcaggtcctaaagaagacagcacaagtataaaaggtaattcagaccaggattcttttcttcatgagaattcgttacaccaagaagagagtcaaaaagaaaatatgccttgtggggaaacagcagaatttaaacaaaagcaaagtgttaacaaaggaaaacaaggaaaggagcaaaatcaggacttcacaggacagagggcagganggagctacgcaaactttgggaaaacccatactatgcaacaaactaaacagcaaagggaaaatattcaacaagtgtcacaaaaagaagctaagcataaaattacatctgctgatggacacatagaaagttctgcacttttaaaagaaaagcaaaggcatcgattacataagttcttgtgtctcagagttggaaaaccaatgaggaaaacgtttgtatctcaagcaagtgctacaatgcaacagtatgcacagagagataagaaacatgaatattggtttgctgtgccacaagaaaggacagatcacttgtatgccttcttcattcagtggagtccagaaatatatgcagaagatactggcgaatataccagagaacctggatttatagtagtaaaaaagattgaggagtctgaaacaattgaggattctagtaatcaagcagcagccagagaatgggaggaactgtctcagtttctgtgcaagactctgcagggtataatttctaaaggaaaaataaatctcctcaccagtcctttgaccggaattggtgcagttcaaaagaaaatggaagagaaaaaaataattttggaaactccttgctacattgtctga

SEQ ID NO: 5768 - DNA, 201 bp, Homo sapiens
  SIMILAR (199)..(137): 901254mologous to Homo sapiens super cysteine rich protein; SCRP,accession number U63332,Smith-Waterman Score=161.
gtcggcagcgtgcgcgatggtgttgttggagagcgagcagttcctgacggagcttgaccagacttttccagaagtccggacgtcggcagctctattatcaccttgagagagagacaaaagacaaactagagaccaagcagcagcagcagcagcagcagcagcaccttccgcagcagcaacaacagcaacaacaacagcgac

SEQ ID NO: 5769 - DNA, 524 bp, Homo sapiens
  SIMILAR (26)..(328): 861254mologous to Homo sapiens signal recognition particle subunit 14,accession number X73459,Smith-Waterman Score=419.
  misc_feature (1)...(524): n = a,t,c or g
gtgtgttttgcgctgtagaancggcacgagaccaacccattcaaagaaaggtactgtggagggctttgagcccgcagacaacaagtgtctgttaagagctaccgatgggaagaagaagatcagcactgtggtgagctccaaggaagtgaataagtttcagatggcttattcaaacctccttagagctaacatggatgggttgaagaagagagacaaaaagaacaaaactaagaagaccaaagcnnnnnnnnnnnnnnnnnnnnnnnnnnnnnncgcagcagcaacagcagcaacaacagcagcaacaacagcagcaacagcagcacagtaaagggcatacatttcctgctttcaccaattaaccactgaattgctattttttccttttggccagatagctaggtttctggttcccccacaagtagtgttttcacataagattagggtgcttttggaaagataattgcagcgttatatgaatagtgcgtaagaatctagttattttgcattggctaattggctgg

SEQ ID NO: 5770 - DNA, 2250 bp, Homo sapiens
  SIMILAR (1057)..(1839): 931254mologous to Escherichia coli ATH1 protein,accession number D90769,Smith-Waterman Score=1280.
atggtgttgttggagagcgagcaggtatggctaggcctggccggccgagggaagggggcggctcaggcgttactcgagacctgtgcctcctgcaggaggaccagggccttgacgcggcaggacgaggatttggggctggctaacggggctgggcctgttgttttccagttcctgacggagctgaccagacttttccagaagtgccggacgtcgggcagcgtctatatcaccttgaaaaagtgtaagcagcgggaggggagccgggcgatgctccctgggttcccgtacactcctgtatcatcaaaagccatgtatgacgcttactggaacggtaaattcagagactgcgctttccattctggctttaatgaggatccattcgtttgtgaatatcaaggccaatcgtctgacctgcctcaacctcctgtcaatgctggcggcggctctggtggtggttctggtggcggctctgagggtggcggctctgagggtggcggctctgagggtggcggttctgagggtgacggctctgagggtgacggttccggtggcggctccggttccggtgattttgattatgaaaaaatggcaaacgctaataagggggctatgaccgaaaatgccgatgaaaacgcgctacagtctgacgctaaaggcaaacttgattctgtcgctactgattacggtgctgctatcgatggtttcattggtgacgtttccggccttgctaatggtaatggtgctactggtgattttgctggctctaattcccaaatggctcaagtcggtgacggtgataattcacctttaatgaataatttccgtcaatatttaccttctttgcctcagtcggttgaatgtcgcccttatgtctttggcgctggtaaaccatatgaattttctattgattgtgacaaaataaaaatattacgtggtgtctttgcgtttcttttatatgttgccacctttatgttaccggttattgccaacattgctatcccgcaaaagaggccgtttatgcaacaaaccaggtgcgaagttcaatgcagggaagacattgaggtgcaaaaactgaagagttacgacaaacttcttgcaagcatcaacaagaaacctggcgtcaatggttggcaaaaacgtcgtatcacggtaaatgccggcgaagcgcacgatcagcaagcgttagattatgcgctttatcatctgcgcatcatgacgcctgcccacgacgagcgcagcagcattgcggcaaaaggcttaaccggcgaaggctacaaaggccacgttttctgggatacagaagtatttttgttaccgtttcatctgtttagcgatccgacggttgcccgaagtttactgcgttatcgctggcacaacttgccaggcgcgcaggagaaagcgcgacgcaacggctggcagggcgcgctatttccgtgggaaagcgcgcgcagcggcgaagaagagacgccggaatttgccgccattaacattcgcaccgggctgcggcaaaaagtggcctcggcgcaggcggaacatcatctggtggccgatatcgcctgggcggttattcaatactggcagaccacgggggatgaaagtttcattgcgcatgaaggcatggcgctacttctggagacggcaaagttctggattagccgcgcggtgagagttaacgatcgtctggaaattcatgatgttattgggccagacgaatataccgaacatgtcaataataatgcatacaccagctatatggcccgctacaacgttcaacaggcgctgaatattgcccgccagttcggctgtagcgacgatgcgtttatccatcgcgccgaaatgttggggatcgtcgctcacaaaaaggggatctgtcaccagcattcgaatgctcattcgagcgccaaccctgctcctaagaagtcagacacacaaacacacattcagagccagctgggctggggacacagtcccagaagtacagaatgtgttcgcttccaggtggcatgcctgtgcttcagctgtggctgtaccagcacggatgcagcctcaggctcctctcccagccttggcagccatccagaaagccagcccgaagaggaagggttaagtgcctggggacccagcccagacagcggctgctggaacagggaaggcagcctccaggccatggcacagagggctcctccagcacgagcctgccagccgccgcctttgttgatggactctgccacatgctcggctgacacgtga

SEQ ID NO: 5771 - DNA, 342 bp, Homo sapiens
  SIMILAR (1)..(195): 861254mologous to Homo sapiens signal recognition particle subunit 14,accession number X73459,Smith-Waterman Score=290.
atggtgttgttggagagtgagcagttcctgacggagctgaccagacttttccagaagtgctggacatcgggcagcatctatatcaccttgaagaagtatggtggtggaaccaaacccgttccaaagaaaggttctgtggagggctttgagccctcagacaagtgtctgttaagagctatcgatgggaaaaagaaggaaaagaattcattcctcaactacaacgtctcctgtatccttactatgcctcagtacatgagacagggctatggcaagatgcttattgatttcagtcttggtcttgatgccaagtttgggaaaggagctaagaagacatcccactag

SEQ ID NO: 5772 - DNA, 755 bp, Homo sapiens
  SIMILAR (54)..(461): 1001254mologous to Homo sapiens signal recognition particle subunit 14,accession number X73459,Smith-Waterman Score=670.
cggctctcactgctaggggcttaagcggagggagtcgagccagcgtcgccgcgatggtgttgttggagagcgagcagttcctgacggagctgaccagacttttccagaagtgccggacgtcgggcagcgtctatatcaccttgaagaagtatgacggtcgaaccaaacccattccaaagaaaggtactgtggagggctttgagcccgcagacaacaagtgtctgttaagagctaccgatgggaagaagaagatcagcactgtggtgagctccaaggaagtgaataagtttcagatggcttattcaaacctccttagagctaacatggatgggttgaagaagagagacaaaaagaacaaaactaagaagaccaaagcagcagcagcagcagcagcagcagcacctgccgcagcagcaacagcagcaacaacagcagcaacaacagcagcaacagcagcacagtaaagagcatacatttcctgctttcaccaattaaccactgaattgctattttttccttttggccagatagctaggtttctggttcccccacagtaggtgttttcacataagattagggtccttttggaaagaatagttgcagtgtttataggatagttgtggtaagaatctagtttattttgcatttggctaattggtctgtgctgcatggttatatactcctggattatagattaaaagtctctgtagacatctctgtgaagagcaagctatcattaaacatgtctgtttatc

SEQ ID NO: 5773 - DNA, 300 bp, Homo sapiens
  SIMILAR (9)..(80): 751254mologous to Chlamydomonas reinhardtii hydroxyproline- rich glycoprotein gas29p precursor,accession number AF015884,Smith- Waterman Score=111.
ttatttatcctcctcctcttcttccttctcctcttcctcttccttctcctcctcctcctcctccttctcctcctcctccctaatcatttcttgaatgattgaaggagtaatgggaccctccttattccttactcctaaattctcactattgattgaacgtctcatacgcaggcactgagacacctcagtgaataaaatatagtcctcgccttccttcttggggcttccattaaatttgatcacagttttacacaggagctttcggaatgaagacgcaaagatagacaggaagctgtccat

SEQ ID NO: 5774 - DNA, 642 bp, Homo sapiens
  SIMILAR (136)..(534): 831254mologous to Homo sapiens reverse transcriptase homolog= pol {retroviral element},accession number S61070,Smith-Waterman Score=532.
gctagcccccacattattcctgataccacacctgacccccatgactgtatctctctaatccacctggcattcactccatttccccatacttccttctttcctattcctcaccctgatcacacttggtttattgatggcagttccacctggcctaatcgccattcaccagcaaaggtgggctatgctatagtagtatcttccacatctatccttgaagctaccgctctgcccccctccactacctctcagcaagctgaactcattgccttaactcgagccctcgctcttgcaaaaggactacatgtcaatatttatactgactctaaatatgccttccatatcctgcaccacaatgctgttatatgggcagaaagaggtttcctcagtacgcaaaggtcctccatcattattgcctccttaataaaaactcttctcaaggccgctttacttccaaaggaagctggagtcattcactgcaagggccatcaaaaggcatcagatcccatcgctcagggcaatgcttatgctgataagtccgataacggactggcctttactagtcaaatcacccaagcagtttctcaggctcttggtattcagtggaaccttcataccccttaccgtcctcaatcttcaggaaag

SEQ ID NO: 5775 - DNA, 583 bp, Homo sapiens
  SIMILAR (92)..(457): 461254mologous to Baboon endogenous virus strain M7 gag-pol precursor polyprotein,accession number D10032,Smith-Waterman Score= 277.
gaagctggagtcattcactgcaagggccatcaaaaaggcatcagatcccatcgctcaggacaatgcttatgctgataagttagctaaaaaagcagctagcgttccaacttctgtccctcacgggatttctcaggccccccctcccctccctacgcatcaagctcggtactggcaaattgactttactcacatgcctcgagtcaggaaactaaaatacctcttggtctgggtagacaccttcactggatgggtagaggcctttcccacagggtctaagaaggccactgcggtcatttcttcccttttgtcagacataattcctcagtttagccttcccacctctatacactccgatagcagactggcctttattagtcaaatcacccaagcagtttctcaggctcttggtattcagtggaaacttcgtaccccttaccatcctcaatcttcaggaaagtgctgggattacaggcataagtcactgcatccagccaaatgtttgctgaattcttacagccccagcaatgtccaaggctctggagacaccgtggtggacaggacaccatccctgtccttaagaaag

SEQ ID NO: 5776 - DNA, 409 bp, Homo sapiens
  SIMILAR (265)..(408): 791254mologous to Homo sapiens gluthione S-transferase subunit 1 (GST,EC 2.5.1.18),accession number M25627,Smith-Waterman Score=197.
cccacgcgtccgcccacgcgtccggtcgttgcccaatagagactggagagagagagagagtgtgtagagccactgaacatcagggctgcacactgtagggcctggggcagacaggacatgctgcagcaggggaaaagcccctggcccatgtggaagatgcaagctgggtgggtgctgtggatgccatagtgatgtggaatgagaggagaaaatgggagcctgggctccaaacaaggagtaagcagagccacacttcttactctctcactgaatcaggtgttgaagagccatggacaagactacctcgttggccacaagctgagccgggctgacattcacctggtcaaacttctctaccacgtggaagagcttgacaccagcctcatctccaacttccctgtgctgaagg

SEQ ID NO: 5777 - DNA, 425 bp, Homo sapiens
  SIMILAR (15)..(422): 851254mologous to Mus musculus spermatid WD-repeat protein; spWD,accession number AF274321,Smith-Waterman Score=655.
ctgcacgaattccgcacgagctgcttctgtgggatgtggtgacaggacagagtgtggaaagagcatctgtctccaggaacgtggtcactcacctgtgctgggtccccagagaaccatacatactacagacctctgaagataaaaccctcagattatgggacagtcgggggctgcaggtagctcatatgtttcctgcaaagcagcacattcagacctactgtgaagtcagtgtggatggacacaagtgtatctcctgcagcaatggctttggaggagaaggctgtgaagccacgttgtgggacctaagacagactcgaaacagaatatgtgagtataaggggcatttccagactgtcgcatcctgcgtctttctaccaagagcattggccttgatgcctttaattgctacctcatcacatgattgg

SEQ ID NO: 5778 - DNA, 453 bp, Homo sapiens
  SIMILAR (82)..(222): 891254mologous to Mus musculus spermatid WD-repeat protein; spWD,accession number AF274321,Smith-Waterman Score=244.
atgatgcataccagtgtagagagcataaaagaagagattagacagttccttttgctgacaattaactcctgtgtctccatattatgggacagtcgggggctgcaggtagctcatatgtttcctgcaaagcagcacattcagacctactgtgaagtcagtgtggatggacacaagtgtatctcctgcagcaatggctttggaggagaaggctgtgaagccacgaatccaggtactcctttggtgcagaatgactattttgcttattgggccaaagtagtttacaagtgtagttacaatttagcctctcgtgttgtacagaatgggtatgtctgcacagaaggctctttccgctacactgagctgcgacccacttatttccgagaatgcaataagggtatgaagacaggccagcgtacagtatacacccaattatcaacaaagaacatggaataa

SEQ ID NO: 5779 - DNA, 2755 bp, Homo sapiens
  SIMILAR (2195)..(2320): 611254mologous to Homo sapiens Human secreted protein, SEQ ID NO: 7102,accession number G03021,Smith-Waterman Score=120.
gaattccgaagctttgttctttagctctttgcaataaatcttgctgctgctcactctttgggtccacactgcctttacgagctgtaacactcaccgcgaaggtctgcagcttcactcctgaagccagtgagaccacgaacccaccaggaggaacaaacaactccagatgtgctgccttaagagctgtaacactcaccgcgaaggtctgcagcttcagtcctaagccagcaagaccacgaacccaccagaaggaagaaactctgaacacatccaaacatcagaaggaacaaactctggacatgccgcctttaagaactgtgacactcaccacgagggtccgtggcttcattcttgaagtcagtgagaccaagaacccaccaattccagacacattttggcaaccacaaagggactatcacctattgccaagcggtgagactatcgccaagtggtgagaccatcgtctatcgctgagcagcaaaacaatcgcctatcgccaagcaaatcgaagccatcaagctacagatggtcttacaaatggaaccccaaatgagttcaactaacaacttctaccgaggacccctggaccgacccgctggcacttccactggcctagagagttcccccttgagacactacaactgcagggccccttcttcacttctatccagcaggaagtagctagagcagtcatcggccaaattcccaacagcagttggggtgtcctgtttagaggggggattgagaggtggcagtgtgctggcagccctcgcagccctcgctcactcttggctcctcctcggccttggcgcccactctggccatgcttaaggagcccttcagcctgccactgcactgtgggaacactggccaaggccagagccagctcactcagcttgtggggaagtgtggagggagaggcgcaggcgggaactggggctcgatgcggcgcttgcgggccagcgtgagttccggtggttggtggcttggcgggccccagactcggagcggctggcctgccctgctggccccaggcagtgaggggcttagcacccaggccagcagctgtggatggtgcgctgagtctcccagcagtgctggcccaccccaccagcactgcactcgatttctcgccaggccttagctgcctccccgcaggcaggccttgggacctgcagcccaccatgcctgagtctcccctgctgccgccgtgggctcctgcgtggcccaagcctccccgacgagcactgccccctgctccccggtgcctggtcccatcgaccccaagggctgaggagtgcaggtgcatgctgcgggactggcaggcagctccacctgcggccccatgcaggaagccagctgggctcctgagtctggtggggacttggagaatttttatgtctagctaagggattgtaaatacaccaatcagcactctgtatctagctcaaggattgtaaatacaccaatcagcaccctgtgtctagctcagggtttgtcaatgcaccaatcggcactctgtatctagttaatctggtggggagttggagaatctttatgtctagctaagggattgtaaatacaccaatcagcactctgtatctagctcaaggtttgtaaacacaccaatcagaaccctgtgtctagctcagggtttgtgaatgcaccaatcagcactctgtatctagttaatctggtggggacttggagaatctttatgtctagctaagggattgtgaatgcaccaatcggcactctgtatctagctcaaggttgtaaatggaccaatcagcactctatgtctagctcagtgtttgtaaatacaccaatcgacactctatctagctaatctagtggggacgtggagaacttttgtgtctaactcagggattgtaaatgcaccaatcagaaccctgtcaaaatggaccaatagctctctgtaaaacagactgactttctgtaaaatggaccaatcagcaggatgtgggtggggccagataagagaagaaaagcaggctgcctgagccagcagtggcaacccgcttgggtccccttccacactgtggaagctttgttctttcgctctttgcaataaatcttgctgctgctcactctttgggtccacactgcctttatgagctgtaacactcaccgcgaaggtctgcagcttcatctgaagcagcgagacacgaacccaccaggaggaacaaacaactccgatgcgctgccttaagagctgtaacaccgcgaggtctcgagcttcactcctgagccagcaagaccacaaacccaccagaaggaagaaactcaggaaaacagccgaacatcagaaggaataaactctggacacaccacctttaagaactgtgacactcgctgcgagcgtctgtggcttcattcttgaagtcagtgagaccaagaacccaccaattctggacacaattgcactctagcctgggcaacaagagtgaaactcatctcgaaaaaaaaaagagtctggaagggccttctgagttgtaatattatgaacttaaattttgaggtcctgaagttttgttgcagtgtgaatgataagagtagtctttttttgatatcatctgtagaagacccaattttggggtttcagattaggaagggtttgatggtttttagtggactatgaaaaggttttttttggtgaaaatatattttggtataatgtactaaagtcttgtagtatttagtcataatagagtttaacagtggaagggaattc

SEQ ID NO: 5780 - DNA, 1554 bp, Homo sapiens; identical to SEQ ID NO: 5295
  SIMILAR (808)..(1551): 701254mologous to multiple sclerosis associated retrovirus polyprotein,accession number AF009668,Smith-Waterman Score=919.

SEQ ID NO: 5781 - DNA, 522 bp, Homo sapiens
  SIMILAR (374)..(460): 721254mologous to Homo sapiens Human secreted protein, SEQ ID NO: 7083,accession number G03002,Smith-Waterman Score=115.
ttaactctgtcctctgcactggaatgcagcttgcaactcttctttgcctttgttgagcaggaagcatgatagctgaaggccaaggttgaagttcggatgctttatcttcttgataaagaagggcataattatgcacggataatattgaaataacatccaaagtacacttgcactgtagtcaccatggggcagggctcgggacctgcagcccactatgcctgagcctcccaccccctccgtgggctcccgtgcagcccgagcctccccgatgagcgccaccccctgctccacagcgcccagtcccatcgaccatccaagggcgcaaacgtctgcagcttcactcctgaagccagtgagaccacgagcccacgcgaaggtctgcagcttcactcctgagccagcgagaccacgaacccaccagaaggaagaaactccgaacacatctgaacaccagaagaaacaaactccggacacgccacctttaagaactgtaacactcactgcgaggctccacggcttcat

SEQ ID NO: 5782 - DNA, 541 bp, Homo sapiens
  SIMILAR (328)..(540): 401254mologous to Human endogenous retrovirus HERV-K(II) gag,accession number AB047240,Smith-Waterman Score=157.
atgggacaagtgtgggctctggttcgttccaccttggaactttttcacactgatgatgaggaggaaggagagtatgacgaagtaacagaagaggttacagagcaggtttatttgccagctaaagctaaagtggcacaggaggaagaggttcatccctacccttctgcaccccctcattattattttgaagaaaaagagtggccagaccctccagatctttcttttctggaggacactgggcgaaaagtagttgccccagtgactgagcagcacctcgagcgactgctgtcagttctattcaggcaggagttcagcaggctagacgagaggggaccaaaagaactgtatgcagattttatagcttggaatctcttaagacaggagtctcttaaaaaggtgatttcagattcagctgctcaggatatagtgttgcagttattagcttttggcaatgttaatctcgattgccaggctgctttgcgacctattagagggaaagcacatttagttgattatatcaaggcctgtgacggtatcggag

SEQ ID NO: 5783 - DNA, 717 bp, Homo sapiens; identical to SEQ ID NO: 5297
  SIMILAR (1)..(192): 841254mologous to Homo sapiens reverse transcriptase,accession number AF015998,Smith-Waterman Score=292.

SEQ ID NO: 5784 - DNA, 322 bp, Homo sapiens
  SIMILAR (3)..(218): 581254mologous to Human endogenous retrovirus W polyprotein,accession number AB021921,Smith-Waterman Score=221.
aggatgaagaaccaattgagcatgactgccaacaaattatagtccagaattatgccacccgagatgatctcttagaagtccccttagctaatcctgaccttaacctacatagggatggaagttcatttgtggagaatgggatgcgaagggcaggttatgccatagttagtgatgtaaccgtacttgaaaagagctcccctctggaggacactacaactgcagggccccttcatcaccccatccagcaggaagtagctagagtggtcatcagccaaattcccaacagtagttggggtgtcctgtttagagggggtattgagag

SEQ ID NO: 5785 - DNA, 689 bp, Homo sapiens; identical to SEQ ID NO: 5298
  SIMILAR (130)..(678): 741254mologous to multiple sclerosis associated retrovirus polyprotein,accession number AF009668,Smith-Waterman Score=708.

SEQ ID NO: 5786 - DNA, 1148 bp, Homo sapiens; identical to SEQ ID NO: 5301
  SIMILAR (402)..(1145): 701254mologous to multiple sclerosis associated retrovirus polyprotein,accession number AF009668,Smith-Waterman Score=919.

SEQ ID NO: 5787 - DNA, 355 bp, Homo sapiens
  SIMILAR (321)..(151): 321254mologous to Xenopus laevis alpha-globin,accession number M15381,Smith-Waterman Score=59.
cgtcgacttttttttttttttttgcagccagatttattgcaaagagcggaagaaaaaagcttccacagtgtggaaggggacccgagcgggttgccctatttcaaacatttcttaatttcatttctgttttgttttctatgtatttaagtcttcagaggctaaagcagaaaaggttagagaatggaacttctctacttcttgaaaagtataactaaactttttactaatattaatgttgaactggctcaaaatattgctaactaataaaggagcagggctgatatctttgaaggctgtaagagaatatatttctatgtgactctgcaagagggatttggatctgttcaggtcgagc

SEQ ID NO: 5788 - DNA, 472 bp, Homo sapiens
  SIMILAR (2)..(106): 481254mologous to Homo sapiens Extended human secreted protein sequence, SEQ ID NO. 491,accession number Y36106,Smith- Waterman Score=97.
cacagccctcatgcttgccatatgccatggatcatcagagatagttggcatggttcttcagcaaaatgttgacatctgtgctgaagatacgtgtggaatgattgcaacgttatgctgttgcttgtgggtttaatctcattgatcaacaacttttggaatataacaaaaggtatctaaaaattctcaaaatagcaatccaggtaagacctctgatagtaaactacacttggtggtgctaccatgagattataggagtgttgatcacaaaagaactattaaaaaagcaatgtgtaagtagcatgtgtttacatatatacctatatgtaagtgtttttatatatacatagctttgatttaattttttagtttataattcagaattaagaatttagttgggcaacccgctcgggtcccacttccacactgtggaagctttgttctttcgctctttgcaataaatcttgctagtaaa

SEQ ID NO: 5789 - DNA, 852 bp, Homo sapiens; identical to SEQ ID NO: 5302
  SIMILAR (361)..(810): 721254mologous to multiple sclerosis associated retrovirus polyprotein,accession number AF009668,Smith-Waterman Score=563.

SEQ ID NO: 5790 - DNA, 807 bp, Homo sapiens
  SIMILAR (412)..(654): 571254mologous to Homo sapiens envelope protein,accession number AF072508,Smith-Waterman Score=229.
atgaacaaagaactgggaatcagcagttacaagttttgtggaatggggaggaaaactagtgtttctgctgctaaatcagtgagcgcaactattccaatcagcagggtccagggactgttgcaggttcttgggcaagaggtatttctgctgctgtgtcaagaccaagaggaacaggccaaaagggaaaagcgagatcagagaaaggccacagccttagccatggccctcagacaaacaaaccttggtggttcagagaggatagaaaatggagcaggccaatcacctagtagggcttgttatcagtgtggtttacaaggacactttaaaaaagattatccaacaagaaaccagctgccccctgtccactatgctgaggcaatcactggaagatgcactgcccaagaggacaaaggtcctgtgacagccatcttgctattactcacctttaggccctgtatttttaacctccttgtcaaatttgtttcctgtaggatcgaggccatcaagctacagatggtcttacaaatggaaccccaaatgagctcaactaacaacttctaccaaggacccctggaccaacctgctggccctttgactggcctaaagagttcccctccggaggacactacaactgcagggcccctacttcgccccatccagcaggaagtagctagagtggtcatcacccaattcccaaaagcagttggggtgtcctttttagaggggggattgagaggtgaagccagctggacttcctgggtagagtggggacttggagaacttttctgtccagctaacggattgtaa

SEQ ID NO: 5791 - DNA, 726 bp, Homo sapiens
  SIMILAR (172)..(723): 751254mologous to multiple sclerosis associated retrovirus polyprotein,accession number AF009668,Smith-Waterman Score=719.
atgtttcggaaggatgaagaactgacttcctcacagagggatttagctgtaaggaactgggcatggagcctagcccgtggtgagcgctcagcaaacatgcacgcagtacacacctcgcttctagtggaaaggacaatactgaccacgaccaaggaaagagggtctaccttgcaatatcccttaagacctggagctcataaaggattgcaagatattgttaaacgtttcaaagctcaagccttaataaggaaatgcagcagtccctgcaacaccccaattctaggagtacaaaaaccgaatggtcagtggagactagtgcaagatcttagacttatcaatgaggcagtaattcctctatatccagttgtacccaacccctataacctgctctctcaaataccagaggaagcagaatggttcactgttctggacctcaaggatgccttcttctgtattcccctgcactctgactcccagtttctctttgcctttgaggatcccacagaccacacgtcccaacttacgtggacggtcttgcccccagggtttagggatagccctcccctgtttggtcaggcactggcccaagatctaggccacttctcaagtccaggcactctggtccttcagtatgtggatgatttacttttggccaccagttcagaagcctcttgccagcaggctactctagatctcttgaactttctagctaatcaagggtactag

SEQ ID NO: 5792 - DNA, 882 bp, Homo sapiens
  SIMILAR (716)..(751): 831254mologous to Homo sapiens Human secreted protein, SEQ ID NO: 7678,accession number G03597,Smith-Waterman Score=47.
tcagccggcttcatttctgaatgatttcagatggccaacgctcagctcagcaactgtgggctgcatgctaaccctggggggctggtagcaggcccacagctttgttctctgtccacttgaggttaagcacctgctatgcaggacgggctgaagtgctctggtctgctgacaacactctttcttagctgcctcttctaacaatccctggctgcctaaaccctttctgttcacagcaaggccagatgccccagatatcgccctggggtttcttgccttggtgtacccgaagaattggatctcacgtgggcttggagaatgaatgcaaggttttattgagtggaagtagctctcagcagatgggggagccagaagggagacagagtaggaagatggttttcctgttggagtcaggtcactcagcagccgggctctcctctgaccaccccgtccaaaccccacgttgttccacctgtcgatggcctgctggtgcctgtcgatgtgctctcgacgtccagctgcttgtgtgttcctccgccagtgtgctcctcttgacgtccagctgcttgtgtctctgcctggtagggtctcagggggttttataggcacaggatggggacgtggccggccagggtggttgtggaagctttgttctttcgctctttgcaataaatcttgctgctgctcggtctttgggtccacattgccttcatgagctgtaacactcactgcgaaggtccgcagcttcactccgtgagggttcgcggcttcattcttaaagtcagtcagaccaagaacccaccaattccggacacagtatgagtaggtatagtgtgtcccaccgctcccaggggccccttttacatgcacaagtgcacaggccat

SEQ ID NO: 5793 - DNA, 846 bp, Homo sapiens
  SIMILAR (731)..(844): 411254mologous to Homo sapiens Gag-Pro-Pol protein,accession number AF164613,Smith-Waterman Score=66.
atgggacaagtgtgggctgtggttcgttctaccttggaactttttcacactgatgatgaggaggaaggagagtataacaaagtaacagtagaggttacagaccaggtttatttgccacctaaatctaaagcagaaaaggaaggagaggttcatccctacccttctgcaccccctcattattattttgaagaaaacgaccctccagatctttcttttctggaggacactggagggaaagcacatttagttgattatatcaaggcctgtgatagtatcagaggtaatctacataaagctactttgttggcacaggcgatggcaggactgagagtggataaaggaaatactccatttcctggagcttgttttaactgtgggaagcatggtcatactaaaaagaatgtagaaaaaaaatcagcgactgagcaatactgtgaacggtttgcatttacaattcctgcagtaagcaacctgcagcctgcgaagtgttttcattgtttcacagatgggtatagtaatggtaaagcttcttattctggatcaaaaggtaaagttttccagacaccctatacttcagctcaaaaagtggagcttgtagctgtaattgaggtattgactgcttttgatatgcctattaatgtgatttctgattcttcatacatggttcactccacacagttaattgaaaatgctcagttacaatttcatacagatgaacaactgataataaaaacaaaaaagggggagaaacagggattaagggatagcccatatacaattgaatctagcattattaactttcaattttttaagcctgcccaaaggccagatgttatcagcagctga

SEQ ID NO: 5794 - DNA, 1779 bp, Homo sapiens; identical to SEQ ID NO: 5306
  SIMILAR (778)..(1236): 751254mologous to Homo sapiens gag,accession number AF156961,Smith-Waterman Score=620.

SEQ ID NO: 5795 - DNA, 1185 bp, Homo sapiens
  SIMILAR (160)..(825): 411254mologous to Human endogenous retrovirus gag,accession number X72791,Smith-Waterman Score=496.
atgggaaaagtgtgggctgtggttcgttccaccttggaactttttcacactgatgatgaggaggaaggagagtataacgaagtaacagaagagattacagagcaggtttatttgccagctaaagctaaagcggtaaaggagagagaacaacggggaaatattacagctacatttgagccttttccttttaaattgctcaaagaatttaaacaagctataaatcagtatggaccaggttctcattttgtaatgggactgttaaagaatgttgctgtttccagtcagatgattcctactgactgggatgctcttactcaggcttgtctaactcctgctcagttcttacaatttaaaacttggtgggcccatgaagcttccattcaggctgcttgcaacgcccaggcccagcctcaaattaatataactacaggccaacttttgggggttggcggctgggctggtttagatgcacaagtggtcatgcaggatgatgccatagaacagcttagaggagtgtgcattagagcttgggaaaaaatccctttatgtggagaacaatacgcttcctttagtgctataaaacagggaccaaaagaaccatatgtggattttatagcttggttacaggagtctcttaaaaaggctgggcgacagagtgagatttcatctcaaaacaaaaaggtgattgcagatttggctgctcaggatatagtgctgcagttattagcttttgacaatgctaatcctgactgccaggctgctctgcgacctatcagaggcaaagcacatttagttgattttatcaaggcctgtgatgttatcggagcatattggacagctaacaggcgagaagcttttcaaagccccttcccctccatactggggctggcagggggccaggagggaggccccagagcagaagcacttgtgcagccacccccagggcgctgttcctgctgggttacaatctccccactgaaccagaagaaagctctactgaggatcacacatggcacagatgtggtcacacatggctccaaagtccgaacggaagtcttggcactggacccaggcaagaagctccagaatatgctgctgtccagtcggaaagggcttgctgcctccctaaacaccttccagctacattcactctcagaaaaactcaggggtgagattcatggatga

SEQ ID NO: 5796 - DNA, 357 bp, Homo sapiens
  SIMILAR (233)..(171): 951254mologous to Homo sapiens Human secreted protein, SEQ ID NO: 7678,accession number G03597,Smith-Waterman Score=102.
atggacggcaagctttgggtaactctcacagtggaagaacagatggacaagaacattcctggcatccctgagtgtaatagcaaacatactggagcctttactgaatattctacatgtagcagtgtggctgatgctcccaaactaatcttgagtgaaaaagcaagtcataatgtgtctggaattggtgggttcttggtctcactgacttcaagaatgaggccacggaccctcgcgtgtgttcgtggccttgctggctcaggagtgaagctgcagacctttgcggtgagtgttacagctcataaaggcagtgtggacccaaagagtgagcagcaacaagatttattgcaaagagcttaa

SEQ ID NO: 5797 - DNA, 3103 bp, Homo sapiens
  SIMILAR (694)..(1590): 751254mologous to multiple sclerosis associated retrovirus polyprotein,accession number AF009668,Smith-Waterman Score=1186.
atgacagctgaagaaagggacaaattccctaccagtcagcaagctgtccccagtatggatgcccactgggacctcgactcagatcatggggactggagtcgtaaacatctgttgacctgtgttctagaaggactaaggagaattaggaaaaagcccatgaattattcaatgatgtccaccataactcagggaaaggaagaaaatccttctgccttccttgagcagctacaggaggccttaagaaaatatactcctctgtcacccaactcactagtgggtcaattgatcctaaaagataagtttattacccaatcaaccacagatatcagaagaaagctccaaaatagggaccaagaggaacaggcccaaaaggaaaagcgagatcagagaaaggccatagccttagtcatggccctcagacaaaccttggtggttcaaagaggacagaaaatggagcaggccaatcacctggtggggcttgttaccagtgtggtttgcaaggacaccttaaaaaagattgtccaacgagaaacaagccgccccatcgtccatgtccactatacggaggcaatcactggaagtcacactacccagagggcaaagcttctctgggccagaagcccccaaccagatgatccaatgacaggactgaggatgactgcggcaagcacccgttcatgtcatcaccccctcactgagccctgggtatgtttaatcattgagggccaggaaattgacttcctcctggacactggcacgaccttctcagtgttaatcccctgtcttggacgactgtcctcaaggtccgttaccatccaaggaatcctgggacagcctgtaaccaggtatttctcccacctcctcagttgtaattgggagactttgctcttttcacatgcctttcttgttatgcctgaaagtcccacacccttattagggagggatatattagccaaagctggagctattatctccatgaagacagggaacaagttacccatttgttgtcccctacttgagggaatcaaccctgaagtctgggcattggaaggacaatttggaagggcaaaaaatgcccatccactccaaatcaggctaaaagaccccatcagttttccttatcaaaggcaatatcccttaaggcctgaagctcataaaggattacaggatattgttaaacatttaaaagctcaagactcagtaagaaaatgcagcagtccctgcaacaccccaattctaggagtacaaaaactgaacagtcagtggagactagtgcaagatcttagactcatcaatgaggcagtaattcctctatatccagttgtacgcaacccctatacccttctctctcaagtaccagaggaagcagaatggttcactgttctggacctcaaggatgccttcttctgtattcccctgcactctgactcccagtttctttttgcctttgaggatcccacagaccacacatcccaacttatgtggatggtcttgccccaaaggtttagagatagccctcatctgtttggtcaggcacaggcccaagatctaggccacttctcaagtccaggcactctggtccttcaatacagcgagatagccaagaccctctatactctaatcaaggagatggagagggcaaatactcacctagtagaatgggaaccagaggcagaaacagccttcgaaaccttaaagcaggccctagtacaagctccagctttaagccttcccacaggacaaaacttcgctttatatgtcatagagagagcagggatagctcttggagtccttactcagactcacaggacaaccccacaaccagtggcatacctaagtaaggaaattgatgtagtagcaaaaggctggcctcactgtttaaggacagttgtggcagtggctgtcttagtgtcagaggctatcaaaataatacaaggaaaggatttcactgtctggactactcatgatgtgaatggcatactaggtgccaaaggcggtttatggccatcagacaactgcctacttagataccaggcactactccttgaggaaccagtgcttcaaatacatatgtgcatagccatcaaccctgccacttttctcccagaagatggggaaccaatcaagcatgactgccagcaaattatagtccagacttatgccacccaagatgatctcttagaagtccccttagctaatcctgactttaacctatataacagtggaagttcatttgtagagaatgggatacaaagggcaggttatgccatagttagtgatgtaactgtacttggaagtaagcctctttccccagggactagcacccagttagcagaactagtggcacttacccgagccttagaactgggaaaaggaaaaagaataaatgtgtatacagatagcaagtatgcttatctaatcctacatgcccatgctgcaatatggaaagaaagggagttcctaacctctgggggcacccccattaaataccacaaggaaattatggagttattgcacacagtgcaaaaacccaaagaggtggcagtcttacactgccgaaaccatcaaaaaggatcgaggccatcaagctacagatggtcttacaaatggaaccccaaatgagctcaactcacaacttctaccaaggacccctggaccaacccgctgaccctttgatgggcctagagagttcccctctggaggacactacaactgcagggccacttctttgcccctatccagcaggaagtaactagagcggtcatcggccaaattcccaacagcagttggggtgtcgtgtttagagggggaattgagaggagcttgctacaagtgctggaaatctggccactgggccaaggaatgcccacagcccagaattcctcctcatccacgtcccatctgtgtgggaccccactgaaaatcagacttttcaactcaccaggcagccactcccagagcccctggaactctggcccaaggctctctgactccttcccagatcttcttggcttagcggctgaagacggacgctgcccagtctcctcagaagcccccgagactatcacgaatgccgatcttctggtaacactcacaatggagg

SEQ ID NO: 5798 - DNA, 1025 bp, Homo sapiens
  SIMILAR (717)..(974): 551254mologous to Homo sapiens envelope protein,accession number AF072508,Smith-Waterman Score=211.
ttttttttttttgggtttccatgtattttattccattccactcataccaagagacaattctttttgaggtgtgtttagctctctagacttaattactgctgtgtttgtcacattggctgaattgagatcggtgacataaggattcctgggagcctgcgctgggcgcgaatttaagatggctcctccatgatcttcactctctgggtgaaaactgtcggtcagcccatgcccaggattgttgatcagtgctgaaggtcctgaggctgtttttagcatagtctaaaacgcgagggtccgtggcttcattcttgaagtcagtgagaccacgaacccaccaggaggaacaaataactccggacgcaccacctttaagagctgcaacgttcattgcaatggtctgcggcttcactcctgaagtcaagcgagaccacaagcccactggaaggaacaaattccagacacattttggcgacgaccaagggacaattgccaagcatcctctttgtggtctaggaggacaggcaaaggtgcaggttttcgaggatgagtcggtaatggccactaaatccgaccttcctcggtcctccttgtggtctaggaggaaaactagtctttcagctgctgcatcagtgagtgcaactattctgatcagcagggtccagggactattgcaggttcttgggcggcagtgggggaaacaaacaaaccaaaactgtcccatgagagccatcgtgctattactcgcctttgggccttctatttttaatctttttgtcaaatttgtttcctccaggatcgaggccatcaagctacagatggtcttacaaatggaaccccacatgtgctcaactaacaacttctaccaaggacccctggatcgacctgctggccctttcactggcctaaagagttcccctctggaggacactacaactgcagggccccttctttgcccctatccagcaggaattagccagagtggtcatcgcccaattcccaacggcagttgggggtgtcctgtttag

SEQ ID NO: 5799 - DNA, 3620 bp, Homo sapiens
  SIMILAR (975)..(1721): 741254mologous to multiple sclerosis associated retrovirus polyprotein,accession number AF009668,Smith-Waterman Score=980.
gaggacctatcagcttacccccatatcctagcctccctatagctccccgtcctattaacgataatcctcctctaatctcccctgcccagaaggaaatatgcgaagaaatctccaaaggacaacaaaaacccctgggctatcggttatgtccccttcaagctgtagggggaggggaatttggcccaacctgggtacatgtccccttctccctctctgatttaaagcagatcaaggcagacctggggaatttttcagatgatcctgataggtacataaatgtcctacagggtctaggacaaatcttctatctcatttggagagatgtcatgctattgttagatcaaaccctggcctttaatgaaaagaatgcagctttagctgcagcccaagagtttggagatacttggtatcttagtcaagtaaatgacagaatgacagctgaagaaaggggcaaaatccctaacggtcagcaagctgtccccagtatggatccccactgggaccttgactcagatcatggggactgcagttgcaaacatctgttgacctgtgttctagaaggactaaggagaattaggaaaaagtacatgaattattcaatgatgtccaccataactcagggaaaggaagaaaatccttctgcctccctcgagcggctatgggaggccttaagaaaatatactcccctgtcaaccaaatcacttgagggtcaattgattctaaaagataagtttattacccaatcagccacagatatcaggagaaagttccaaaagcaagccctgggccctaaacaaaatttggagacattattaaacctggcaacctcagtattctataacagggaccaagaggaacaggcccaaaaggaaaagcaagatcagagaaagaccgcagccttagtcatggccctcagacaaacaaaccttggtggttcagagaggacagaaaatggagcaggccaatcacccgagagggatacattagccaaagctggagctattatctacatgaatatggggaacaagttacccatttgttgtcccctacctgaagagggaataaaccctgaagtctgggcattggaaggacaatttggaaaagcaaaaaatgcccacccagtccaaatcaggctaaaagaccccaccacttttccttatcaaaggcaatatcccttaaggcctgaagctcataaaggattaaaggatattgttaaatatttaaaagctcaagccttagtaaagaaatgcagcagtccctgcaacagcccaattctaggagtacaaaaaccaaacagtcagtggagactagtccaagatcttagactcatcaatgaggcagtaattcctctatatccagttgtacccaacccctatatcctgctctctcaaataccagaggaagcagaatggttcactgttctggacctcaaggatgccttcttctgtattcccccgcactctgactcccagtttctttttgcctttgaggatcccacagaccacatgtcccaacttatgtggacagtcttgccccaagggtttaaggatagccctcatctgtttggtcaggcactggcccaagatctaggttacttctcaagtccaggcactctggtccttcagtacgtggatgatttacttttggctaccagttcagaagcctcgtgccagcaagctactctagatctcttgaactttctagctaatcaagggtgcaagagagtgggaatagctcttggagtccttactcagactcatgggacaaccccacaaccagtggcatacctaagtaaggaaactgatgtagcagcaaaaggtcccctgacagccatcttgctattactcgcctttgggccctgtatttttaacctccttgtcaaacttgtttcctccaggattgatgccatcaagttacaaatggtcttacaaatggaaccccaaatgagctcaactaacaacttctaccgaggacccctggaccgacccgctggccctttcactggcctaaagagttcccctctggaggacactacaagtgcagggccccttcttcgcccctatccagcatctcttctcggcaaagtgaaagaagcggtgaaggtggccattgatgcagaatatcgccacattgactgtgcctatttctatgagaatcaacatgaggtgggagaagccatccaagagaagatccaagagaaggctgtgatgcgggaggacctgttcatcgtcagcaaggtgcacatggcgcatttggtgtggcccactttctttgagagaccccttgtgaggaaagcctttgagaagaccctcaaggacctgaagctgagctatctggacgtctatcttattcactggccacagggattcaagagcttgaaaaagtggtatgcagatgtggtatttagcaagcatcaggatcctgaaaccttgttgaacagaaccaagtgtcctgatgcagattccagtaaacttttcattctgtatttacagactggggatgactttttccccaaagatgataaaggtaatatgatcagtggaaaaggaacgttcttggatgcctgggaggccatggaggagctggtggacgaggggctggtgaaagcccttggggtctcaaatttcaaccacttccagatcgagaggctcttgaacaaacctggactgaaatataaaccagtgactaaccagaactccctaggaacaatgcaaaacagagccggctttccccgtgatgaggattgtttgctgttgcaggttgagtgtcacccatacctcacgcaggagaaactgatccagtactgccactccaagggcatcaccgttacggcctacagccccctgggctctccggatagaccttgggccaaacctgaggacccttccctgctggaggatcccaagattaaggagattgctgcaaagcacaaaaaaaccacagcccaggttctgatccgtttccatatccagaggaatgtgacagtgatccccaagtctatgacaccagcacacattgttgagaacattcaggtctttgactttaaattgagtgatgaggagatggcaaccatactcagcttcaacagaaactggagggcctttgacttcaaggaggagagacatcctagcaaaagtaggggccattatacactagaattaggagaagaaaaaagggtgaacatatatacagactctgagtatgcttacctagtcctccatgcccacgcagtaatatggagagaaagggaattcctaacttccaagggaacacctatcaaacatcaggaagccattaggagattattattggctgtacagaaacctaaagaggtggcagtctttcactgctggggtcatcagaaaggaaaggaaagggaaatagaagggaactgccaagtggatattgaagccaaaagagctgcaagaatcaaagctgtaaaactacaaatggttcttcaaatggagcaccagatgcagtgcatgactaagatctaccgtggacccctggactggccagctagcccatgctccgatgttaatgacattgaaggcacccctcccgaggaaatctcaactgcacaacccctgctacaccccaattcagcaggaagcagttag

SEQ ID NO: 5800 - DNA, 1996 bp, Homo sapiens
  SIMILAR (328)..(960): 431254mologous to Homo sapiens Gag-Pro-Pol protein,accession number AF164609,Smith-Waterman Score=487.
  misc_feature (1)...(1996): n = a,t,c or g
atgggacaagtgtgggctctggttcgttccaccttggaactttttcacactgatgatgaggaggaaggagagtatgacgaagtaacagaagaggttacagagcaggtttatttgccagctaaagctaaagtggcacaggaggaagaggttcatccctacccttctgcaccccctcattattattttgaagaaaaagagtggccagaccctccagatctttcttttctggaggacactgggcgaaaagtagttgccccagtgactgagcagcacctcgagcgactgctgtcagttctattcaggcaggagttcagcaggctagacgagagggatgatgccgtagagcagcttagaggagtgtgcattagagcttgggaaaaaatcacttcaggtggagaacaatacccttcctttagtgctgtaaaacagggaccaaaagaactgtatgcagattttatagcttggaatctcttaagacaggagtctcttaaaaagatgattgcagattcggctgctcaggttatagtgttgcagttattagcttttgacaatgctaatgccgattgccaggctgctctgcaacctgtcagagggaaagcacatttagttgattacatcaaggcctgtgatggtatcagaggtaatctgcataaagctactttgttggcacaggaaatggcaggactgagagtggataaaggaaatactccatttcctggagcttgttttaactatgggaagcatggtcatactaaaaaagaatgtagaaaaaaatcagtgagtcaggcagccagatggggaaaaaggaaaactgctgatcctgaaatatgtccaaaatgtaaaaaagggaaatattgggctaatcagtgtcactctaagtttgacaaagatgggaccctgatttcgggaaatgccatgagggctgagcaagactgtgaatggtttacatttacaattcctgcagtaaacaacctgcagcctgctaagcattttcatcgtttcacagatgtgtctagtaatggtaaagcttcttattctggatcaaaaggaggacaggcaagggtccagctttttgagaatgcatcagtaagggccactaactctgaccttcctcagtcctccttgtggtgtaggaggaaaactagtgtttctgttgctgtgttggtgagtgcaactattccgatcagcagggtccagggaccatcacaggttcttgggcagggggagaaacaaacaaaccaaaacgttgtacccaacccctataccctgctctctcaaataccagaggaagcaaaatggttcactgctctggacctcaaggatgccttcttctgtattcccctgcactctgactcccagtttctctttgcctttgaggatctcacagaccacacatcccaacttacgtggaccatcttgccccaagggtttagggatagccctcatctctttggtcaggcactggctcaagatctaggccacttctcaagtccaggcactctggtccttcagtatgtggatgatttacttttggctaccagttcagaagcctcatgccagcaggctactctagatttcttgagctttctagcaaatcangggatcgaggctatcaagctacagatgatcttacaaatggaaccccaaatgagctcaactaacaactaccaaggacccctggaccaacccgctggccctttcaatggcctaaagagttcccctctggaggacactacaactgcagggccccttcttcacccctatccagcaggaagtagctagagcggtcatcagccaaattcccaacagcagttggggtgtccctagccagcagcggcaacccgctcgggtccccttccacactgtggaagctttgttctttcactctttgcaataaatcttgctgctgcccactctttgggtctgcactgcctttatgagctgtaacactcacgacgaaggtctgcagcttcactctgtgaaggtctgcagcttc

SEQ ID NO: 5801 - DNA, 423 bp, Homo sapiens
  SIMILAR (73)..(417): 651254mologous to Mus musculus syntrophin-associated serine- threonine protein kinase,accession number AF077818,Smith-Waterman Score=347.
atgtcttggatgggctcctttctcacaagtcttcctcacctgtcaatatcatgggggaacaggtttgaaatctccaatgatcaaacaagaaatcatttacctgaacagccatcaatcacagtaaagtatgtccagtgcccaccttataaaacaggggacactgaagtcaccctggatgatgagagagctcttgggcaaagaggaagggcagtctactttgttcggcataaagaatcccggcagaggtttgccatgaagaagattaataaacagaacctcatccttcgaaaccagatccagcaggcctttgtggagcgggatatcctgacttttgcagaaaacccctttgttgtcagcatgtattgctcctttgaaacaaggcgccacttgtgcatggtcatggaatatgtggaaggtatctga

SEQ ID NO: 5802 - DNA, 1635 bp, Homo sapiens
  SIMILAR (232)..(579): 931254mologous to Homo sapiens putative p150,accession number U93569,Smith-Waterman Score=574.
atgcagatctttgtgaagaccctcacgggcaagaccatcacccttgaggtcgagcccagtgacaccattgagaatgtcagtgcgaaaattcaagacaaggagggtatcccccctgacaagcagcgtctgatatttgccagcaaacagctggaggatggccgcactctctcagactacaacgtccagaaacagcccaccccgcacctgggtttttatggttttaggtctaatacaagggacgtgaaggacctcttcaaggagaactacaaaccactgctcaatgaaataaaagaggatacaaacaaatggaagaacattccatgcttatggataggaagaatcaatatcgtgaaaatggccatactgcccaaggtaatttatagattcaatgtcatccccatcaagctgccaatgactttcttcacagaattggaaaaaactactttaaagttcatatggaaccaaaaaggagcccgcattgccaagtcaatcctaagccaaaagaacaaagctggaggcatcatgcaacctgacttcaaactatactacaaggctacagtaaccaaaacagcatggtttggagtctactttgttggaggaccaaggtgtggcagctccagctgggtgctagtggattcaggggtgcctgcctccctgcaggcattcaccatgctagtgaaggcaaggcatttttgtggggaacaggaggctcctgctatagactgtctgtgcttttgcactggtgatggtgttggtttggtgagaggcactgaccagtgcagatctgagtgccttcttggtcacctgcaagcaggagggattgctcaggtggggcaactaaagcaaattccacctgtgcagacatgtgcctgcaaagtgatgtggggagttgccatgggctcaggggaagttgcagtatgggtagcgaacacccggctggtgtgcgcagtaagggctgtcttgctggagttctccactggtcaggcatggcccactggtgcagaagctattctgtgggccaccacagcacccaagatggccctagaagaggccagcagaccaaggagtgctcaggttgcaccagccctgactgatggacaagaccactctgcagatatcaagtctgaaaattcccctagggccaaagtctattatgggagcaagttgagcctagagggatcgccatccctgtccatgcactgctgtagacactcctgcactaaaccctctgggctccacatcagctggcttgctgctctaccactttgcttgtctcttgggggctccaccccagagagatgtgggtcagcaatcattcagttcaatcagcccaggatggagagtctgtgctatgggcccaagccaggggctctctgtctggtgacgagcagctgggggattttccagtacctggaggtgtcaccagtgaaagctgcgaaacagcaaagatggtggccttcctttctctctgggagctccatccctgggaaatacaggcctgttgctggcccgaacacactggcaatttatagcactgatctgtcatcaataccacttgctgtcttggatgtgaagatgatttttcctgcagggattccctctacaaaattaaaaacactgggcatgtggaaataa

SEQ ID NO: 5803 - DNA, 608 bp, Homo sapiens
  SIMILAR (153)..(518): 821254mologous to Homo sapiens DNA polymerase delta small subunit,accession number U21090,Smith-Waterman Score=547.
aaatacctcaccaagaaaacccaggcagccagcgtggaggctgttaagatgctggatgagatcctcctgcagctgagcgcctcagtgcccgtggacgtgatgccaggcgagtttgatcccaccaattacacgctcccccagcagcccctccacccctgcatgttcccgctgccactgcctactccacgctccagctggtcaccaacccctaccaggccaccattgatggagtcagatttttggggacatcaggacagaacgtgagtgacattttccgatacagcagcatggaggatcacttggagatcctggagtgactgcgggtccgtcacatcagccccacagcccctgacactctaggttgttaccccttctacttttgtggcaacacccccagctttggctccaaaatcatccgaggtcctgaggaccagacagtgctgttggtgactgtccctgacttcagtgccacgcagaccgcctgccttgtgaacctgcgcagcctgcctgccagcccatcagcttctcgggcttcggggcagaggacgatgacctgggaggcctgggctgggcccctgactcaaaaaagtggttttgaccagagaaaa

SEQ ID NO: 5804 - DNA, 1587 bp, Homo sapiens
  SIMILAR (79)..(1059): 931254mologous to Homo sapiens DNA polymerase delta small subunit,accession number U21090,Smith-Waterman Score=1521.
cgggatgcggcgcgccgcgcgttgaacctccttggcctgggcgaagctgtgtggaccaagcaagtcaggagtgtggccatgttttctgagcaggctgcccagagggcccacactctactgtccccaccatcagccaacaatgccacctttgcccgggtgccagtggcaacctacaccaactcctcacaacccttccggctaggagagcgcagctttagccggcagtatgcccacatttatgccacccgcctcatccaaatgagacccttcctggagaaccgggcccagcagcactggggcagtggagtgggagtgaagaagctgtgtgaactgcagcctgaggagaagtgctgtgtggtgggcactctgttcaaggccatgccgctgcagccctccatcctgcgggaggtcagcgaggagcacaacctgctcccccagcctcctcggagtaaatacatacacccagatgacgagctggtcttggaagatgaactgcagcgtatcaaactaaaaggcaccattgacgtgtcaaagctggttacggggactgtcctggctgtgtttggctccgtgagagacgacgggaagtttctggtggaggactattgctttgctgaccttgctccccagaagcccgcacccccacttgacacagataggtttgtgctactggtgtccggcctgggcctgggtggcggtggaggcgagagcctgctgggcacccagctgctggtggatgtggtgacggggcagcttggggacgaaggggagcagtgcagcgccgcccacgtctcccgggttatcctcgctggcaacctcctcagccacagcacccagagcagggattctatcaataaggccaaatacctcaccaagaaaacccaggcagccagcgtggaggctgttaagatgctggatgagatcctcctgcagctgagcgcctcagtgcccgtggacgtgatgccaggcgaggtttgatcccaccaattacacgctcccccagcagcccctccaccccttgcatgttcccgctggccactgcctactccacgctccagctggtcaccaacccctaccaggccaccattgatggagtcagatttttggggacatcaggacagaacgtgagtgacattttccgatacagcagcatggaggatcacttggagatcctggagtggaccctgcgggtccgtcacatcagccccacagcccctgacactctaggttgttaccccttctacaaaactgacccgttcatcttcccagagtgcccgcatgtctacttttgtggcaacacccccagctttggctccaaaatcatccgaggtcctgaggaccagacagtgctgttggtgactgtccctgacttcagtgccacgcagaccgcctgccttgtgaacctgcgcagcctggcctgccagcccatcagcttctcgggcttcggggcagaggacgatgacctgggaggcctggggctgggcccctgactcaaaaaagtggttttgaccagagaggcccagatggaggctgttcattccctgcagtgtcggcattgtaaataaagcctgagcacttgctgatgcg

SEQ ID NO: 5805 - DNA, 491 bp, Homo sapiens
  SIMILAR (416)..(463): 811254mologous to Homo sapiens ribosomal protein L7,accession number L16558,Smith-Waterman Score=77.
  misc_feature (1)...(491): n = a,t,c or g
ccggctggaaccatggagggtgtagaagagaagaagaaggaggttcctgctgtgccagaaacccttaagaaaaagcgaaggaatttcgcagagctgaagatcaagcgcctgagaaagaagtttgcccaaaagatgcttcgaaaggcaaggaggaagcttatctatgaaaaagcaaagcactatcacaaggaatataggcagatgtacagaactgaaattcgaatggcgaggatggcaagaaaagctggcaacttctatgtacctgcagaacccaaattggcgtttgtcatcagantcagaggtatcaatggagtgagcccaaaggttcgaaaggtgttgcagcttcttcgccttcgtcaaatcttcaatggaacctttgtgaagctcaacaaggcttcgattaacatgctgagggattgtagagccatatattgcatgggggtaccccaatctaactaatctacaagcgtggntatngcaaaatcaattag

SEQ ID NO: 5806 - DNA, 442 bp, Homo sapiens; identical to SEQ ID NO: 4613
  SIMILAR (6)..(275): 981254mologous to Homo sapiens ribosomal protein L7,accession number X57959,Smith-Waterman Score=470.
  misc_feature (1)...(442): n = a,t,c or g

SEQ ID NO: 5807 - DNA, 891 bp, Homo sapiens
  SIMILAR (50)..(781): 371254mologous to Homo sapiens ribosomal protein L7,accession number X52967,Smith-Waterman Score=272.
  misc_feature (1)...(891): n = a,t,c or g
gaattccgccagaaacccttaagaaaaagcgaaggaatttcgcagagctgaagagaagaagaaggaggttcctgctgtgccagaaacccttaagaaaaaagtgaaggaattttgcagagctgaagatcaagcgcctgagaaagaagtttgcccaaaagatgcttcaaagggcaaggaggaagtttatccatgaaaaagcgaagcacttatcacaaggaatataggcagatgtacagaacctgaaattctaatggctgaggatggcaagaaaagctggcaacttctatgtacctgcagaacccaaattggcgtttgtcatcagaatcagaggtatcaatggagtgagcccaaaggttcgaaaaggtgttgcagcttcttcgccttcgtcaaatcttcaatgggaaccttttgtgaagctcaacaaaggcttccgattaacatgctgagggattgtaggagccatatattggcatggggggtaccccaaatcttgaagtcagtaaatgaactaatctacaagccgtggttatggcaaaatcaataagaagcgaattgcttttgacagataaccgctttgattgctcgatctcttggtaaaatacggcatcnttcttgcatgggaggatttgattcatgagatctatactgtttggaaaaccgcttcaaagaggcaaataacttccctgtgggcccttcaaatttgtcttctccaccaaggtggaaatgaaagaaaaagaccacccatttttgtaagaaggtggaagatgctggcaacagggaggggaggaccagatccaacaggccttatttggaaggaatggacttaaggtgtctaccatgattatttttctaagctggttcggtaaataaccagtacctggtctcaaattg

SEQ ID NO: 5808 - DNA, 459 bp, Homo sapiens
  SIMILAR (96)..(359): 821254mologous to Homo sapiens dJ475N16.3 (novel protein similar to RPL7A (60S ribosomal protein L7A)),accession number AL035587,Smith-Waterman Score=346.
  misc_feature (1)...(459): n = a,t,c or g
gaagctgatccttaagcggcgcatacaggctaggttaagtactgaatcattcctacatgattcctggcaggagaaacgtgacaaggtgcatctcaagacaactagaagtgcaacctcacgccttggaattgccggataaatgttccttggcctttgttgtacgcatcaaaaggattgatggcgggagtttactggtgcagagaaccattgcaagactttgcctgaagaaaatttttagtggtgtctttttaaaaatgctgcgtatagtggaaccttatgtgacctgaggatttccaaatctgaagtctgtctgggaattcattttgaaacatggacaagccaaggtcaagaataagaccatnnnnnnnnnnnnnnnnnnnnnnnnnnnnnnnnnnnnnnnnnnnnnnnnnnnnnnnnnnnnnnnnnnnnnnnnnnnnnnnnnnnnnnnnnnnnnnnnnn

SEQ ID NO: 5809 - DNA, 453 bp, Homo sapiens
  SIMILAR (145)..(444): 891254mologous to Homo sapiens dJ475N16.3 (novel protein similar to RPL7A (60S ribosomal protein L7A)),accession number AL035587,Smith-Waterman Score=443.
atggcagagcaaaagcaaagaaaaatccctttggttccagaaaatctcctgaaaaagaggaaggcttatcaagtcctcaaagccactcagacaaagcaggcacttttggcaaagaaggagcagcggaaaggaaaagggctcagcaaaaggattgttggcgtgagtctactggtgcagacagccattgcaagacttcatcttaagaaaatttttagtggtgtctttgtaaaagtcaccccccagaacctaaaaatgctgcgtatagtggaaccttatgtgatctggggatttccaaatctgaagtctgtccgggaattcattctgaaacatggacaagccaaggtcaataagaacaccatccctctgacagacaacacagtgattgaggagcacctggggaagtttggtgtcatttgcttggaagacctcattcatgaaattgcctcccagtga

SEQ ID NO: 5810 - DNA, 552 bp, Homo sapiens; identical to SEQ ID NO: 1438
  SIMILAR (13)..(549): 701254mologous to Homo sapiens dJ475N16.3 (novel protein similar to RPL7A (60S ribosomal protein L7A)),accession number AL035587,Smith-Waterman Score=612.

SEQ ID NO: 5811 - DNA, 698 bp, Homo sapiens
  SIMILAR (3)..(467): 981254mologous to Homo sapiens dJ475N16.3 (novel protein similar to RPL7A (60S ribosomal protein L7A)),accession number AL035587,Smith-Waterman Score=752.
  misc_feature (1)...(698): n = a,t,c or g
aagagcaaagaaaaatccctttggttccagaaaatctcctgaaaaagaggaaggcttatcaagccctcaaagccacccaggcaaagcaggcacttttggcaaagaaggagcagaagaaaggaaaagggctcaggtttaagcgactggaatcattcctacatgattcctggcggcagaaacgtgacaaggtgcgtctcagacgactagaagtgaaacctcatgccttggaattgccagataaacattccttggcctttgttgtacgcatcgaaaggattgacggcgtgagtttactggtgcagagaaccattgcaagacttcgcctaaagaaaatttttagtggtgtctttgtaaaagtcaccccccagaatctaaaaatgctgcgtatagtggaaccttatgtgacctggggatttccaaatctgaagtctgtccgagaactcattttgaaacgtggacaagnccaaggtcaagaataagaccatccctctgacagacaatacagtgattgaggagcacctgggtgagtgctacagcttaggggtcagctggggcagaaagccagggtctttgaagctttgatgtgagattcacggttgtattcttcttggggccccaagagtctgccagagtggccagcttagtatatgctggatacatgttaaataaaggaatctgagcttttgtgtttcttaaaa

SEQ ID NO: 5812 - DNA, 2833 bp, Homo sapiens
  SIMILAR (2366)..(2623): 521254mologous to Homo sapiens dJ475N16.3 (novel protein similar to RPL7A (60S ribosomal protein L7A)),accession number AL035587,Smith-Waterman Score=181.
atgtttggccgctcgcggagctgggtgggcgggggccatggcaagacttcccgcaacatccactccttggaccacctcaagtatctgtaccacgttttgaccaaaaacaccacagtcacagaacagaaccggaacctgctagtggagaccatccgttccatcactgagatcctgatctggggagatcaaaatgacagctctgtatttgacttcttcctggagaagaatatgtttgttttcttcttgaacatcttgcggcaaaagtcgggccgttacgtgtgcgttcagctgctgcagaccttgaacatcctctttgagaacatcagtcacgagacctcactttattatttgctctcaaataactacgtaaattctatcatcgttcataaatttgacttttctgatgaggagattatggcctattatatatcgttcctgaaaacactttcgttaaaactcaacaaccacactgtccatttcttttataatgagcacaccaatgactttgccctgtacacagaagccatcaagtttttcaaccaccctgaaagcatggttagaattgctgtaagaaccataactttgaatgtctataaagtggataaccaggccatgctgcactacatccgagataaaactgctgttccttacttctccaatttggtctggttcattgggagccatgtgatcgaactcgatgactgcgtgcagactgatgaggagcatcggaatcggggtaaactgagtgatctggtggcagagcacctagaccacctgcactatctcaatgacatcctgatcatcaactgtgagttcctcaacgatgtgctcactgaccacctgctcaacaggctcttcctgcccctctacgtgtactcactggagaaccaggacaaggtcttcttaattatacatcatgcaccgctggtgaactcgttagctgaagtcattctgaatggtgatctgtctgagatgtacgctaagactgaacaggatattcagagaagttctgtcttacccactctaagctccttatggcagggatctcacctgtcactgaatcagctgcagtctgggctgcacaaatgctcatctcacttatgcggagcccaggctgcagctgattcagtgacaggtgagatccctgccataaggagcttagagtggctaatcagtgctggttccaaggcgcgcacattcttcttcctgaaaatgctaataggcttctgggagaaggttgattgtgaatatcaaaggcgtcaagtgctgagcacgcggctgcaagaggccttgccgtcaaatcgcctcactgatgttgcagctgtgcattcttcatgcatgttgggctttggttccacagctccacgcggctcctggattggcgatccagcggctgtgcatctgcccctacctggggagctggccgagcaccttgggtccaagggtaccaccactgtcaccaagcaccagccccaggccaagcccagcattcggtgcttcattaaacccaccgagacactcgagcggtcccttgagatgaacaagcacaagggcaagaggcgggtgcaaaagagacccaactacaaaaacgttggggaagaagaagatgaggagaaagggcccaccgaggatgcccaagaagacgccgagaaggctaaaggtacagagggtggttcaaaaggcatcaagacgagtggggagagtgaagagatcgagatggtgatcatggagcgtagcaagctctcagagctggccgccagcacctccgtgcaggagcagaacaccacggacgaggagaaaagcgccgccgccacctgctctgagagcacgcaatggagcagacccttcctggatatggtgtaccacgcgctggacagcccggatgatgattaccatgccctgttcgtgctctgcctcctctatgccatgtctcataataaagaaaatctcctgaaaaagaggaaggcttatcaggcactcaaagccacccaggcaaagcaggaacttttggcaaagaaggagcagaagaaaggaaaagggctcaggtttaagctactggaatcattcctacatgattactggcagcagaaacctgacaaggtgcatctcagacgactagaagtgaaacctcatgccgtggaattgccagataaacattccttggcctttgttgtacgcatcgaaaggattgatggcgtgagtttactggtgcagagaaccattgcaagactttgcctaaagaaaatttttagtggtgtctttgtaaaagtcaccccccagaatctacaaatgctgcgtatagtggaaacttatgtgacctggggatttccaaatctgaagtctgtccgagaactcattttgaaaccgtggacaagccaaggtcaagaataagaccatccctctgacaagacattacagtgatggaggagcacctggggaaagtttggcgtcatttgcttggaagacctcattcatgaaaattgccttcccagggaagcatttccaggagatctcatggttcttgtgccctttccaccgtctcagtggcccatcatgctaccaaaaataagagtgggcttcctcaaggagatgggcacacctgggctatcggggtgaacgcatcaaatcagctcatccgtcagctgaactagacccaggtgccaaacttgcggtaaattttttatccagtgaagtgggaagcatgtgttttgttgttttgggaatttttatcaagtgtcttcagagaagattatttccctgctttatcttccagaaactggaaaggaagggtcaaagaaaagacagttaggctgggccggtcgtggttggctca

SEQ ID NO: 5813 - DNA, 405 bp, Homo sapiens
  SIMILAR (19)..(180): 421254mologous to Homo sapiens Membrane-bound protein PRO1013,accession number Y66666,Smith-Waterman Score=116.
  misc_feature (1)...(405): n = a,t,c or g
ctggagatttccatcatggcggcgtccatttcgggctacaccttcagtgctgtgtgtttccacagcgccaacagcaacgcggaccacgaaggatttttactgggagaggtaagacaagaggaaacgtttagcatcagtgactcacaaatcagcaacacagaatttctgcaagtaattgaaagtcattgggtggtacagattccggcgcaatacgcagcagcagatgtcctacagagagcaggttcttcacaagcagctcacccgcatcctcggcgtgcccgacctcgtctttcttctcttcagcttcatctccactgccaacaattccactcacgctntagaatatgtgctcttcagaccaaatagaaggtataatcagaggatatcactcgctattcccaatct

SEQ ID NO: 5814 - DNA, 843 bp, Homo sapiens
  SIMILAR (103)..(441): 831254mologous to Homo sapiens Amino acid sequence of the Adenovirus E1A binding protein (CtBP),accession number W42104,Smith -Waterman Score=488.
atggtcctgaggctctcgggactatggtctgctggcagggaagcagccgtgtgcgtctccagccagagccgcaagtggatgggaagtggctcctcttcgtgtatccgcccccagatcatgaacggccccctgcacccccgccccctggtggcgctgctggacggccgcgactgcactgtggagatgcccatcctgaaggacctggccactgtggccttctgtgacgcgcagtcgacgcaggaaatccacgagaaggttctaaacgaagccgtgggcgccatgatgtaccacaccatcaccctcaccagggaggacctggagaagttcaaggccctgagagtgatcgtgcggataggcagtggctatgacaacgtggacatcaaggctgccggcgagctcggtgagtgcgaggcagcgctggctgcctggagttgtccggagctctgtgggccctgctcgggtgggcttggagaagcagctggaactgggaccacggagcagccgcttctggctgtagcaaggtggctgcctccaggccgggctgtggagcaccttgcggccctgccttcacatgacacaggtcagcgaaataaatatgcctgtatgaagctgattgctgtggcccaggagaagaggcaaagcgcgcgtccagacaccgccgaggacgccctccaggccgccgtcagccggcgcccccgagcgccacgcaccccgcggcagtccagcaccctcaagaccgcagtcggccgcggaaaggaacgggaactgggccgacgcgcgccgccgactcacaatcagggccgcgcgccggctgacgtcaccctgtgtcgaccagccccctga

SEQ ID NO: 5815 - DNA, 1260 bp, Homo sapiens
  SIMILAR (18)..(371): 451254mologous to Homo sapiens Membrane-bound protein PRO1013,accession number Y66666,Smith-Waterman Score=296.
tggagatttccatcatggcggcgtccatttcgggctacaccttcagtgctgtgtgtttccacagcgccaacagcaacgcggaccacgaaggatttttactgggagaggtaagacaagaggaaacgtttagcatcagtgactcacaaatcagcaacacagaatttctgcaagtaattcaaatctataaccatcagccttgttcaaaactttttagtttttatgactacgcaagcaaagtgaatgaggagagtttggacaggattcttaaagatcggagaaagaaagtcattgggtggtacagattccggcgcaatacgcagcagcagatgtcctacagagagcaggttcttcacaagcagctcaccccgcatcctcggcgtgcccgacctcgtctttcttctcttcagcttcatctccactgccaacaattccactcacgctttagaatatgtgctcttcagaccaaatagaaggtataatcagaggatatcactcgctattcccaatctaggaaatactagccagcaagagtacaaagtgtcttcagtgccaaatacttctcagagttatgccaaagtgattaaagaacatggtactgacttttttgacaaggatggagtaatgaaagacatcagggcgatttatcaggtttataatgcacttcaggagaaagttcaggcagtgtgtgcagatgttgaaaagagtgagcgagttgttgaatcttgtcaggcagaagtgaacaaattaagaagacaaatcactcagaggaaaaatgaaaaggaacaagaaagaagattgcagcaggcagtgttaagcagacagatgccgtctgaaagcttggacccagcgttcagtcctcggatgccgtcctctgggtttgcagctgaaggcagaagtacacttggagatgcagaggcctcggatcctcctcccccttactctgattttcacccaaacaatcaagaaagtactttgagccactctcgcatggaaaggagtgtctttatgcctcgacctcaagctgtgggctcttccaattatgcttccaccagtgccggactgaagtatcctggaagtggggctgaccttcctcctccccaaagagcagctggagacagtggtgaggattcagacgacagtgattatgaaaatttgattgaccctacagagccttctaatagtgaatactcacattcaaaggattctcgacccatggcacatcccgacgaggaccccaggaacactcagacctcccagatt

SEQ ID NO: 5816 - DNA, 991 bp, Homo sapiens
  SIMILAR (557)..(835): 651254mologous to Homo sapiens Protein regulating gene expression PRGE-22,accession number Y58629,Smith-Waterman Score= 321.
atgagcaccgacatgaagctctgcgtcagcgtggatgaacatatggggctcgcatctgatgccgacaagacgagcgagatagcgatgtgtcgggctcaccaagtctacatcgagcgaagaacttcgagacatgccgacgggatcataaaagtcattgggtggtacagattccggcgcaatacgcagcagcagatgtcctacagagagcaggttcttcacaagcagctcacccgcatcctcggcgtgcccgacctcgtctttcttctcttcagcttcatctccactgccaacaattccactcacgctttagaatatgtgctcttcagaccaaatagaaggccgccgccggcgcagccaatgagcgaccgcctctttccgggctcagggggctggtcgacacagggtgacgtcagccggcgcgcggccctgattgtgagtcggcggcgcgcgtcggcccagttcccgttcctttccgcggccgactgcggtcttgagggtgctggactgccgcggggtcagcgaaataaatatgcctgtatgaagctgattgctgtggcccaggatattgaagatttgcccccaacagtccaagaaaaattatttgatgaggtgcttgatagagacgttcaaaaagaattagaagaagaatctccaattattaacctggtccttggaattggctacacgtttggacagtcgactgtatgcactttggaaccggactgcaggagactgcctacttgattcagttctacaagctacctggggcatctatgacaaggactcagtgcttcggaaagccctgcatgacagcctgcatgactgttcacattggtgagctggcattctgccctgtttcaacccaggagtgcatttgctggattatttccttgtagtggtgggatactttttatgtcagttatattttctatggaaactggaggaaaaacagttcattttggacattaaaatactttgaacacgtaaaaaa

SEQ ID NO: 5817 - DNA, 3066 bp, Homo sapiens; identical to SEQ ID NO: 3612
  SIMILAR (1504)..(2685): 871254mologous to Homo sapiens KIAA1629 protein,accession number AB046849,Smith-Waterman Score=1892.

SEQ ID NO: 5818 - DNA, 628 bp, Homo sapiens
  SIMILAR (104)..(625): 721254mologous to Homo sapiens unnamed protein product,accession number AK001559,Smith-Waterman Score=636.
cctgtgccagcacaaccggatcaagcacaaaggcatcaggaaagtgtatgcctgctcgcactgcccagactccagacgtacctttaccaaacgattgatgctagagaagcacgtccagctgatgcacagcctcaaggaccctgacctgaaagaaatgacagatgccaccaatgaggaggaaacagaaataaaagaagacaccaagttccccagtcccaagtggaagttggaagaaccagttctcaagagtgccatgtgtggcttcaccaccgaaaacctgcttcagttccacgaacacatccctcagcacaaatctgatagttcttcctaccagtgccaggagtgtggcctctggtacacgtctcacgtctctctgtccaggcacctcttcattgtacacaagttaaaggaacctcagccagtgtccaagcaaaatggagctggggaagataaccaacaggagaacaaacccagccatgaggatgaatcccccaatggcaccgtgtcagacagaaagtgcaaagtgtgcgtgaaaacttttgaaactgaagctgccttaaatactcacatgcggatacatggcatggccttcatcaaatccaaaaggatgagctcagccaagaaatag

SEQ ID NO: 5819 - DNA, 1163 bp, Homo sapiens
  SIMILAR (1)..(429): 891254mologous to Homo sapiens unnamed protein product,accession number AK001559,Smith-Waterman Score=669.
atgcagagagatgtgtacatatcccacgtcaggaaggagcatgggaaacaaatgaagaaacaaccctgctgccagcgtgacaagcctttcagctcatcccacagcctgtgctggcacaaccggatcaagcacaaagtcatcaggaaagtgtacacctgttcacactgctcagactctagaggtacctttaccaaacagttgatgttggagaagcatgtccagctgacgcatggcatcaaggaccctgacctgaaagaaatgacagacgccatcaatgaggaggaaacagaaataaaagaagaccccaaggtccccagtcccaagtggaagttgaaagaaccggttctggagttcaggcctcccagaggagcaatcactcaaccactgaaaaagctgaaaatcaatgtttttaaggttcacaagtgcgctcgtgcgtggcttcaccaccgaaaacctgctgcaatttcacgaacacatccctcagcacaaatcggatggttcttcctaccagtgccgggagcacctctttgttgtacacaagttaaaggaacctcagccagtgtccaagcaaaacggggctggggaagataaccaacaggagaacaaacccagtcacgaggatgaatctcccaatggcgccatgtcagacagaaagtgcaaagtgtgtgcaaaaacttttgaaactgaagctgccttaaacactcacatgcagacacatggtatggccttcatcaaatccaaaaggatgagctcagacgagaaatagccacagatgctccatgattaaaatccctgtccacattggaataaaaaagacatttttgttacaaagtttgcagtatgctgagagttacacagtactgtctagggctgttgcaatattattcttcttttcaatgttaccttccttcacctcgtcgtatatatcctcgataagtattaaaacagtatttgagtttaaaagagtttgtatatatttaaatgaataactttttatactctttgttacatgtttgtatcagtatttagtggaaaaccatttgagttgttttgggttagaatttttctttttgtactgtttctttaaaacagagttcttagtaacaggggcagttcctgaattcaaataaaccattttgtatgtttggaaaaaaaaaaaaaaa

SEQ ID NO: 5820 - DNA, 1146 bp, Homo sapiens
  SIMILAR (741)..(31): 861254mologous to Escherichia coli similar to B. stearothermophilus N-carbamyl-L-amino acid amidohydrolase,accession number U82664,Smith-Waterman Score=1086.
ctacatgatttccttatataacaaattctgaattttctctttacacaattctgtcagggtggcgaccagctccttattcatcggcacgggttcttcgtccatccataaatcgatatcaataccaatgtccatttcatcgcaaatcgcccgcatgtcgttttctaactgttgggtgaaatcgcgcagcacggcagcgtcggtatgacgacaatcaatggtgaacgtggttttacccggcaccacatttaccgtattcgggcgcggctctactttgccaaaggtcagaaccagcggatcgcccatccttttcgctttttcgaccgactgatggcaaatgcgactgaaagcgtaaactgtatcacgacgataacccatcggcgtggtgcctgcatggtttgattcgccgttcagcgttaccgtataacgacgctgcccgacaattgcattcaccacgccaattgattgcccattactttccagcacacagccctgttcaatatgcagttcaacaaaggctttaatatcctgacgcggagttagtggggcgttcggaagagtaaatccgcaagccttcatcgcatcgacaaaactatttcctttggcatcacagatattccgcacgtcgtcaggattcgccagccccaaaatattttttacctgcaggaagcggcggcggaagtcaggcatacgctggtaactttgaggcagctggtaacgctctatgatccagtcgattttcagagagacgatgcctgagccatccggcttacgatactgacacagggattcgtataaacgcatggcatacggattggtgatttcttttgttttactaagccgaaactgcgtaaacccgttctgctgtctgcagatctgagctttcttcttggacaccttatacacacagttctccaggtgctgaagcagggcattcgtccccttcgcacacccaactgccatggcatgttccagcagaaggtcatccgtgtacaggagcaagacgcagcgcaggttactcatcagagcttcaaagacgatttgtgcgttgttctgggtgataccctgcaccatcgcttttttctgatcttccggcattgaaccttgtttcacttcatccagcgccagcagaaccacattaccttgcat

SEQ ID NO: 5821 - DNA, 1140 bp, Homo sapiens
  SIMILAR (58)..(747): 841254mologous to Escherichia coli dTDP-glucose 4,6- dehydratase (EC 4.2.1.46),accession number D90842,Smith-Waterman Score=1019.
cgccgcccagacatcttccggcttgcaactggaatgaagtattgctgccggatggcgctgcacgcagaggcacagcgccaccgggtatacagattgttgacaaagtgcgctttgtttatgccggatgcggcgttaacgccttatccggcctacaaaatcgtgcaaattcaatacattgcagaattttccgacaagaaaaatagcttccgttttcatcatatttctactgacgaagtctatggtgatttgcctcatccagatgaagtaaataatacagaagaattacccttatttactgagacgacagcttacgcgccaagcagcccttattccgcatccaaagcatccagcgatcatttagtccgcgcgtggaaacgtacatatggtttaccgacaattgtgactaattgctcgaacaactatggtccttatcatttcccggaaaagcttattccactggttattcttaatgcactggaaggtaaggcattacctatttatggcaaaggagatcagatccgcgactggttgtatgttgaagatcatgcgcgtgcgttatataccgtcgtaaccgaaggtaaagcgggtgaaacttataacattggtgggcacaacgaaaagaaaaacatcgatgtagtgctcactatttgtgatttgctggatgagattgtaccgaaagagaaatcttatcgtgagcaaatcacttatgttgctgatcgtccgggacacgatcgccgctatggagttcccccagtctcaataagctttgaggtgatgccgggggagagcgtggatgggaaatttgatagtttcaggagtttgaagaaggcacttctagaagagattggtgatgaaaacagcaaggtctacagagctcttatggagtgtgaagatctggatgctgccggaattgccgcgagcgtaaaacgtgattatcaacaaaatcgcgtggcgcgttgggcagatgatcaaaaaattgtcggtcaggccgatcccgtggcttgggtcagtttgcaggacattcagggtaaagatgataaatggtcagtaccgctaaccgtgcgtggtaaaagtgccgatattcattaccaggtcagcgtggactgcaaagcgggaatggcggaatatcagcggcgttaa

SEQ ID NO: 5822 - DNA, 1383 bp, Homo sapiens
  SIMILAR (58)..(555): 901254mologous to Escherichia coli Protease II (EC 3.4.21.83) (Oligopeptidase B),accession number D90827,Smith-Waterman Score= 811.
atgtatgatgctgaccgcgactcactcacagccgttgatgtgattcacaaagaagtttatcccgagcagtcagacgctccgaaaagagaactttgtctggcaaatgactcctggattttctactatgttcgcaagcatccggtgacgctgctgccttatcaggtctggcgtcacgccatcggtacgccagcatcgcaagataaactgatctacgaagaaaaagacgatacttattacgtcagcctgcataaaacgacctcgaagcactatgtagtcattcatttggccagcgccaccaccagtgaagttcgcctgctgaacgcggaaatggccaatgccgagccgtttgtttttctgccgcgccgcaaagatcacgaatacagccttgatcactaccagcatcgtttttatctgcgttccaaccgccacggcaaaaactttggcttataccgtacccgtatgcgtgatgagcaacagtgggaagagttaattccgccacacgaaaacatcatgctggaagggtttacgctgtttaccgactggctggcctacgattgtggtgcgttctggggcgaacaaggcactcgcgccgcatccgccaacagtcaatggaattatcagaagccattaacgccgctgatattccgccattcccgctttgcagtccacgctgacctggtaatgaatatcggcacttttaccacgcacgacgatgagagcagcaaagcaaagattgggaatgacaccattgtcttcaccttgtataaaaaagaagcggccatgtgggagaccctttctgtgacgggtgttgacaaagagatgatgcaaagaattagagaaaaatctattttacaagcacaagagagagcaaaagaagctacagaagcaaaagctgcagcaaagcgcgaagatcaaaaatacgcactaagtgtcatgatgaagatttcagacaatgtatggaaaaacattgtgaaaatccctgtcctgttttattccgttctgatgaccggtgcaagcagctcccagtcacgctgcgtcttgctcctgtacacggatgaccttctgctggaacatgccatggcagttgggtgtgcgaaggggacggatgccctgcttcagcacctggagaactgtgtgtataaggtgtccaagaagaaagctcagatctgcagacagcaggtacactacctgggattcgctattcggaaaggggagcgcagcctggggtcagaaagaaagcgggtcatctgcagcctacaggaacctaaaaccagaaggcaaaacatggatgcaaaatctcttataaatactggcaacggaatccagcagcactcgagaaagcttacccacaccgatcaagtcggctccatccctgggatgtaa

SEQ ID NO: 5823 - DNA, 558 bp, Homo sapiens
  SIMILAR (64)..(558): 1001254mologous to Homo sapiens bA526K24.1 (A novel protein),accession number AL161659,Smith-Waterman Score=849.
cggacgcgtgggtgcggacgtatttgttttcttcaagcatttggtcgagattaagaattaaaaatgtcatccaaacaagaaataatgagtgaccagcggtttagacgggttgcaaaggacccgagattttgggaaatgccagaaaaggatcgaaaagtcaaaattgacaagagatttcgagccatgtttcatgacaagaagttcaagttgaactatgccgtggataaaagagggcgccccattagccatagcactacagaggatttgaagcgtttttacgacctttcagattctgattccaatctctctggtgaagatagcaaagcattgagtcaaaagaaaataaagaagaaaaaaacccagactaaaaaagaaatcgattcaaaaaatctagttgagaaaaagaaagaaaccaagaaggctaatcacaagggttctgaaaataaaactgatttagataattctataggaattaaaaaaatgaaaacctcatgtaaatttaagatagattcaaacataagtccgaagaaggatagcaaagaatttacacaaaaaaat

SEQ ID NO: 5824 - DNA, 900 bp, Homo sapiens
  SIMILAR (1)..(897): 1001254mologous to Homo sapiens candidate taste receptor T2R5,accession number AF227132,Smith-Waterman Score=1584.
atgctgagcgctggcctaggactgctgatgctggtggcagtggttgaatttctcatcggtttaattggaaatggaagcctggtggtctggagttttagagaatggatcagaaaattcaactggtcctcatataacctcattatcctgggcctggctggctgccgatttctcctgcagtggctgatcattttggacttaagcttgtttccacttttccagagcagccgttggcttcgctatcttagtatcttctgggtcctggtaagccaggccagcttatggtttgccaccttcctcagtgtcttctattgcaagaagatcacgaccttcgatcgcccggcctacttgtggctgaagcagagggcctataacctgagtctctggtgccttctgggctactttataatcaatttgttacttacagtccaaattggcttaacattctatcatcctccccaaggaaacagcagcattcggtatccctttgaaagctggcagtacctgtatgcatttcagctcaattcaggaagttatttgcctttagtggtgtttcttgtttcctctgggatgctgattgtctctttgtatacacaccacaagaagatgaaggtccattcagctggtaggagggatgtccgggccaaggctcacatcactgcgctgaagtccttgggctgcttcctcttacttcacctggtttatatcatggccagccccttctccatcacctccaagacttatcctcctgatctcaccagtgtcttcatctgggagacactcatggcagcctatccttctcttcattctctcatattgatcatggggattcctagggtgaagcagacttgtcagaagatcctgtggaagacagtgtgtgctcggagatgctggggcccatga

SEQ ID NO: 5825 - DNA, 859 bp, Homo sapiens
  SIMILAR (136)..(309): 961254mologous to Homo sapiens t-complex polypeptide 1 (AA 1- 556),accession number X52882,Smith-Waterman Score=276.
atgttggagattcttctacctgactgctgctatcagtcctaccagcccccaacgtttggtgcttgttctaaagggcatgtcctaggagtcgctttaaactctcaaagtatcactctctatacaaacaagaagtgcaaagaatcagatatcaccaaggagagaattcagaagatcctggcaactggtgccaatgttattctaaccactggtggaattgatgatatgtgtctcaagtattttgtgcaggctggtgctatggcagttagaagagttttaaaaagggaccttaaacgcattgccaaagcttctgcagtgctgggattacagcactattcatcaaatagtgctgtattcaccaaagacaaggaatcaacttacgtgcccatcaccagtggactggataaagaaaatttggtacatatacaccatggaatattatgcagccgtaaaaagaatgaaaccatgttctttgcagcaatatggatacagctgaaggccattatcctaagtgaattaatgcaggaacagaaaaccaaatatagcatgttctcacttgccactgcctaaaacaggctccagtccagtgggtaatgaaggtgatccctttcctgaactaaacagatcatgtggcactgtgaatgcccaaagcagatataagattctaggtggtctctttatggttccccagagggttcgcagcagatgtacttcgtggctcacagcggtaaccaacctagaatataccctttattggcattccctctttccctatcttactccctttactcattcattccagatttctcgaagcaacgctcaaataaactgtctgtatttaaaacctgtcatcaactcttaa

SEQ ID NO: 5826 - DNA, 1696 bp, Homo sapiens
  SIMILAR (894)..(1172): 971254mologous to Homo sapiens t-complex polypeptide 1 (AA 1- 556),accession number X52882,Smith-Waterman Score=444.
acgtgtatcgctgccgtcaagatggaggggcctttgtccgtgttcggtgaccgcagcactggggaaacgatccgctcccaaaacgttatggctgcagcttcgattgccaatattgtaaaaagttctcttggtccagttggcttggataaaatgttggtggatgatattggtgatgtaaccattactaacgatggtgcaaccatcctgaagttactggaggtagaacatcctgcagctaaagttctttgtgagctggctgatctgcaagacaaagaagttggagatggaactacttcagtggttattattgcagcagaactcctaaaaaatgcagatgaattagtcaaacagaaaattcatcccacatcagttattagtggctatcgacttgcttgcaaggaagcagtgcgttatatcaatgaaaacctaattgttaacacagatgaactgggaagagattgcctgattaatgctgctaagacatccatgtcttccaaaatcattgggataaatggtgatttctttgctaacatggtagtagatgctgtacttgctattaaatacacagacataagaggccagccacgctatccagtcaactctgttaatattttgaaagcccatgggagaagtcaaatggagagtatgctcatcagtggctatgcactcaactgtgtggtgggatcccagggcatgcccaagagaatcgtaaatgcaaaaattgcttgccttgacttcagcctgcaaaaaacaaaaatgaagcttggtgtacaggtggtcattacagaccctgaaaaactggaccaaattagacagagagaatcagattatcaccaaggagagaattcagaagatcctggcaactggtgccaacgttattctaaccactggtgggaattgatgatatgtgtctgaagtattttttggaggctggtgctatggcagttagaagagttttaacaagggaccttaaacgcattgccaaagcttctggagcaactattctgtcaaccctggccaatttggaaggtgaagaaacttttgaagctgcaatgttgggacaggcagaagaagtggtacaggagagaatttgtgatgatgagctgatcttaatcaaaaatactaaggctcgtacgtctgcatcgattatcttacgtggggcaaatgatttccatgtgtgatgagatggagcgctcttttacatgatgcactttgtgtagtgaagagagttttggagtcaaaatctgtggttcccggtgggggtgctgtagaagcagccctttccatataccttgaaaactatgcaaccagcatggggtctcgggaacagcttgcgattgcagagtttgcaagatcacttcttgttattcccaatacactagcagttaatgctgcccaggactccacagatctggttgcaaaattaagagcttttcataatgaggcccaggttaacccagaacgtaaaaatctaaaatggattggtcttgatttgagcaatggtaaacctcgagacaacaaacaagcaggggtgtttgaaccaaccatagttaaagttaagagtttgaaatttgcaacagaagctgcaatcaccattcttcgaattgatgatcttattaaattacatccagaaatccttcggattaaacatggaagttatgaagatgctgttcactctggagcccttaatgattga

SEQ ID NO: 5827 - DNA, 525 bp, Homo sapiens
  SIMILAR (397)..(507): 1001254mologous to Homo sapiens HUMINAE,accession number AF168787,Smith-Waterman Score=176.
  misc_feature (1)...(525): n = a,t,c or g
atggaggcgaagtgtgagtgggagcaggagattgtctcctctggtgttgctttcccttccagccccgccccaaatcgggacatgctgggccctggaggtcccgcccgcgcagccggcccggttttctcccgccaccagggggcggcggcgctaagggcggccttctgggccgaagccggcgacgctctaggtagctgcggcggctcctctgtggccagtggcagcggcgctctagccggcggccgtgaggggcgggctctcagtggtgcggccggcaggcagcgatggcggccngcggagtccggtgttgaccgtggcgagccggagcccatggaggtggaggagggcgagctggaaatcgtgcctgtgcggcgctcgctcaaggaactgatcccgatcactgtcgtcttcctgaaagatgagaagtaccattctttgcctatcatcattaaaggcagcgttggtggacttctggtgttgatcgtgattctggtcatcctgttcaagatgatgagcttgatgtag

SEQ ID NO: 5828 - DNA, 3929 bp, Homo sapiens
  SIMILAR (126)..(3536): 941254mologous to Homo sapiens Human mucosal lymphocyte-1 alpha-E chain,accession number R82656,Smith-Waterman Score=5487.
gaattccggcccccgtgtctgggcgtccgcctcctggcctcctggctgaggggaagctgagtgggccacggcccatgtgtcgcactcgcctcggctcccacacagccgcctctgctccagcaaggatgtggctcttccacactctgctctgcatagccagcctggccctgctggccgctttcaatgtggatgtggcccggccctggctcacgcccaagggaggtgcccctttcgtgctcagctcccttctgcaccaagaccccagcaccaaccagacctggctcctggtcaccagccccagaaccaagaggacaccagggcccctccatcgatgttcccttgtccaggatgaaatcctttgccatcctgtagagcatgtccccatccccaaggggaggcaccggggagtgaccgttgtccggagccaccacggtgttttgatatgcattcaagtgctggtccggcggcctcacagcctcagctcagaactcacaggcacctgtagcctcctgggccctgacctccgtccccaggctcaggccaacttcttcgaccttgaaaatctcctggatccagatgcacgtgtggacactggagactgctacagcaacaaagaaggcggtggagaagacgatgtgaacacagccaggcagcgccgggctctggagaaggaggaggaggaagacaaggaggaggaggaagacgaggaggaggaggaagctggcaccgagattgccatcatcctggatggctcaggaagcattgatcccccagactttcagagagccaaagacttcatctccaacatgatgaggaacttctatgaaaagtgttttgagtgcaactttgccttggtgcagtatggaggagtgatccagactgagtttgaccttcgggacagccaggatgtgatggcctccctcgccagagtccagaacatcactcaagtggggagtgtcaccaagactgcctcagccatgcaacacgtcttagacagcatcttcacctcaagccacggctccaggagaaaggcatccaaggtcatggtggtgctcaccgatggtggcatattcgaggaccccctcaaccttacgacagtcatcaactcccccaaaatgcagggtgttgagcgctttgccattggggtgggagaagaatttaagagtgctaggactgcgagggaactgaacctgatcgcctcagacccggatgagacccatgctttcaaggtgaccaactacatggcgctggatgggctgctgagcaaactgcggtacaacatcatcagcatggaaggcacggttggagacgcccttcactaccagctggcacagattggcttcagtgctcagatcctggatgagcggcaggtgctgctcggcgccgtcggggcctttgactggtccggaggggcgttgctctacgacacacgcagccgccggggccgcttcctgaaccagacagcggcggcggcggcagacgcggaggctgcgcagtacagctacctgggttacgctgtggccgtgctgcacaagacctgcagcctctcctacgtcgcgggggctccacagtacaaacatcatggggccgtgtttgagctccagaaggagggcagagaggccagcttcctgccagtgctggagggagagcagatggggtcctattttggctctgagctgtgccctgtggacattgacatggatggaagcacggacttcttgctggtggctgctccattttaccacgttcatggagaagaaggcagagtctacgtgtaccgtctcagcgagcaggatggttctttctccttggcacgcatactgagtgggcaccccgggttcaccaatgcccgctttggctttgccatggcggctatgggggatctcagtcaggataagctcacagatgtggccatcggggcccccctggaaggttttggggcagatgatggtgccagcttcggcagtgtgtatatctacaatggacactgggacggcctctccgccagcccctcgcagcggatcagagcctccacggtggccccaggactccagtacttcggcatgtccatggctggtggctttgatattagtggcgacggccttgccgacatcaccgtgggcactctgggccaggcggttgtgttccgctcccggcctgtggttcgcctgaaggtctccatggccttcacccccagcgcactgcccatcggcttcaacggcgtcgtgaatgtccgtttatgttttgaaatcagctctgtaaccacagcctctgagtcaggcctccgtgaggcacttctcaacttcacgctggatgtggatgtggggaagcagaggagacggctgcagtgttcagacgtaagaagctgtctgggctgcctgagggagtggagcagcggatcccagctttgtgaggacctcctgctcatgcccacagagggagagctctgtgaggaggactgcttctccaatgccagtgtcaaagtcagctaccagctccagacccctgagggacagacggaccatccccagcccatcctggaccgctacactgagccctttgccatcttccagctgccctatgagaaggcctgcaagaataagctgttttgtgtcgcagaattacagttggccaccaccgtctctcagcaggagttggtggtgggtctcacaaaggagctgaccctgaacattaacctaactaactccggggaagattcctacatgacaagcatggccttgaattaccccagaaacctgcagttgaagaggatgcaaaagcctccctctccaaacattcagtgtgatgaccctcagccggttgcttctgtcctgatcatgaactgcaggattggtcaccccgtcctcaagaggtcatctgctcatgtttcagtcgtttggcagctagaggagaatgcctttccaaacaggacagcagacatcactgtgactgtcaccaattccaatgaaagacggtctttggccaacgagacccacacccttcaattcaggcatggcttcgttgcagttctgtccaaaccatccataatgtacgtgaacacaggccaggggctttctcaccacaaagaattcctcttccatgtacatggggagaacctctttggagcagaataccagttgcaaatttgcgtcccaaccaaattacgaggtctccaggttgcagcagtgaagaagctgacgaggactcaggcctccacggtgtgcacctggagtcaggagcgcgcttgtgcgtacagttcggttcagcatgtggaagaatggcattcagtgagctgtgtcatcgcttcagataaagaaaatgtcaccgtggctgcagagatctcctgggatcactctgaggagttactaaaagatgtaactgaactgcagatcccttggtgaaatatctttcaacaaatctctatatgagggactgaatgcagagaaccaccagaacttaagatcactgtcgtcttccatgaaagctgagagtaccatttcttcgcctatcaccatttaagggcacgcgttggtggacgttctggtgttgatcgtgattctggtcatcctgttcaagtgtggctttttttaaaagaaaatatcaacaacttgaacttgggagagcattcaggaaggcccagctgtaaattcagagaattctgctcgaagaagagaattaggacctgctatccgactgggagaggctattcagccagtcctgggacttggagacccgagcaatcctttgcgattactttttccttcaggatgatctagagcagcatggagctgttggtagagatattagtttttaaccatacattgtcccaaaaagtgtctgtgcattgtgcaaaaagtaaacataagaaacctttggtattaaataaatttacacttttatttgcaaaaaaaaaaaaaaaaaaaaacgtt

SEQ ID NO: 5829 - DNA, 3192 bp, Homo sapiens; identical to SEQ ID NO: 3566
  SIMILAR (935)..(1078): 351254mologous to Feline leukemia virus gag-pol precursor polyprotein gPr80,accession number AF052723,Smith-Waterman Score= 57.

SEQ ID NO: 5830 - DNA, 2466 bp, Homo sapiens; identical to SEQ ID NO: 3568
  SIMILAR (1888)..(2463): 721254mologous to Homo sapiens olfactory receptor,accession number Y10529,Smith-Waterman Score=733.

SEQ ID NO: 5831 - DNA, 1830 bp, Homo sapiens; identical to SEQ ID NO: 3569
  SIMILAR (67)..(360): 841254mologous to Homo sapiens Human G-protein coupled receptor GRIR-1,accession number Y28279,Smith-Waterman Score=426.

SEQ ID NO: 5832 - DNA, 245 bp, Homo sapiens
  SIMILAR (18)..(242): 381254mologous to Feline leukemia virus gag-pol precursor polyprotein gPr80,accession number AF052723,Smith-Waterman Score= 119.
agagccctgtcgagcctgattgtgtagaagtgttggactcaattgactctagcagacctgacctccgggaccagccttgggcatcagtagactgggaactatacgtggatgggagcagcttcttcaacccccaaggagagagagaggctcgaaaagcagcatctgccccctttcgggcatcagtgctccctcaagcacctgatcttggacctacttcttctaaagaagaaaaggactttctccag

SEQ ID NO: 5833 - DNA, 801 bp, Homo sapiens
  SIMILAR (223)..(798): 691254mologous to Homo sapiens olfactory receptor,accession number Y10529,Smith-Waterman Score=671.
atggtcacggggaagtgtactccccctgcgatattgggagtaatgttgtcctccccaaacctggatgttagcaacgagatcacagagggggtgtacacaccctgcgacattggaagtaatatgatcctctccccacctggatactgggaaagatatcacagcgcggtgctgaggaacctgctcagcatcccggctgtcagctctgactcccacctccacacccccacgtacttcttcctctccatcctgtgctgggctgacatcggtttcacctcggccacggttcccaagatgattgtggacatgcagtggtatagcagagtcatctctcatgcgggctgcctgacacagatgtctttcttggtcctttttgcatgtatagaaggcatgctcctgactgtaatggcctatgactgctttgtaggcatctatcgccctctgcactacccagtcatcgtgaatcctcatctctgtgtcttctttgttttggtgtcctttttccttagcctgttggattcccagctgcacagttggattgtgttacaattcaccatcatcaagaatgtggaaatctctaattttgtctgtgacccctctcaacttctcaaacttgcctcttatgacagcgtcatcaatagcatattcatatatttcgatagtacaatgtttggttttcttcctatttcagggatcctttcatcttactataaaattgtcccctccattctaaggatgtcatcgtcagatgggaagtataaaactttctccacctatggctctcacctagcatttgtttgctga

SEQ ID NO: 5834 - DNA, 367 bp, Homo sapiens
  SIMILAR (367)..(149): 591254mologous to Murine leukemia virus gag-pol polyprotein,accession number U13766,Smith-Waterman Score=224.
ctctctctccttgggggttgaagaagctgctcccatacacgtatagttcccagtctactgatgcccaagcttggtcccggaggtcaggtctgctagagtcaactgaatccaacacttctacacaatcaggctcgacagggctctctgactccggatcttcccactgaaaggcaaacagcttctgcctctcaggggctaatctgataggaaagaaagcgtctttcaggttccagaaggtgaaccagctgtcttcagctggcggcaacaccaataatgtggacgggttaggtactgttggatgtaaagtcagtgtagcttgatggagcaagcgcaaatcctgtaccggccggtagtccttggtccgtgg

SEQ ID NO: 5835 - DNA, 622 bp, Homo sapiens
  SIMILAR (127)..(621): 441254mologous to Gibbon ape leukemia virus pol polyprotein,accession number U60065,Smith-Waterman Score=305.
gttgatgaccttctgctgggacaccccacggcagtcgggtgtgccaagggaacagatgccctacattggcacctggaggactgtgggtgtaaggtgtccaagaagaaagctcagatctgccgacagcaggccttggcagcaactgccctgcgagtacaagaagcaaataagctgactcttgagcaaaacctgaacataaaggcctcccgtgctgtggtgactttaatgaatactaaaggacatcattggctaacgaatgccagactcacccagtaccagacttggctctgtgaaaatccccgtataaccattgaagtttgtaacagcctacaccccgccaccttgctcccggtatcagagagccccgtcgagcctcgttgtgtagaagtgttggacacaattgactctagcagacctgacctccggggccagccttgggcatcagtagactgggaactatacgtggatgggagtagcttcttcaacccccaaggagagagaggtgcagggtgtgcagtgataaccctggacactgttgttgaagccagatcgttgtcccaggccacatcagcccagaaagctgaactcattgctttcattcgggccttagaactcagtgagg

SEQ ID NO: 5836 - DNA, 639 bp, Homo sapiens
  SIMILAR (136)..(80): 571254mologous to Homo sapiens Human G-protein coupled receptor GRIR-1,accession number Y28279,Smith-Waterman Score=61.
atggggatgaccacagcgtacatcactgatgccaccactccattcctgggagatgatgacacagctgaagtcagatgggcagatggccacaaatcggtcataggccatcagagtcaggagcatgtcttctatacatgcaaaaaggacaaagaaagacatctgtgtcaggcagcccgcataagagatgactctgctatgcgactgcatgtccacaatcatcttgggaactgtggccgaggtgaaaccaatgtcagcccaggacaggttggagaggaagaagtacatgggggtgtggaagtgggggtcagagctgccagccaggatgatgaacaggttcctcagcatcgtgaccagggcggggaagacaataatactgccctcagtatcgcgggaaatgtacgtcaccctgtgatatttttcctaatatccagagggagagagaatgatattactcccaatatcgtagaagtgtacagcccccctgtgatattgttcttaatatccgtgggatggccaattcctggctttggtcccactgaggactccgtggacagtgctgccagctcaggtccctactcctccccacctaattctgacaaggtgttctcatgctccttggaaacatcaagaccagactaa

SEQ ID NO: 5837 - DNA, 939 bp, Homo sapiens
  SIMILAR (712)..(930): 841254mologous to Homo sapiens ANG2,accession number AF024631,Smith-Waterman Score=328.
atgtccggccagtttgattttttattgtggactcccgaggaggacaactcggacgagagcgacgcggagggcgagcatggggacggcgcggaggaggaggcgccgcccccggtgcccaggcctggccccaagcccgctggactcggccgccggccctgcccctacgaacaggcgcaggggggcgacgggccggaggagcagtggatgagcttttgctgggacatcccacggaagtcgggtgcgccaagggaacggattaccctacgtcgacacctggaggactgtgggtgtaaggtgtccaagaagaaagctcagatctgccgacagcagaaagacccccaagaagaaagtccggcacaattctacgagagactgtgtgaggcctacggtatgtatactccctttgatcccgatagccctgaaaatcagcgcatgattcacatggctttagtccgtcaaagtgcagaagacatgagaagaaaactgcagaaacaggctgggcttgcagggatgaatccatcccaattactagaaagagctagccaggtgtttgtaaacagggatgcagtaagccataaggaaaacagcaaagagaatggagggagagaggatgatatgactcccaatatcgcagggggggtacacaaccctgtgatattgttcctaacatccggagagaaagaagatgatatcactctcaatatcgcagaagggcccgaccccctggaccccactgatctgaacggggcgcacttcgacccggaagtttacctagacaagctgcctagagagtgccctctggcccagctgatggacagtgagacagacatggtgcagcagatccgggctctagacagcgacgtgcaaaccctggtatatgagaactacgataagttcatcccagccacagaaattgacaaacaacataaaactgtatga

SEQ ID NO: 5838 - DNA, 1863 bp, Homo sapiens; identical to SEQ ID NO: 3586
  SIMILAR (1201)..(1860): 701254mologous to Homo sapiens olfactory receptor,accession number Y10529,Smith-Waterman Score=795.

SEQ ID NO: 5839 - DNA, 3735 bp, Homo sapiens
  SIMILAR (2104)..(2778): 941254mologous to Homo sapiens putative p150,accession number U93567,Smith-Waterman Score=1089.
gaaatgactaacaaggtcacgggggagtgtactccccctgcaatactggcagtaatctcgtcctccccaaacctggatgtgagcgacaagatcacagagggggtgtacacaccctgcgacattggaagtaatatgatcctctccccacctggatattgggaaagatatcacagcgcggaggatccagaactgcagcccatcctcgctgggctgtccctgtccatgtatctggtcacggtgctgaggaacctcctcatcagcctggctgtcagctctgactcccacctccacaccccaatgtgcttcttcctctccaacctgtgctgggctgacatcggtttcacctcggccacggttcccaagatgattgtggacatgcggtcgcatagcggagtcatctcttatgcggactgcctgacacggatgtctttcttggtcctttttgcatgtgtagaagacatgctcctgactgtgatggcctatgactgctttgtagccatctgtcgccctctgcactacccagtcatcgtgaatcctcacctctgtgtcttcttagtttcggtgtcctttttccttagcctgttggattcccagctgcacaggatccttttgtcttactgtaaaattgttccctccattctaaggatttcaacatcagatgggaaatataaagccttctccacctgtggctctcacctggcacttgtttgcttattttatggagcaggcattggcgtgtacctgacttcagctgtgtcaccaccccccaggaatggtgtggtggtgtcagtgatgtacactgtggtcacccccatgctgaaccctttcatctacagcctgagaaacagggacattcaaagcaccctgcggaggctgctcagcagaacagtcgaatctcatgatctgttccatcctttttcttgtgtggggaagcgcaaatccaaccaagaatgtgataccacacatttggatggatgtgataaacaaacaagcattggtgaaactagagggaaggagtacaccctgtgtgacagtaggagtaacctcacccaaggatataaggaacaaatacagaggatgcacacgtgttgtgacattagcagtaacatccatttaggatattacgaatattaccacaatgtgaataccccctgtgatattaggagtaacatccccctacaatattgggaaccatatcacacggtgtacaccccctgtgacattagagggaggcccatgaaccgaggaagcaggtggccatctgtggcagctgtcacagcccagcataaagctaagcacttctacttattatatcattcaaaagctgcctcagcctgcaagggcagtaattccccaaagcaggctccagggcccaaggaaagccctcggcagggaaacattgagtgtcaggcacagggaatcaggccatcgggtcacctggacaccgtaaggctccaagagctgccccctctccaccaggaggaactgacttaccaaggtgacagtctagagactgcttgcccaattaaagccatgatccccaatctcacactccaactacgggaggacattcaaaccaaaggcaaagaagttgaaaactttgaaaaaaatttagaagaatgtataactagaataaccaatacggagaagtgcttaaaggagctgatggagctgaaaaccaaggctcgagaactacgtaaagaatgcagtagcctcaggagccgatgccatcaactggaagaaagggtatcagcaatggaagatgaaatgaatgaaatgaagtgggaagggaagtttagagaaaaaagaataaaaagaaataagcaaagcctccaagaaatatgggactatgtgaaaagaccaaatctacgtctcattggtgtacctgaaagtgacggggagaatggaactaagttggaaaacactctgcaggatatcgtccagaacttccccaatctagcaaggcagaccaatgttcagattcaggaaatacagagaacgccacaaagatactcctcgagaagagcaactccaagacacataattgtcagattcaccaaagttgaaatgaaggaaaaaatgttaagggcagccagagagaaagaaatacaaactaccatcagagaatactacaaacacctctacgcaaataaactagaaaatctagaggaaatggataaattccttgacacatacactctcccaagactaaaccaggaagaagttgaatctctgaatagaccaataacaggctctgaaattgtggcaataatcaatagcttaccaaccaaaaagagtccaggaccagatggattcacagccgaattctaccagaggtacaaggaggaactggtaccattccttctacaactattccaatcaatagaaaaagagggaatcctccctaactcattttatgaggccagcatcatcctgataccaaaggctggcagagacacaaccaaaaaagagaattttagaccaatatccttgatgaacgttgatgcaaaaatcctcaataaaatattggcaaaacgaatccagcagcacatcaaaaagcttatccaccatgatcaagtgggcttcatccctgggatgcaaggctggttcaatatacgcaaatcaataaatgtaatccagcatataaacagagccaaagacaaaaaccacatgattatctcaatagatgcagaaaaggcctttgacaaaattcaacaacccttcatgctaaaaactctcaataaattagaattggaaaaaactactttaaagttcatatggaaccaaaaaagagcccgcatcgccaagtcaatcctaagccaaaagaacaaagctggaggcatcacactacctgacttcaaactatactacaaggctacagtaaccaaaacagcatgcctggccccacaccacagtccatcaactcctgctccaggtggaaacctcagaaacccacaaagctcggacctgctccaggtcaccaagcagcagggccaggcactggcaatccaacgagaagccccactacatcgcattccagctcctgaagccattccctggtattttcagccccagccggccacacagctcggatctcctcctgtggatccccccagctctgcgatgatggcagaagagcacacagatctcgaggcccagatcgtcaaggatatccactgcaaggagattgacctggtgaaccgagaccccaagaacattaacgaggacatagtcaagaacgcctgccttcttcagaaaaacaaacacccatttgccccccggctcaggctacacaacacccagaggaaccagatgcccaccagccctacaaacacttgttccaggtttgtgctcatcagggacaccctgttgcacaaagaagaaactgacctggtggattttgaagacgtgatcgcagagcctgtgggcacctacagctttgacggcgtgtggaaggtgagctacaccaccttcactgtctccaagtactggtgctaccgtctgttgtccacgctgctgggcgtcccactggccctgctctggggcttcctgttcgcctgcatctccttctgccacatctgggcggtggtgccatgcattaagagctacctgatcgagatccagtgcatcagccacatctactcactctgcatccgcaccttctgcaacccactcttcgcggccctgggccaggtctgcagcagcatcaaggtggtgctgcggaaggaggtctaa

SEQ ID NO: 5840 - DNA, 2379 bp, Homo sapiens; identical to SEQ ID NO: 3583
  SIMILAR (1801)..(2376): 691254mologous to Homo sapiens olfactory receptor,accession number Y10529,Smith-Waterman Score=702.

SEQ ID NO: 5841 - DNA, 6741 bp, Homo sapiens
  SIMILAR (2068)..(6006): 761254mologous to Homo sapiens NuMA protein,accession number Z11583,Smith-Waterman Score=4590.
  misc_feature (1)...(6741): n = a,t,c or g
atgaggggagctcagaaggccacaaacgttaacaagctctctgaggtcattcagggtaaagaagaaagtccagcacaattctaccagagactgtgtgaggtctatcgtatgtatactccctgtgatcccgatagccctgaaaatcagcacatgattcacatggctttagtccgtcaaagcccagaagacatgagaagaaaactgcagaaacaggctgggcttgcagggatgaatccatcccaattactagaaatagctagccaggtgtttgtaaacagggatgcagtaagccgtaaggaaaacggcaaagagaatggaggtcaggcccggcgatatgccgacctgtttagccctgtcgagcctgattgtgtagaagtgttggactcaattcactctagcagacctgacctccgggaccagccttggccatcaggagactgggaactatatgtggatgggagcagcttcttcaacccccaaggagagagaggtgcagggtatgcagtgataaccctggacactgttgttgaagccacatcgttgccccaggccacttcaggccagaaagctgaactcattgctttcattggggccttagaactcagtgagggtgagactgtcaacatttacactgattctcgccatggcactgaagagggacagcaaatcttgaagcagccggtgtcagagagactggactttgtgtgcagttttctgcagagaaggaacagcttctacatgggcacttgccaggatgagcctgagcagctggatgactggaaccgcattgcagagctgcagcagcgcaatcgagtgtgccccccacatctgaagacctgctatcccctggagtccaggccttccctgagcctgggcaccatcacagatgaggagatgaaaactggagacccccaagagaccctgcgccgagccagcatgcagccaatccagatagccgagggcactggcatcaccacccggcagcagcgcaaacgggtctccctagagccccaccagggccctggaactcctgagtctaagaaggccaccagctgtttcccacgccccatgactccccgagaccgacatgaagggcgcaaacagagcactactgaggcccagaagaaagcagctccagcttctactaaacaggctgaccggcgccagtcgatggccttcagcatcctcaacacacccaagaagctagggaacagccttctgcggcggggagcctcaaagaaggccctgtccaaggcttcccccaacactcgcagtggaacccgccgttctccgcgcattgccaccaccacagccagcgccgccactgctgccgccattggtgccacccctcgagccaagggcaagctgggccaggacgacgtgacgctggacaacctgttcagggtccacgagcacacaggagaagttggtgctgtgcagggcaggggtcagctgctccagcaccaaggccttgcacagctgcgtacctgtgctcccacgttcccggctggagcggaagggaaggaaaggtatggtttccaggaagttcaccctgttttctacgttgttgtcattgcagaaaatcgaaaacatccctcttccccagaatgcctggtatctgcacagaaggtgctagagggatcagagctggaactggcgaagatgaccatgctgctcttataccactctaccatgagctccaaaagtcccagggactgggaacagtttgaatataaaattcaggctgagttggctgtcattcttaaatttgtgctggaccatgaggacgggctaaaccttaatgaggacctagagaacttcctacagaaagctcctgtgccttctacctgttctagcacattccctgaagagctctccccacctagccaccaggccaagagggagattcgcttcctagagctacagaaggttgcctcctcttccagtgggaacaactttctctcaggttctccagcttctcccatgggtgatatcctgcagaccccacagttccagatgagacggctgaagaagcagcttgctgatgagagaagtaatagggatgagctggagctggagctagctgagaaccgcaagctcctcaccgagaaggatgcacagatagccatgatgcagcagcgcattgaccgcctagccctgctgaatgagaagcaggcggccagcccactggagcccaaggagcttgaggagctgcgtgacaagaatgagagccttaccatgcggctgcatgaaaccctgaagcagtgccaggacctgaagacagagaagagccagatggatcgcaaaatcaaccagctttcggaggagaatggagacctttcctttaagctgcgggagtttgccagtcatctgcagcagctacaggatgccctcaatgagctgacggaggagcacagcaaggccactcaggagtggctagagaagcaggcccagctggagaaggagctcagcgcagccctgcaggacaaggccagggcaaaaggagatcttggtaacaagatgatgggccccatgtttgctgatgtttatgagggcttgtgtggtaatctgaaatgccttgaagagaagaacgaaatccttcagggaaaactttcacagctggaagaacacttgtcccagctgcaggataacccaccccaggagaagggcgaggtgctgggtgatgtcttgcagctggaaaccttgaagcaagaggcagccactcttgctgcaaacaacacacagctccaagccagggtagagatgctggagactgagcgaggccagcaggaagccaagctgcttgctgagcggggccacttcgaagaagaaaagcagcagctgtctagcctgatcactgacctgcagagctccatctccaacctcagccaggccaaggaagagctggagcaggcctcccaggctcatggggcccggttgactgcccaggtggcctctctgacctctgagctcaccacactcaatgccaccatccagcaacaggatcaagaactggctggcctgaagcagcaggccaaagagaagcaggcccagctagcacagaccctccaacagcaagaacaggcctcccagngcctccgccaccaggtggagcagctaagcagtagcctgaagcagaaggagcagcagttgaaggaggtagcggagaagcaggaggcaactaggcaggaccatgcccagcaactggccactgctgcagaggagcgagaggcctccttaagggagcgggatgcggctctcaagcagctggaggcactggagaaggagaaggctgccaagctggagattctgcagcagcaacttcaggtggctaatgaagcccgggacagtgcccagacctcagtgacacaggcccagcgggagaaggcagagctgagccggaaggtggaggaactccaggcctgtgttgagacagcccgccaggaacagcatgaggcccaggcccaggttgcagagctagagttgcagctgcggtctgagcagcaaaaagcaactgagaaagaaagggtggcccaggagaaggaccagctccaggagcagctccaggccctcaaagagtccttgaaggtcaccaagggcagccttgaagaggagaagcgcagggctgcagatgccctggaagagcagcagcgttgtatctctgagctgaaggcagagacccgaagcctggtggagcagcataagcgggaacgaaaggagctggaagaagagagggctgggcgcaaggggctggaggctcgattacagcagcttggggaggcccatcaggctgagactgaagtcctgcggcgggagctggcagaggccatggctgcccagcacacagctgagagtgagtgtgagcagctcgtcaaagaagtagctgcctggcgtgagcggtatgaggatagccagcaagaggaggcacagtatggcgccatgttccaggaacagctgatgactttgaaggaggaatgtgagaaggcccgccaggagctgcaggaggcaaaggagaaggtggcaggcatagaatcccacagcgagctccagataagccggcagcagaacgaactagctgagctccatgccaacctggccagagcactccagcaggtccaagagaaggaagtcagggcccagaagcttgcagatgacctctccactctgcaggaaaagatggctgccaccagcaaagaggtggcccgcttggagaccttggtgcgcaaggcaggtgagcagcaggaaacagcctcccgggagttagtcaaggagcctgcgagggcaggagacagacagcccgagtggctggaagagcaacagggacgccagttctgcagcacacaggcagcgctgcaggctatggagcgggaggcagagcagatgggcaatgagctggaacggctgcgggccgcgctgatggagagccaggggcagcagcaggaggagcgtgggcagcaggaaagggaggtggcgcggctgacccaggagcggggccgtgcccaggctgaccttgccctggagaaggcggccagagcagagcttgagatgcggctgcagaacgccctcaacgagcagcgtgtggagttcgctaccctgcaagaggcactggctcatgccctgacggaaaaggaaggcaaggaccaggagttggccaagcttcgtggtctggaggcagcccagataaaagagctggaggaacttcggcaaaccgtgaagcaactgaaggaacagctggctaagaaagaaaaggagcacgcatctggctcaggagcccaatctgaggctgctggcaggacagagccaacaggccccaagctggaggcactgcgggcagaggtgagcaagctggaacagcaatgccagaagcagcaggagcaggctgacagcctggaacgcagcctcgaggctgagcgggcctcccgggctgagcgggacagtgctctggagactctgcagggccagttagaggagaaggcccaggagctagggcacagtcagagtgccttagcctcggcccaacgggagttggctgccttccgcaccaaggtacaagaccacagcaaggctgaagatgagtggaaggcccaggtggcccggggccggcaagaggctgagaggaaaaatagcctcatcagcagcttggaggaggaggtgtccatcctgaatcgccaggtcctggagaaggagggggagagcaaggagttgaagcggctggtgatggccgagtcagagaagagccagaagctggaggagaggctgcgcctgctgcaggcagagacagccagcaacagtgccagagctgcagaacgcagctctgctctgcgggaggagctcgagcacaccagcacacaggccctggtgagtgagctgctgccagctaagcacctctgccagcagctgcaggccgagcaggccgctgccgagaaacgccaccgtgaggagctggagcagagcaagcaggccgctgggggactgcgggcagagctgctgcgggcccagcgggagcttggggagctgattcctctgcggcagaaggtggcagagcaggagcgaacagctcagcagctgcgggcagagaaggccagctatgcagagcagctgagcatgctgaagaaggcgcatggcctgctggcagaggagaaccgggggctgggtgagcgggccaaccttggccggcagtttctggaagtggagttggaccaggcccgggagaagtatgtccaagagttggcagccgtacgtgctgatgctgagacccgtctggctgaggtgcagcgagaagcacagagcactgcccgggagctggaggtgatgactgccaagtatgagggtgccaaggtcaaggtcctggaggagaggcagcggttccaggaagagaggcagaaactcactgcccaggtggagcagctagaggtatttcagagagagcaaactaagcaggtggaagaactgagtaagaaactggctgactctgaccaagccagcaaggtgcagcagcagaagctgaaggtggggcagctgggggaatgggtctggcctctggacaagggagggaagctattctctaagctctggggccgtggggggttggtttataagtggttcctgctaatctataaaatcagctatgccactggcattgttggctacatggctgtcatgtttaccctctttggtcttaacttattattcaagatcaaaccagaagatgccatggactttggcatctcccttctcttctatggcctctactatggagttctggaacgggactttgcagaaatgtgtgcagactacatggcatctaccatagggttctacagcgagtcgggcatgcctaccaaacatctttcagacagtgtgtgtgctgtgtgtgggcagcagatctttgtggacgtcagtgaagaggggatcattgagaacaccggtgctcagcttccacgagttctgcatccgtggctggtgcatcgtgggaaagaagcaaacgtgtccctactgcaaagagaaggtagacctcaagaggatgttcagcaatccgtatcctttattggggtcgttgttgggagtgggctgtgggaagaaagtactggccagtgtgacctgcatttgggtcctcctggggccctcacttctgcccccaaccagaacatgtcaaaccatgaacaacaaaaagattatgaaggtgatgatgaggataaagaggatgatgacagacaccatggcatcatgaacccttactga

SEQ ID NO: 5842 - DNA, 1551 bp, Homo sapiens
  SIMILAR (873)..(1163): 621254mologous to Homo sapiens cytochrome c-like polypeptide,accession number S80864,Smith-Waterman Score=272.
cagccatttggtgtgtctcagcaaatcccgctgagttccgaggccgcctaggtatgcaatcctgctgagagttgttcccaggtcagagaatggagagagccctgtgcatgatgggatatccctgcctagatctttcagtgagtctctacctcagctactcttaggatcagggggagaaccatggaaaggcccggtgtcagacatccggaaagaagatgggatgaatgttttacctctgaagtacatcccaaatgtgggagttaacttcagctttgctggggtctatttggccagtgaaactctgcctgggttcattcgcacatccggaagccacttcacggggagccgtcgcaaccggaaccacacacttggcatcggcggttgagccaaatgggggactcgtggtgcaagcaacgctcccccacgtgttagcgtgcgtgagattcggttggcggaattttactaggtgcgtgttggtagagtggggctgaggttttcttgctcctgtggatgtataggaagtcaaaggtcctgcccagccctgcggtcccctgagtcaactctgtttcggagacataacgatttggattgctaacaagtcaagaaatgttcaagtccttggatgtagggaaaagaaagagagatcagactgtcactgtgtctatgtcgaaagggaagacataagagactctattttgaaaaggacctgtactttaaacaattgctttgctgagatgttgttcatttgtagctttgccccagccactttgccccagccgctttgacccaacttggagcacacaaaaacctatgttgtataaaatcaaggtttaagggatctagggctgtgcaggacgtgccttgttaaccaaatgtttacaagcagtatactttgtaaaagtcattgccattctctagtctcaataaaccagggacacaatgcaccgtggaaagccgcagggacctctgcccttgaaagcagggtattgtccaaagtttctccccatgcgatagtctgaaatatggcctcgtgggatgagaaagacctgactgtcccccagcctgacacccgtaaagcgtctgtgctgaggtgtattagtcaaagaggaaagcctcttgcagttgacatggaggaaggccactgtctcctgcttgcccctgggaactgaatgtctcggtgtaaaacccgatcgtacatttgttcaactctgagctcggagaaaagctgccctgtggagggaggcgagacatgttggcagtaatgctgccttgttattctttactccgctgagatgtttgggtggagagagacataaatctggcctacgtgcacgtccaggcatagtaccttcccttgaacttaattatgatatagattcttttgctcacatgttttttgttgacctccttattatcaccctgctctcctagtatattcctttttgctgaaataatgaaaatcataatcaataaaaactgagggaactcagaggccggtgcaggtccttggtgtgctgagtgccggtcccctggacccactgttgtttccct

SEQ ID NO: 5843 - DNA, 2777 bp, Homo sapiens
  SIMILAR (803)..(1348): 451254mologous to Baboon endogenous virus strain M7 gag-pol precursor polyprotein,accession number D10032,Smith-Waterman Score= 382.
atattaggaaaaaatgtccctggggatgtgaacagccctgcgatattgagagtagtatcatcctctccccttgcatactgggaaaaatatcacagattatatttggatcaatatcaccggctgtgtgtacacctactgcgatattgaacgtagtatcatgctctctccctccctggagattaggagcaatatcacagctcgtttacgacccaaaacggggacacaaatgcccctgagagtgcagcgttatactgggatagacgaggatggtcacgtggtggagaggcgtgtttttggtgaagaaaggcggagagtcctccaagcaggaactaagtggctagaggaacatgcactagctgattatcaaaacccccaagaatatggaaggacccagttgccaggaaccgacccccagttggacccacatgaaagagaggagatgcaaaggctaaaccgagacagggaagctctcttggaaggattaatgaggggagctcagaaggccacaaacgttaacaagctctctgaggtcattcagggaaaagaagaaagtccagcacaattctacgagagactgtgtgaggcctatcgtatgtatactccctttgatcccgatagccctgaaaatcagcacatgattcacatggctttagtccgtcaaagcgcagaagacatgagaagaaaactgcagaaacaggctgggcttgcagggatgaatccatcacaattactagaaatagctagccaggtgttcataaacagggatgcagtaagccctaaggaaaatggcaaagagaatggaggatggcccccctgtttgagggccttggcagcaactgccctgctagtacaagaagcaaataagctgactcttgggcaaaacctgaacataaaggcctcccgtgctgtggtgactttaatgaatactaaaggacatcattggctaacggatgccagactcaccaagtaccaaactttgctctgtgaaaatccccgtataaccactgaagtttgtaacaccctacaccctgccaccttgctcccggtatcagagagccctgtcgagcctgattgtgtagaagtgttggactcagttgactctagcagacctgacctccgggaccaggcttgggcatcagtagactgggaactatacgtggatgggagcagcttcttcaacccccaaggagagagaggtgcagggtatgcagtggtaaccctggacactgttgttgaagccagatcgttgccccaggccacttcagcccagaaagctgaactcgttgctttcattcgggccttagaactcagtgaggaagaaaaggactttctccaggtagagggaaggacaagtgatggaggaaggatggattcggttaccggatgggagagtactgtgccacagctgctaggagctgcagttgtactggctgtgcaagaaaccacccatcgacatcaggagtcactggaaaagttgttaggccggtatttctacatctcgcctttgtcagctcttgccaaaacggtgaggcagcggtgtgttacctgccgacagcatgatgcgaggcaaggtccagccgttctgcctggcataggagcttatggagcagccccctttgaaggtctccaggtggacttcacagagatgccaaagtgtggaggtaacaagtatgtactagttcttgtgtgtacctactctgggtgggtggaggcttatccaacgctaactgagaaagctcgtgaagtaacccgtgtgcttcttcgagacctgattcctagatttcgaccgcccttacggatcggctcagacaaggggcctgcgtttttggctgccttgttacagaagacagcaaaggtgtccaagacacagagagccacggaatctcacaggtgtctgagaattcctcctcctgggactctcagaggatccagaactgcagccggtcctcgctttgctctccctgtccctgtccatgtatctggtcacggtgctgaggaacctgctcagcatcctggctgtcagctctgactcccacctccacacccccatgtacttcttcctctccaacctgtgctgggctgacatcggttacacctcggccacggttcccaagatgattgtggacacgcagtcgcatggcagagtcatctctcatgctggctgcctgacacagatgtctttcttggtcctttttgcatgtatagaagacatgctcctgactgtgatggcctatgactgctttgtagccatctgttgccctctgcactacccagtcatcgtgaatcctcacctctgtgtcttcttcgttttggtgtcctttttccttagcctgttggattcccagctgcacagttggattgtgttacaattcaccatcatcaagaatgtggaaatctctaattttgtctgtgacccctctcaacttctcaaatttgcctgttctgacagcatcatcaatagcatattcatatatttccataaggatccagaactgcagccggtcgtcgctgggctgttcctgtccatgtgcctggtcacggtgctggggaacctgctcatcatcctggccgtcagccctgactcccacctccccacccccatgtacttcttcctctccaacctgtccttgcctgacatcggtttcacctccaccacggtccccaagatgagcgtggacatccagtctcacagcagagtcatctcctatgcaggctgcctgactcaaatgtctctctttgccatttttggaggcatggaaaaaagacatgctcctgag

SEQ ID NO: 5844 - DNA, 3804 bp, Homo sapiens
  SIMILAR (200)..(301): 291254mologous to Baboon endogenous virus strain M7 gag-pol precursor polyprotein,accession number D10032,Smith-Waterman Score= 42.
ctaatatccagagcgaaagaggatgatatgactgtcaatatcgcagagggtgtacacccctcctgtaatattgttctgaataccctttccggaactctgaggccgggaggcggcatgcagtttccgtgtgatccccaataccgttgccgtcttctgtagcaagtcagccacaaacgcaggcccgttatctgagccgatccggaagggcagttccaatctaggaatcagatctcgaagaagcacacgggttacttcacgagctttctcagctcttgttggataggtctccacccacccagagtaggtacgcccaagaactggtaaatacttattccctccacactctggcatctctgtgaagtctacctggagatcttcaaaggcggctgctccataagcttgtatgccgggcggaacggctggaccttgcctcgcatgatgctgtcggcagctgacacaacgctgcctcaccgttttggcaagggctgactccggatcttcccactgaaaggcaaacagcttctggctctcaggggctgatctgataggaaagaaagcgtctttcaggtccaagcaggtgaaccagctgtcctcagctggcagcaaccccaacaatgtggacgggctaggtactgttggatggaaagtcagggtagcttgactaagcaagcgcaaatcctgtcccggcctgtagtccttggtccatagctcttcccttgcttctttggggggaccgctctgattgctgcagctaaccaacaggtcggcgtttcgccgggcctgacgttcattctctttgcgcttttcctcgcggcttactgcgtccccgtttaccaacacctgcttagcacaggcctcacacagtctctggtggaattgtgctggactttcttcttttccctgaatgacctcagagaccttgttaacgtttgtggccttctgagctcccctcttgaatccttccaagagagcttccctgtctcggtttagcctttgcatatcctctctttcatgtgggtccaactggggctgggttcctggtaactgggtccttccatactcttgggggttttgataatcagctggtgcatgttcctctagccacttagttgctgcgtggagccctctccgcctttcgcctttcatctctcctgtgacacccatcctaatacccagcgggtagagtatgacatgactgccaacatagcgatcaatgtacagccacccggtgatattgctcctaatattcacggaagaagcgtacgatattaatcccaatatcgcagggagtgtacacctcttctgtgatattgttccgggtggctgtacattcattgctatgttgggagtaatatcatacgcttcttccgtggatattatactcggatcaatatcactggctgggtgtacacctactgcgatattgaacgtaatatcatgctctctccctccctggacattaggagcaatatcacagctcgtttgagacgcaaaacggggacacaaatgcccctgagagagcagcggtatactgggatagatgaggatggtcacgtggtggagaggcgtgcttttggctaccagcccttcacctgtgtcgaccttctcaactggaaaaacaatacaccgccctataccgaaaagccacaagccctaattgattttctccaagctgttatccagacccacagccccaccttggctgattggcaccagttgctcgtgttcctctttaacagcgaagaaaggcggagagtcctccaagcagcaactaagtggctagaggaacatgcaccagctgattatcaaaacccccaagagcatggaaggacccagttgccaggaacagacccccatttggacccacatgaaagagaggatatgcaaaggctaaaccgagacagggaagctctcttggaaggattaatgaggggagctcagaaggccacaaacgttagcaagctctctgaggtcattcagggaaaagaagaaagtccagcacaattcgacgagagactgtgtgaggcctatcgtatgtatactccctttgatcccgatagccctgaaaatcagcgcatgattcacatggctttagtccgtcaaagcgcagaagacatgagaagaaaactgcagaaacaggctgggcttgcagggatgaatccatcacaattactagaaatagctagccagatgtttgtaaacagggatgcagtaagccctaaggaaaacggcaaagagaatggagatggggtttctaaaggatggcccccctgtttgagggccttggcagcaactgccctgctagtacaagaagcaaataagctgactcttgggcaaaacctgaacataaaggcctcccgtgctgtggtgactttaatgaatactaaaggacatcattggctaacggatgccagactcatcaagtaccaaactttgctctgtgagaatccccgtataaccattgaagtttgtaacaccctacaccccgcctccttgctcccggtatcagagagcactgtcgagcctgattgtgtagaagtgttggattcagttgactctagcagacctgacctccgggaccaagcttgggcatcaggagactggaaactatacgtgtatgggagcagcttcttcaacccccaaggaaagagagaggtgcaggcccttgccaaaacggtgaggcagcggtgtgttacctgccgacagcatgatgcgaggcaaggtccagccgttccacacggcatacgagcttatggagcagccccctttgaaggtctccaggtggacttcaaagagatgccaaagtgtggaggtaacaagtatgtactatttcttgggcgtacctactctgggtgggtggaggcctatccaacacgaactgagaaagctcgtgaagtaacccctgtgcttcttcgggatctgattcctaaatttcgaccgcccttatggatcggctcaaacaacgggcctgcatttttggctgccttggtacagaaaacggcaaagatattaggaaaaaatgtcactggggatgtgaacagccctgcgatattgagagtagtatcatcctctccccccttgtatattgggaacaacatcacagaggatccagaactgcagccagtcctcgctttgctgtccctgtccctgtccatgtatctggtcacggtgctgaggaacttgctgagcatcctggctgtccgctctgagtccccgctccacacaaccatgtacttcttcctctccatcctgtgctgggctgacatcggtttcacctcagccacagttcccaagatgattgtggacatgcagtggtatagcaaagtcatctctcatgcgggctgcctgacacagatgtctttcttggtcctttttgcatgtatagaaggcatgctcctgactgtgatggcctatgactgctttgtaggcatctgtcgccctctgcactacccagtcatcgtgaatcctcatctctgtgtcttctttgttttggtgtcctttttccttagcctgttggattcccagctgcacagttggattgtgttacaattcaccatcatcaagaatgtggaaatctctaattttgtctgtgacccctctcaacttctcaaacttgcctgttctgacagcgtcatcaatagcatcttcatatattttggtagtactatgtttggttttcttcccatttcagggatccttttgtcttactataaaatcgtcccctccattctaaggatttcatcgtcagatgggaagtataaagccttctccacctatggctctcacctagcagttttttgctga

SEQ ID NO: 5845 - DNA, 3357 bp, Homo sapiens
  SIMILAR (1432)..(1581): 481254mologous to Feline leukemia virus gag-pol precursor polyprotein gPr80,accession number AF052723,Smith-Waterman Score= 100.
gggcggcggagagggagcagccagttggtgtgtctcagaaaatcccactgagttccgaggcctcctagatgtggaatcctgctgagagttgttcccaggtcagagaatggagagagcctgtgcatgatgggacatccccgcctagatctttcagtgagtctctacctcagctactcttaggatcagggggagaaccatggtgtcagacatccggaaagaagacgggatgaatgttttacctctgaagtacatcccaaatgtgggagttaacttcagctttgctggggtctatttgggcagtgaaactcttgctgggtcctttcgacatccggaatgcactttacgggggggccgcggcacctgaaccacacacttggcatcggcggttgagccaaatggggactcgtggtgcaagcaacgctccccacgtgttagcgtgcattatattcggatcaatatcaccggctgggtgtgcacctgctgcgatattgaacgtaatatcatgctctctccctccctgaacattaggaacaatatcacagctcgtttacgacccaaaacggggacacaaatgcccctgagagagcagcggtatactgggatagatgaaaatgctcatgtagtggagagacgtgtttttgggtaccagcccttcacctgcgtcgaccttctcaactggaaaaacaatacatcgccctataccgaaaagccacaagccctaattgatttgctccaaactgttatccagacccacaaccacacctggaccgattggcaccagttgctcattttcctctttaacagtgaagaaaggcagagagtcctccaagcagcaactaagtggctagaggaacatgcaccagctgattatcaaaaccccgaacagtatggaaggacccagttgccaggaaccgacccccagttggacccacatgaaagagaggagatgcaaaggctaaaccgagacagggaagctctcttggaaggattaatgaggggagctcagaaggccacaaacgttaacaagctctctgaggtcattcagggaaaagaagaaagtccagcacaattctacgagagactgtatgaggcctatcatatgtatactccctttgatcccgatagccctgaaaatcagcgcatgattcacatggctttagtccatcaaagtgcagaagacatgagaagaaaactgcagaaacagactgggcttgcagggaagaatccatcccaattactagaaatagctagccaggtgtttgtaaacaggtatgcagtaagccgtaaggaaaacggcaaagagaatggaggtcaggcccggccacacgccgacctgtttgtcagctgcagcaatcagaggggcccccgcaaagaggcaagggaaagggggccctgggaaagaaactcagcttggctgtcagagtttgcagcgttgatgaccttctgctgggacaccccacggcagtcgggtgtgccaagggaacagatgccctacattggcacctggaggactgtgggtgtaaggtgtccaagaagaaagctcagatctgccgacagcagacggagtttctaaaggatggcccccctgttggagggccttggcagcaactgccctgctagtacaagaagcaaataagctgactcttgggcgaaacctgaacataaaggcctcccgtgctgtggtgatgaatactaaaggacgtcattggctaacgaatgccaggctcaccaagtaccaaactttggtctgtgaaaatccccgtataaccattgaagtttgtaacaccctacaccccgccaccttgctgccggtatcagggagccctgtcgagcctgattgtgtagaagtgttggactcaattgactctagcagacctgagctccgggaccagacttgggcatcagtagactgggagccacacgtggatgggagcagcttcttcaacccccaaggagagagaggtgcagggtatgcagtgataactctggacactgttgttgaaaccaggtcgttgccccaggccacttcagcccagaaagctgaacttaatgctttcatttgggccttagaactcagtgaggaggatccagaactgcagccggccctcgctttgctgtccctgtccctgtccatgtatctggtcacggtgctgaggaacctgttcagcatcctggctgtcagctctgactgccccctccacacccccatgtacttcttcctctccaacctgtgctggcctgacatcggtttcacctcggccatggttcccaagatgattgtggacacgcagtcgcatagcagagtcatctctcatgcgggctgcctgacacagatgtctttcctgctccttgttgcatgtatagaaggcatgctcctgactgtgatggcctatgactgctttgtagccatctgtcgccctctgcactacccagtcatcgtgaatcctcacctctgtgtcttcttcgttttggtgtcctttttccttagcctgttggattcccagctgcacagttggattgtgttacaattaaccatcatcaagaatgtggaaatctctaatttggtctgtgacccctctcaacttctcaaacttgcctgttctgacaggggcattcactaaccatattcatatatttcgatagtactatgtttggttttcttcccatttcagggatctttttgtcttactataaaattgtcccctccattctaaggatttcatcgtcagatgggaagtataaagccttctccacctgtggctgtcatctagcagttgtttgctggttttatggaacaggcattggcatgtacctgacttcagctggtgtcaccaccccccaggaatggtgtggtggcatcagtgatgtacgctgtggtcacccccatgctgaaccttttcatctacagcctgagaaacagggacatacaaagtgccctgtggaggctgctcagcagaacagtcgaatctcatgatctgttatctcaagatctgctccatcctttttcttgtgtgggtgagaaaggtcaaccacattaaatctctacttctgcaaatcctgcctcttagtcacattatttttgtgggcttgatgggcttttattcctttccgcatttcctttgtgaatattgctttcttcgttatgcctttaactgggaatggggtgaggattctggggatcccttgtttagcagaaacctcatgactgaatcccctatacccagggggcctcttttagtttttgagcaataaccctgtcatccaggtggaatcacaaccatcttttcatatacacgaagtcctcacttcgttttggaattccctgaaaactgactttatggaaacaatgtacaggag

SEQ ID NO: 5846 - DNA, 1494 bp, Homo sapiens
  SIMILAR (793)..(1491): 971254mologous to Homo sapiens putative p150,accession number U93572,Smith-Waterman Score=1144.
atgaaatctgggcaccctgaaaaagaacaggataacagcgatgttcaggaaacaagggagataaccataaggggcctgctgtgcactgctctgatgaggcattccactggggcaattgcctacctgggagtgctctcaggatctgcttcactcaagctggctggagtccccctcagatgctgtgagggtgacaaagatgcagggcacccactggaaacacagacggcactctgcgaaagaggaaggggcgccaggagcttggttggcaacaccatcatgacatcacaacctgttcccaatgagaccatcatagtgctcccatcaaatgtcatcaacttctcccaagcagagaaacccgaacccaccaaccaggggcaggatagcctgaagaaacatctacacgcagaaatcaaagttattggggtaaatctaattcagaacgtgttggagaggggttgggggaagtgccaagagatgatatatgtcttgggactggacatctgtcgacccttttttgtgagtagagtttctgaggagggcaggatggggcaaagaggggaggaagatgccaatagcttagacttcccacctgccagcttgctatgtttgatctgccaggagcaaggagtcaacggtgaatcttgttctcctgtcggaatgtatcacagagaaattgtgcctgtttatgaggttctttcggtgataactggccttcaaattcaggttttcagtggcaaggaagctgacagtgttataaagcggtctattggttggggtccattctttaagcccagaaccaaagacaaaaaccacatgattatctcaatagatgcagaaaaggcctttgacaaaattcaacaacacttcatgctaaaaactctcagtaaattaggtattgatgggacgtatctcaaaataataagagctatctatgacaaacccacagccaatatcatactgaatgggcaaaaactggaagcattccctttgaaaactggcacaagacaaggatgccccctctcaccactcctattcaacatagtgttggaagttctggccagggcaattaggcaggagaaggaaataaagggtattcaattaggaaaagaggaagtcaaattgtccctgtttgcagatgacatgattgtatatctagaaaaccccattgtctcagaccaaaatctccttaagctgatcagcaacttcagcaaagtctcaggatacaaaatcaatgtacaaaaatcacaagcattcttatacaccaataacagacaaacagagagccaaatcatgagtgaactcccattcacaattgcttcaaagagaataaaatacctaggaatccaacttacaagggatgtgaaggacctcttcaaggagaactacaaaccactgctcaatgaaataaaagaggatacaaacaaatggaagaacattccatgctcatgggtaggaagaatcaatatcgtgaaaatggccatactgcctaaataa

SEQ ID NO: 5847 - DNA, 458 bp, Homo sapiens
  SIMILAR (94)..(456): 1001254mologous to Homo sapiens MSTP030,accession number AF113210,Smith-Waterman Score=641.
  misc_feature (1)...(458): n = a,t,c or g
cggaattcctcggtcgaaaangngaacgccctagcgccgctgggcctgcaggtctctgtcgagcagcggacgccggtctctgttccgcaggatgagggtaaaactgattattatgctcggaaacgcttggtgatacaagataaaaataaatacaacacacccaaatacaggatgatagttcgtgtgacaaacagagatatcatttgtcagattgcttatgcccgtatagagggggatatgatagtctgcgcagcgtatgcacacgaactgccaaaatatggtgtgaaggttggcctgacaaattatgctgcagcatattgtactggcctgctgctggcccgcaggcttctcaataggtttggcatggacaagatctatgaaggccaagtggaggtgactggtgatgaatacaatgtggaaagcattgatggtcagccaggtgccttcacctgctattt

SEQ ID NO: 5848 - DNA, 1243 bp, Homo sapiens
  SIMILAR (229)..(1107): 391254mologous to Homo sapiens MSTP030,accession number AF113210,Smith-Waterman Score=324.
atgggtggcaacgcggctgataaatttcgggctggtgtagagttagcccttcaatctggaaacaaggtgtgcgtttgttcccctaggacaacaatctctggggatgcagttgctcccagatcagtcttaccaggatgtagacacattccaggggaaatttcgcagcactctcactgctgggccggcaggtctctgtcgagccgcaaacgcgggtctctgttccgcagaatggggtttattaaagttgttaagaataaagcctactttaagagataccaagtgaaatttagaagacgcccgaaagggtaaaacgtgattattatgctcggaaacgcgttggtgatacaagataaaaataaatacaacacacccaaataccaggatgatagttctgtgtgacaaacagagatattcatttgtcagatgctttatgcccccgtatagagggggatatgatagtctgcgcagcgtattgcacaccgaacttgccaaaaatatgggtgtgaagggttggcctgacaaattatgctgcagcatatttgtactggcctgctgctgggcccgcaggcttctcaataggtttggcatggacaagatctatgaaggccaagttggagttgactggtgatgaatacaatgtggaaagcattgatggtcagccaggtgccttcacctgctatttggatgcaggccttgccagaaactaccactggcaataaagtttttggtgcccctgaagggaagctgtggatgggaggcttgtctatccctcacagtaccaaaccgattccctgggttatgattctgaaaagcaaggaatttaatgccagaagttacatccggaaagcacatcatggggccaaaatgtttgcaaaattacatggcgctacttaatggaaagaagatggaagatgcttacaagaaaacagttctcttcaatacataaaagaacagcgtaacttccagacatgatgggaggagatgtataaggaaagctcatgctgctatacgagaggaatccagttctatggaaaagaaggcccaaggaaagaagtttaaaaagaagaggtggaaccgtccccaaaatgtcccttgctcagaagaaggatcgggtagctcaaaagaaggcaagcttcctccagagctccaggagcgggctgctggagagcttaaccccagccattttcccatgattttttcagatatagataataaacttatgaacagcaaaaaaaaaaaaaaa

SEQ ID NO: 5849 - DNA, 1194 bp, Homo sapiens
  SIMILAR (1)..(900): 891254mologous to Homo sapiens putative p150,accession number U93563,Smith-Waterman Score=1357.
atgactatctcaatagatgcagaaaaggcctttgataaaattcaacagcgcttcatgctaaaaactctcaataaactaggtattgatgggacctatctcaaaataataagagctatttatgacaaacccacagccaatatcatactgaatgggcaaaaactggaagcattccctttgaaaactggcacaagacagggatgccctctctcaccactcctattcaacacaatgttagaagttctggccagggcaatcagacaagagaaagaaataaagggtattcgattaggaaaagaggaagtcaaattgtccctgtttgcagaagacatgactgtatgtttagaaaaccccatcgtctcagcccaaaatctccttaagctgataagcaacttcagcaaagtctcaggatacaaaatcaatgtacaaaaatcacaagcattcctatacaccaagaacaggcaaacggagagccaaatcatgagtgaactcccattcacaattgcttcaaagagaataaaatacctaggaatccaacttacaagggatgtgaaggacctcttcaaggagaactacaaaccattgctcaacaaaataaaagaagacacaaacaaatggaagaacattccatgttcatggataggaagaatcaatattgtgaaaatggccatattgcccaaggtaatttatagattcaatgccatccccatcaagctaccaatgactttcttcacagaattggtagaaacttctttaaagttcatatggaaccaaaaaagagcctgcattgccaagacaatcctaaaccaaaagaaaaaggctgcaggcatcacgctacctgacttgaaactatactataaggctacaattgaataccaggccaccttcagcttgaataaccaagttgaagagcccacgctcatccttgcacaacgcacaaacttccagtggctccaccccattcccccagtgtgcatgtgggcattattcagaaagaatcagtcagaaatgtgtgggcaaacaggggcagttctccctctaggtcgtgggtttcatctgggaccagcagtctggtctttcagccttcaggctgttttaggcttgaagggactcactattcctactgaaatcaagaaattgatttctatttcagcttctcgaacaacctgcaaagaacaaccagtacaacccttttga

SEQ ID NO: 5850 - DNA, 418 bp, Homo sapiens
  SIMILAR (2)..(244): 1001254mologous to Homo sapiens Human LAPH-1 protein sequence,accession number Y00876,Smith-Waterman Score=458.
ccaggatcgaccccagctgaccaagaagttctgtgaggccagctggaggtttctcttctacctgtcctccttcgtgggcggcctctcggtcctgtaccacgagtcatggctgtgggcaccagtaatgtgctgggacaggtacccaaaccagactctgaagccatccctgtactggtggtacctcttggagctgggtttctacctctcactgctaatcaggctgccctttgatgtcaagcgcaagggtgggggaccttccagcatcaagcctcgtccccactatgacccaccgtctactgcaggatttcaaggagcaggtgatacaccacttcgtggcggtcatcctgatgaccttctcctacagtgccaacctgctgcgcattggctctctggtgctgctgttacacgattcctctgg

SEQ ID NO: 5851 - DNA, 1065 bp, Homo sapiens
  SIMILAR (49)..(381): 651254mologous to Homo sapiens fibrillin-2,accession number U03272,Smith-Waterman Score=445.
atgacaggagcaataggaccatatggtgaacaagaggatgattgggccgatgacaatgaatgccacgctcagcctgacctctgtgtcaacggccgctgtgtcaacaccgcgggcagcttccggtgcgactgtgatgagggattccagcccagccccacccttaccgagtgccacgacatccggcaggggccctgctttgccgaggtgctgcagaccatgtgccggtctctgtccagcagcagtgaggctgtcaccagggccgagtgctgctgtgggggtggccggggctgggggccccgctgcgagctctgtcccctgcccggcacctctgcctacaggaagctgtgcccccatggctcaggctacactgctgagggccgagggcccctgccctcccacccctctaatctcaccttcgcagaagaagccatccccggcaaagccctggcggcaggtgcagcggtaggagccagggacattgagacagtcacctcttgggctgcaccggtgctcctgggagacgcattcatccaggtctgcaggagatggagcccagaccccccaccccatggttgttttgagaagcaaacggggaaaacagagtccggtcaccggggcccagggtcggacccctggtacgaaccgcgggtgaatatccgggggaccaggcccacccggggggtatgttcgcgcgtgacggaccagtcccccgggaatgctcgggcacaccgaaagaggggacgggccccaaccggggagggcaagacggggaaaacccggaggaataggcccagtgaaaccgccggcaagcaggggaaaggggaccgggcccgggaacgatttcaaggagcaggtgatacaccacttcgtaggcggtcaatcctgatgaccttctcctacagtgccaacctgctgcagcattggctctctggtgctgctgttacacgattcctctggatgatcatccaggaaggcgtgccgaccttcgagagcatcaaggatgccgtggccgagcccgtcgtctacatgatcgaccgctacgtggtggtgttgttgcttcgataa

SEQ ID NO: 5852 - DNA, 249 bp, Homo sapiens
  SIMILAR (245)..(75): 321254mologous to Anolis stratulus NADH dehydrogenase subunit II,accession number AF055929,Smith-Waterman Score=64.
atgcacccctttgtgcagcccacccatggacaggagaagacacccctggagcatatctttagggccatcctcatcaagaaaaccgacaggagagctgtaagcatcaggctaggtaagaaagaacacaggactcgtggccagcaggcctgtgttctaggctgcatgaggctactggaaaatgaggctgaagaagttattaatgacttctcagttctgaagtttgaagtgggtagtgggagtgtgtggtga

SEQ ID NO: 5853 - DNA, 642 bp, Homo sapiens
  SIMILAR (112)..(549): 271254mologous to Neisseria meningitidis Z2491 putative DNA- invertase,accession number AL162754,Smith-Waterman Score=99.
ctcagggagcccgcgaccgcgccttctcctccgtcggtcccatacgctgctgaaatgggttgcggattgaacaagttagagaaacgtgatgaaaaacggcctgggaatatttattcaactttgaagaggcctcaggtggaaaccaagatagatgtgtcctatgaataccgcttcctggagttcacgactctgagtgctgcggagctccctgggtcctcagcagtgaggctggcctccctgcgtgacctgcccgcccagctcctggagctgtaccagcagggcttctcgctggcggccctgcaccccttcgtgcagcccacccatgagcgggagaagacgcccctggagcacatctttagagccatcctgatcaagaaaaccgacagatctcagaaaactgatcttcacaatgaaggctacatcttggaattagattgctgttcctccttagaccacccgacagaccagaaactcatcccagagttcattaagaagatccaggaggctgcaagccagggcctgaaattcgttggtgttatacctcagaaaatcaagaagaaggaatcgaagtttcagtggcgattctccagagaagaaatgcacaacaggcagatgaggaaatcaaaaggtaaactcagtgcc

SEQ ID NO: 5854 - DNA, 1064 bp, Homo sapiens
  SIMILAR (2)..(643): 1001254mologous to Homo sapiens netrin 4 precursor,accession number AF297711,Smith-Waterman Score=1305.
ctgcttctgcaatggccacgctgatcaatgcatacctgttcatggcttcagacctgtcaaggccccaggaacattccacatggtccatgggaagtgtatgtgtaagcacaacacagcaggcagccactgccagcactgtgccccgttatacaatgaccggccatgggaggcagctgatggcaaaacgggggctcccaacgagtgcagaacctgcaagtgtaatgggcatgctgatacctgtcacttcgacgttaatgtgtgggaggcatcagggaatcgtagtggtggtgtctgtgatgactgtcagcacaacacagaaggacagtattgccagaggtgcaagccaggcttctatcgtgacctgcggagacccttctcagctccagatgcttgcaaaccgtgttcctgccatccagtaggatcagctgtccttcctgccaactcagtgaccttctgcgaccccagcaatggtgactgcccttgcaagcctggggtggcagggcgacgttgtgacaggtgcatggtgggatactggggcttcggagactatggctgtcgaccatgtgactgtgcggggagctgtgaccctatcaccggagactgcatcagcagccacacagacatagactggtatcatgaagtttcctgacttccgtcccgtgcacaataagagcgaaccagcctgggagtgggaggatgcgcaggggttttctcccacttcttggatttttaaaccacagtctggagtgatagctactgtagaaaggaaatagactttgtatgaactctttaagttgaaaagtaaaaaatatatgtggtttggatgtgtgctttaattcagctttagaaattaataccactacccgtgaattatatggcctgacaatatgaattaggtgtactgtactgaagaacagtactccacaaacatgggtggtaacaagagttccatcccaggaggccaaacggtgcaacagaagggtaggttagatgctattaagaaggcacttaatagtacatcatgtaagatggcaactgtattaaagaaaaatccggaaaaaaaa

SEQ ID NO: 5855 - DNA, 558 bp, Homo sapiens
  SIMILAR (337)..(552): 971254mologous to Homo sapiens PRO3091,accession number AF119916,Smith-Waterman Score=429.
atggtgaagccctgtctctataatacacgaattagccaggcgtgttggtgtgcacctgcaagaataattaaaaagttcttttatgtcaacccaaagaaaggcagttttgacctttttgtcctcgacacattgtttgctcgaagtaagaaatgttcacgtggaatagctgccattaatatgggtgacctcaagagggacagttttttcaaagcaaaagacagaggagaggtgatggggaaggaggagagaagagagagagggagtaggggaggagcaggggaaggggcagaagaagaagaagagactgttgcagataaaaagagacttgaggtcaagcgagcgtgttcctgccatccagtaggatcagctgtccttcctgccaactcagtgaccttctgcgaccccagcaatggtgactgcccttgcaagcctggggtggcagggcgacgttgtgacaggtgcatggtgggatactggggcttcggagactatggctgtcgaccatgtgactgtgcggggagctgtgaccctatcaccggagactgcatcagcaggtga

SEQ ID NO: 5856 - DNA, 597 bp, Homo sapiens
  SIMILAR (440)..(595): 861254mologous to Homo sapiens AKAP-associated sperm protein,accession number AF239723,Smith-Waterman Score=232.
attcccgggtcgacgatttcgtgcggctggcgctagggaactgcagggtctagggtgttgtcggagtggcagttggtccgaatttctcccgaagcccgcggaggagcggcgcgccgcgattcaccagcctggtcccttctgcggagagcgatgccgcttcccgacaccatgttctgcgctcagcagatccacattcccccggagctgccggacatcctgaagcaattcaccaaggctgccatccgcacccagccggccgacgtgctgcggtggtccgcgggctatttttcagctctgtcgagaggagatccacttcctgtaaaggacagaatggaaatgcccacggcaacccagaaaacagacacaggcctgactcaaggactcctgaaagttttgcacaggcagtgtcaccacaagcggtatgtggaattaacagatcttgagcacaaaaggaagaacctgtggcctgccgaaggaaaaattcaaagcgctcttacaactggatccttgtgaaaacaaaatcaagtggataaactttttagcgcttggatgcagcatgcttggtgggtccttgaacactgcgctgaagcacctgtg

SEQ ID NO: 5857 - DNA, 4612 bp, Homo sapiens
  SIMILAR (923)..(2848): 991254mologous to Homo sapiens Human adult neural tissue secreted protein s195_10,accession number W88407,Smith-Waterman Score=3335.
gtgtcgctcgctttctgtcagcctctctccctctccctctcccctctccttcctctcgcttcctctctcgcacctgagcgtacgcacctgcccgggcccggctccctcctcctctcccctccctctttccccgcccggccgcgggagcctcgtggctgcgtcaccgccgcccccccagacaagatggacaccgcggaggaagacatatgtagagtgtgtcggtcagaaggaacacctgagaaaccgctttatcatccttgtgtatgtactggcagtattaagtttatccatcaagaatgcttagttcaatggctgaaacacagtcgaaaagaatactgtgaattatgcaagcacagatttgcttttacaccaatttattctccagatatgccttcacggcttccaattcaagacatatttgctggactggttacaagtattggcactgcaatacgatattggtttcattatacacttgtggcctttgcacggtgggaggttgtccttcttccagcatgccgcatctacaagtgcttgtttcttggctccgtgagctcactactgacgctgccattagatatgctgtcacggaaaaatttgttggcagattgtttgcaggggtgtttttgtggtgacgtgcacactgtgtgcattcatcagcctggtgtggttgagagagcagatagtccatgggggagcaccaatttggttggagcatgctgccccaccgttcaatgctgcggggcatcaccaaaatgaggctccagcaggaggaaatggtgcagaaaatgttgctgctgatcagcctgctaacccaccagctgagaacgcagtggtgggggaaaaccctgatgcccaggatgaccaggcagaagaggaggaggaggacaatgaggaggaagatgacgctggtgtggaggatgcggcagatgctaataacggagcccaggatgacatgaattggaatgctttagaatgggaccgagctgctgaagagcttacatgggaaagaatgctaggacttgatggatcactagtttttctggaacatgtcttctgggtggtatctttaaatacactgttcattcttgtttttgcattttgcccttaccatattggtcatttctcccttgttggtttgggatttgaagaacacgtccaagcatctcattttgaaggcctaatcacaaccatagttgggtatatacttttagcaataacactgataatttgtcatggcttggcaactcttgtgaaatttcatagatctcgtcgcttactgggagtctgctatattgttgttaaggtctctttgttagtggtggtagaaattggagtattccctctcatttgtggttggtggctggatatctgttccttggaaatgtttgatgctactctgaaagatcgagaactgagctttcagtcggctccaggtactaccatgtttctgcattggctagtgggaatggtatatgtcttctactttgcctccttcattctactactgagagaggtacttcgacctggtgtcctgtggtttctaaggaatttgaatgatccagatttcaatccagtacaggaaatgatccatttgccaatatataggcatctccgaagatttattttgtcagtgattgtctttggctccattgtcctcctgatgctttggcttcctatacgtataattaagagtgtgctgcctaattttcttccatacaatgtcatgctctacagtgatgctccagtgagtgaactgtccctcgagctgcttctgcttcaggttgtcttgccagcattactcgaacagggacacacgaggcagtggctgaaggggctggtgcgagcgtggactgtgaccgccggatacttgctggatcttcattcttatttattgggagaccaggaagaaaatgaaaacagtgcaaatcaacaagttaacaataatcagcatgctcgaaataacaacgctattcctgtggtgggagaaggccttcatgcagcccaccaagccatactccagcagggagggcctgttggctttcagccttaccgccgacctttaaattttccactcaggatatttctgttgattgtcttcatgtgtataacattactgattgccagcctcatctgccttactttaccagtatttgctggccgttggttaatgtcgttttggacggggactgccaaaatccatgagctctacacagctgcttgtggtctctatgtttgctggctaaccataagggctgtgacggtgatggtggcatggatgcctcagggacgcagagtgatcttccagaaggttaaagagtggtctctcatgatcatgaagactttgatagttgcggtgctgttggctggagttgtccctctccttctggggctcctgtttgagctggtcattgtggctcccctgagggttcccttggatcagactcctcttttttatccatggcaggactgggcacttggagtcctgcatgccaaaatcattgcagctataacattgatgggtcctcagtggtggttgaaaactgtaattgaacaggtttacgcaaatggcatccggaacattgaccttcactatattgttcgtaaactggcagctcccgtgatctctgtgctgttgctttccctgtgtgtaccttatgtcatagcttctggtgttgttcctttactaggtgttactgcggaaatgcaaaacttagtccatcggcggatttatccatttttactgatggtcgtggtattgatggcaattttgtccttccaagtccgccagtttaagcgcctttatgaacatattaaaaatgacaagtaccttgtgggtcaacgactcgtgaactacgaacggaaatctggcaaacaaggctcatctccaccacctccacagtcatcccaagaataaagtagttgtctcaacaacttgaccttcccctttacatgtccttttttgtggacttctctctttggagatttttcccagtgatctctcagcgttgtttttaagttaaatgtatttgacttgtgttctcagcattcagagagcagcggtgtaagattctgctgttctccctggatcttctgacattactgctgtctgagatttgtatatgtgtaaatacaagttccttgataccctaaaaccttggattaaacagaatgtgcattgtacatctttaaacaaaatgtatattaatttattaaatctagttgtcactttattttggacctgctgtgatctcgacaggaaacgtgccacagagcagtagtgcgcaggcaagacttttcagtgacgccttgtggaacgcagttcatgatgtcctagcagctctcactaagggaactgtacattctttctttcttggctattcagaccttaccaagaacgttaaaggaaacaagtagaaatcagcagtggagtgtctgtggtaagaaaacatgaactttatgcttcactgttagttgtttgtggaagttattttgtataacaccaaagctgttgtacatttcctactgcctgatttttttcatgtgtctgtgtttgtaatattgtatagtatcttgtgctaggtgaggaaattatttttaattttgataatttaatattcctagtgtgatcagcattgggagttgggtttcagtggggcatgtctatacttagagaaaaaaagtccaaatgaagattttcatgagtcagcccccccgcccgcccccaccccacacccacatcctctcttttccacacacaactatctgtttattttttgtagcagtggccgaaagtcctgcaaggtcataaatctttcagagtgacatcaccaactgtactgcatcttactggatttaggacttctgagatgcttgtgaagtatagatgtggttgtggtcttagattgacagcattagagaagactggttagaacatctggtctcgctggttagtgcctcgttggctgaggactaggtgtgcatttctcctagcttttcatcaggaaatcccaaagtttccaaagctttttgtttacagaataaaacttcaaataaaaccaattcattatttgtccagaaggaagcttggctgagctggccttttaacataggaatgtatttcgttggaaacattctgaaaaatctcagagaactgaacccttacaaactttgttttccctcataaccaaagcttcaggttagaagtttagaaaaatagaatggttgggtacatgatctaaatgtttaatgctaaaggtatatcgtaagggtagtgtttgtttttgaacgataatttagaagttctcatagaaagcgtataacataggtcttcagaaactataaaagaattttcatatagtattaaaatccatagactaaaatctgagaattttttaacatatgcaagtcagccaaacataagctaccaaaataaagagcaatgtgttctggctgttttatacttcaacaattttttccctaagtggtaagcaattactttaaaacatatttttaaaaacatcggtatcgggagctgcggtggctccggccggttgtcctggcacacaaggaggcgaggctatgcgttcgaggccaacctaggcaaaattgg

SEQ ID NO: 5858 - DNA, 908 bp, Homo sapiens
  SIMILAR (511)..(744): 771254mologous to Homo sapiens Human adult neural tissue secreted protein s195_10,accession number W88407,Smith-Waterman Score=295.
gagaatctgggagagatgtgaaaactggaagagaaacaggaagtacctccaggattcacctaaatagatgctgcggtttctatcaaaccacaggccaccccagcatctcagtggcttctataggttgtcctgaaagagccatgatgccagggcccttgatggattcccagataccagctgctcctccagacaccaattccaccctccacctttctgtgtccgtcccagaccaaggcagcccagcgcgccgcgattcaccagcctggtcccttctgcggagagcgatgccgcttcccgacaccatgttctgcgctcagcagatccacattcccccggagctgccggacatcctgaagcaattcaccaaggctgccatccgcacccagccggccgacgtgctgcggtggtccgcgggaccaaaccctgtgctaaagagtacatatacaacagctgacaagacatgccctcacttaagtctacagttcaacacctttctgcataaaggaacagatgggaaaagaggaaagaggacactgggctacaggaaaaagcagaagaagatagagcatgagaaagaagaggctccagcaggaggaaatggtgcagaaaatgttgctgctgatcagcctgctaacccaccagctgagaacgcagtggtgggggaaaaccctgatgcccaggatgaccaggcagaagaggaggaggaggacaatgaggaggaagatgacgctggtgtggaggatgcggcagatgctaataacggagcccaggccttggcgttagattctcatgggagcgggaaccctattgggaactgcgagtgcgagggatccagattgtgtgctcattatgagaatctaatgcctgatgatctgaagcagaacagtttcatcctgaaatcccgttga

SEQ ID NO: 5859 - DNA, 554 bp, Homo sapiens
  SIMILAR (45)..(170): 921254mologous to Homo sapiens Human phospholipase 2 HPPL2,accession number B03628,Smith-Waterman Score=196.
  misc_feature (1)...(554): n = a,t,c or g
gggtgggccccgnnnaattgatcccatcgcaagngttggaattcctatctattatggccactggtggtgggatccgggcaatgacttccctgtatgggcagctggctggcctgaaggagctgggcctcttggattgcgtctgctacatcaccggggcctcgggctccacctgccccatgatcacaagctctcagatcaacgggaggccctgagtcatggccagaaccctctgcccatctactgtgccctcaacaccaaagggcagagcctgaccacttttgaatttgggggtatctggagcaacctgtatgcagccaacctccaggacagcttatactgggcctcagagcccagccagttctgggaccgctgggtcaggaaccaggccaacctggacaaggagcaggtcccccttctgaagatagaagaaccaccctcaacagccggcaggatagctgagtttttcaccgatcttctgacgtggcgtccactggcccaggccacacataatttcctggcgtggcctcattttcacaagatactttcagcatccc

SEQ ID NO: 5860 - DNA, 5241 bp, Homo sapiens
  SIMILAR (4315)..(4527): 281254mologous to Homo sapiens beta V spectrin,accession number AF233523,Smith-Waterman Score=46.
atggcggaggcggctttggaagccgtgcggagcgagttacgagaattcccggccgctgcaagggtcccacctcctgaggcaagaggattgtttgagtccagcagttttgatgacagtggcgggcagttggaagcagatgctgtcatcatgctggctgcatacttcgcggacgcggcggaggcggcttcgtggctgcgcgagcggcgatcctcgctggagagagcgtcctgcggtcaggaccaggcggccgccgagaccctgctgaggcgccacgtgcggctggagcgcgtcctgcgcgccttcgcggccgagctgcggcggctggaggagcaggggcgggcggcctcggcccgggcgtcgttattcacggtgaactctgccctgagccctccaggagaaagcctgaggaacccagggccctggagtgaggcttcctgccaccctggccctggggatgcctggaagatggccctcccagctgagcctgaccctgactttgatcccaacactatactccagacacaggaccacttgagtcaggactatgagagtctgcgggccctggcacagctccgcagggcccggttggaggaggccatggccctgttcggtttctgcagttcctgtggggagctccagttgtggctggagaagcagacagtgctgctccaaagggtgcagccccaggctgacaccctggaggtcatgcagctcaaatatgagaacttcctcactgccctggctgtgggaaagggcctctgggctgaggtcagcagctctgctgagcaactgaggcagagatatcctgggaactccacacaaatccaacgacagcaggaggaactgagccagaggtgggggcagctggaggccctgaagagggagaaggccgtgcagctggcacacagtgtggaagtgtgcagttttctgcaggagtgtggacccacacaggtccagctgcgagacgtgctcctccagctggaggccctgcagccagggagctcagaggacacccgccacgccctgcagctggcccagaagaagaccctggtgctggagaggagggtctacttcctccaaagtgtggtcgtaaagtacggccagcgcagtggtggcattgggaggcaggtcgaggagccaggctacgcagagagccagcctctgcaaggacaggtggagacactgcaggggctgctgaagcaagtacaggaacaagtggcccaacgggcccggcgccaggctgagactcaggcccggcagagcttcctgcaagagagccagcaactgctactgtgggcagagagtgtccaggctcagctgcgcagcaaggaggtgtcagtggatgtggcctcggctcagcggctgctgagggagcatcaagacctgctggaggagatccacctgtggcaggagaggctgcagcagctggacgctcagagccagcccatggcagccttggactgcccagactcccaagaggtgcccaacactctgagggtcctggggcagcagggccaggagctgaaggttttgtgggagcagaggcagcagtggctgcaagaggggctggagctgcagaagtttggccgagaagtggatggtttcactgccacctgtgccaaccaccaggcctggctgcacctggacaaccttggggaggacgtgagggaggccctgagcctgctgcagcagcaccgggagtttgggcggctcctgagcaccctggggcctcgggcagaggctctgcgggcacacggcgagaagctggttcagagccagcacccagctgcacacacggtcagagagcagctgcagagtatccaggcacagtggaccaggctccaggggaggagtgagcagaggaggaggcagttgctggcttccctccagctccaggagtggaagcaggatgtggcagagctgatgcagtggatggaagagaaggggctgatggctgcgcatgagccctccggagcgcgcagaaacatcctgcagacactcaagcggcacgaagcagctgagagcgagctactcgccacccgcagacacgtggaggccctgcagcaggttgggagagagctgttgagtaggaggccctgtggccaggaggacatacagaccaggcttcaaggcctgagaagcaagtgggaagctttgaaccgcaagatgactgagcgtggggacgagctccagcaggctggacagcaggagcaactcctgaggcagctgcaggatgcaaaggagcagctggagcagctcgaaggggccctacagagctcggaaacagggcaggacctgcgctccagccagaggctgcagaaacggcaccaacagctggagagtgagagccggaccctggctgccaagatggctgccctcgcctccatggcccatggcatggccgcctccccggccatcctggaagagacccagaagcacctccggaggctggagcttctgcaggggcatctggccatccggggcctgcagctgcaggcctcagtggagctgcaccagttctgccacctgagcaacatggagctctcttgggtagccgagcacatgccccatggcagccccaccagctataccgagtgcttgaatggtgcccagagccttcaccgcaagcacaaggagctccaggtggaggtaaaagctcaccaggggcaggtgcaacgggtgctgagttctgggcggagcctggcagcctcagggcacccccaagcccaacacatcgtggagcagtgccaggagctggaaggccactgggcagagctggagagggcatgtgaagcgcgggcccagtgtctgcagcaggctgtcactttccagcagtactttctggatgtgtcagagctggagggctgggtggaggagaagcggccgctggtgagcagtcgggactatggcagagacgaggcagccaccctcaggctcattaacaagcaccaggctctacaggaggaactagccatttactggagctccatggaggagcttgaccagacggcccaaaccctcactggccccgaagtccctgagcagcagcgtgtggtgcaggagaggctccgggagcagctgcgggcactgcaggagttggcggccacacgggaccgggaactggaggggaccctgaggctgcatgagttcctgagggaggctgaggacctgcagggctggctggcaagccagaagcaggcagccaaaggaggggagagcctgggagaggaccccgagcacgccctgcacctctgcaccaagtttgcaaagtttcagcaccaagtggagatgggcagccagcgggtggccgcctgccggctgctggcggagagcctgctagagcgtgggcacagtgctggccccatggtccgtcagaggcagcaggatctgcagaccgcctggtcggagctgtgggagctgacccaggcccgaggccacgcgctccgagacaccgagaccaccctcagagttcacagagatctcttggaagtcctcacccaggtccaggagaaagccacgagcctccccaacaatgtggcacgggacctgtgtgggctggaggcgcagctgagaagccaccaggggctggagcgagaactcgtgggcaccgagcggcagctgcaggaactgctggagactgcaggcagggtgcagaagctgtgtccggggcctcaggcccatgcggtgcagcagaggcagcaagctgtgacgcaggcgtgggcagtgctgcagcgacgcatggagcagcgcagggcccagctggagcgggcacgcctcctggcccgcttccgcacggcgttctcccctctgttctctgagagggcagccttcaccctcgggcatacagagatgcaggacaaagcccagcagtgcagtggtagtcgtagcccagtagtgaagaacctgggctctgcagtcagcactgccaagttcatgtcccgaccccatcaactcacagccgtgggactgggcaagattggcaacagtattgtctgtgttatcaacgccaaaagaataatgtacatgaaattacaggctcggatgaccctccctagctctgtgcctcctacaacccactcctccaaatcagccacacgaaagctagacccaggaaagagggaaatagagggtaattcaaagaaaaggtttaaacagcctgaccgaagatggcagcttgctggtccttaccgattcaggaaagcgtttccaaagcgactgagctttctaaacggctttttggggtccacgactaaagcattccctggggtgctgccctcagtctctccatacatcacggcgatgaaggagtctgtggtgggctccggaccaatcctcatgcctgggaaatcctgctccagtatctggagcaacctgtatgcagccaacctccaggacagcttatactgggcctcagagcccagccagttctgggaccgctgggtcaggaaccaggccaacctggacaaggagcaggtcccccttctgaagatagaagaaccaccctcaacagccggcagaatagctgagtttttcaccgatcttctgacgtggcgtccactggcccaggccacacataatttcctgcgtggcctccatttccacaaagactactttcagcatcctcacttctccacatggaaagctaccactctggatgggctccccaaccagctgacaccctcggagccccacctgtgcctgctggatgttggctacctcatcaataccagctgcctgcccctcctgcagcccactcgggacgtggacctcatcctgtcattggactacaacctccacggagccttccaggttgagaagggtgggcagcccaccagggaggcgcagttgcagctcctgggccggttctgccaggagcaggggatcccgttcccacccatctcgcccagccccgaagagcagctccagcctcgggagtgccacaccttctccgaccccacctgccccggagcccctgcggtgctgcactttcctctggtcagcgactccttccgggagtactcggcccctggggtccggcggacacccgaggaggcggcagctggggaggtgaacctgtcttcatcggactctccctaccactacacgaaggtgacctacagccaggaggacgtggacaagctgctgcacctgacacattacaatgtctgcaacaaccaggagcagctgctggaggctctgcgccaggcagtgcagcggaggcggcagcgcaggccccactga

SEQ ID NO: 5861 - DNA, 522 bp, Homo sapiens
  SIMILAR (28)..(309): 891254mologous to Homo sapiens Human secreted protein encoded by gene 11 clone HCENJ40,accession number W75132,Smith-Waterman Score=462.
atgaggctgaggcgtggactcctcacagagtggtgcgagttctctccctacgaggtcggcttccccaagtacggggccttcatcccctctgagctctttggctccgagttctttatggggcagctgatgaagaggcttcctgagtcccgcatctgcttcttagaaggtatctggagcaacctgtatgcagccaacctccaggacagcttatactgggcctcagagcccagccagttctgggaccgctgggtcaggaaccaggccaacctggacctgttggactacggctccctgcgtccagaccgcccactgcacaaccttgcttttgctttcctggtggctgagcaggagctgggcattgctcagctgctggaccccgaggacgtggcagccgcacagccagatgagcgctctatcatgacctacgtctccctctactaccactactgctcccgcctgcatcaggggcagactgtccagaggagactcactaaggtgggggagaaaggaggggtggggtga

SEQ ID NO: 5862 - DNA, 3068 bp, Homo sapiens
  SIMILAR (313)..(2613): 871254mologous to Homo sapiens Human PLA2 protein,accession number Y51557,Smith-Waterman Score=3409.
acgagggacgcagccatggcggaggcggctttggaagccgtgcggagcgagttacgagaattcccggccgctgcaagggagctctgcgtgcctcttgctgtgccctacctggacaaacccccaactccgctccacttctaccgggactgggtctgccccaacaggccgtgcattatccgcaacgctctgcagcactggccggccctccagaagtggtccctcccctatttcagagccacagtgggctccacagaggtgagtgtggccgtgaccccagatggttacgcggatgccgtgagaggggatcgcttcatgatgccagctgagcgccgcctgcccctgagcttcgtgctggatgtgctggagggccgggcccagcaccctggagtcctctatgtgcagaagcagtgctccaacctgcccagcgagctgccccagctgctgcctgatctggaatcccatgtgccctgggcctccgaagccctgggaaagatgcccgatgctgtgaacttctggctgggggaggcggctgcagtgacttctttgcacaaggaccactatgagaacctctactgcgtggtctcaggagagaagcatttcctgttccatccgcccagcgaccggcccttcatcccctatgagctgtacacgccggcaacctaccagctaactgaagagggcacctttaaggtggtggatgaagaggccatggagaaggcagaggtgtccaggacctgcctgctcacggttcgtgtcctgcaggcccatcgcctaccctctaaggacctagtgaccccctctgactgctacgtgactctctggctgcccacggcctgcagccacaggctccagacacgcacggtcaagaacagcagtagccctgtctggaaccagagctttcacttcaggatccacaggcagctcaagaatgtcatggaactgaaagtctttgaccaggacctggtgaccggagatgaccctgtgttgtcagtactgtttgatgcggggactctgcgggctggggagttccggcgcgagagcttctcactgagccctcagggtgaggggcgcctggaagttgaatttcgcctgcagagtctggctgaccgtggcgagtggctcgtcagcaatggcgttctggtggcccgggagctctcctgcttgcacgttcaactggaggagacaggagaccagaagtcctcagagcacagagttcagcttgtggttcctgggtcctgtgagggtccgcaggaggcctctgtgggcactggcaccttccgcttccactgcccagcctgctgggagcaggagctgagtattcgcctgcaggatgcccccgaggagcaactaaaggcgccactgagtgccctgccctctggtcaagtggtgaggcttgtcttccccacgtcccaggagcccctgatgagagtggagctgaaaaaagaagcaggactgagggagctggccgtgcgactgggcttcgggccctgtgcagaggagcaggccttcctgagcaggaggaagcaggtggtggccgcggccttgaggcaggccctgcagctggatggagacctgcaggaggatgagatcccagtggtagctattatggccactggtggtgggatccgggcaatgacttccctgtatgggcagctggctggcctgaaggagctgggcctcttggattgcgtctcctacatcaccggggcctcgggctccacctgggccttggccaacctttatgaggacccagagtggtctcagaaggacctggcagggcccactgagttgctgaagacccaggtgaccaagaacaagctgggtgtgctggcccccagccagctgcagcggtaccggcaggagctggccgagcgtgcccgcttgggctacccaagctgcttcaccaacctgtgggccctcatcaacgaggcgctgctgcatgatgagccccatgatcacaagctctcagatcaacgggaggccctgagtcatggccagaaccctctgcccatctactgtgccctcaacaccaaagggcagagcctgaccacttttgaatttggggagtggtgcgagttctctccctacgaggtcggcttccccaagtacggggccttcaatcccctctgagctctttggctccgagttctttatggggcagctgaagaagaggcttcctgagtcccgcatctgcttctttagaaggtatctggagcaacctgtatgcagccaacctccagggacagcttatactgggcctcagagcccagccaattctggggaccgctggggtcaaggaaccaggccaacctgggacaaggagcaggtcccccttctgaagatagaagaaccaccctcaacagccggcaggatagctgagtttttcaccgatcttctggacgtggcgtccactggcccaggccacacaaaattttcctgcgtgggcgttccattttccacaaagactactttcagcatcctcacttctccacatggaaagctaccactctggatgggctccccaaccagctgacaccctcggagccccacctgtgcctgctggatggtggctaactttaataaataccagctgcctgcccctcctgcagcccactcgggacgtggacctcatcctgtcattggactacaacctccacggagccttccagcagttgcagctcctgggccggttctgccaggagcaggggatcccgttcccacccatctcgcccagccccgaagagcagctccagcctcgggagtgccacaccttctccgaccccacctgccccggagcccctgcggtgctgcactttcctctggtcagcgactccttccgggagtactcggcccctggggtccggcggacacccgaggaggcggcagctggggaggtgaacctgtcttcatcggactctccctaccactacacgaaggtgacctacagccaggaggacgtggacaagctgctgcacctgacacattacaatgtctgcaacaaccaggagcagctgctggaggctctgcgccaggcagtgcagcggaggcggcagcgcaggccccactga

SEQ ID NO: 5863 - DNA, 432 bp, Homo sapiens
  SIMILAR (1)..(180): 881254mologous to Homo sapiens dJ846D11.1 (ecotropic viral integration site 5),accession number AL133332,Smith-Waterman Score= 276.
atgtatgcctcgtcctggttcctcacactgttcctgagcaccttcccactccccgtcgccacccgggtctttgacatcttcatgtatgaggggctggagatcgtgttccgagtgggcctcgccctgctgcaggtgaaccaggcagagctgatgcagctggacatggaggggatgtcccagggcaacagggctcgggcggcccccggtggtcagggcctgcatgttggtgaccagtacttccagagagtgatcccccaccagttcgacagctgcccggacaagctggtcctcaaagcctaccaggtcaagtacaaccccaagaagatgaagaggctggagaaggagtacgcagccatgaagagcaaggagatggaggagcagatcgagatcaaagccagctgtgagcgcctcccccgcctgacgccgcggtaa

SEQ ID NO: 5864 - DNA, 693 bp, Homo sapiens
  SIMILAR (463)..(570): 881254mologous to Homo sapiens dJ292B18.2 (novel protein similar to methylenetetrahydrofolate dehydrogenase, methenyltetra- hydrofolate cyclohydrolase, formyltetrahydrofolate synthetase, accession number AL133260,Smith -Waterman Score=156.
atgaagatgagagtgggctgtatgttaactgcagaaagcctctcagatggagggaatagtcaccagaggactctcagcttgtttgaagaaagcaaagaaagtcagtgtgaggccaggggagaggtcagtaaggcaggggtttggctggtgccacttgaaccaagttcagatgcactgcccaaaataacatccctcgtccggccagcagtgccgtggagaccgagttctgaagcaggcctttgtgaggtcagaggtggagttctgggaaaggccagcaaagcccccataaaggagccacagctggatcggggcatggggctcggggcccagcggcgtgggagctctgggaccgaggtgcagtcaggagagaccctgggggccagcggcagtccaagaggacttttggagccaaggcctgactgggtctcaaacaatggggcaggcagtttggggtttcagcagcttccaattgtggacaagataaggaccattgcccaggctgtctgtggagccaaagatatcgaactctgtcctgaggcacaagtcaaaatagatcgttacactcagcagtactactcctgtgtgaaccagaatttggagcagggacagaggtttttccactttgatgattcttattcttcatctctacagtacaggactgcatctggacagcacggactgagttatttctga

SEQ ID NO: 5865 - DNA, 376 bp, Homo sapiens
  SIMILAR (10)..(375): 641254mologous to Homo sapiens Similar to methylenetetrahydrofolate dehydrogenase (NADP+ dependent), methenyltetrahydrofolate cyclohydrolase, formyltetrahydrofolate synthetase,accession number BC001014,Smith-Waterman Score=426.
gcacgagtcaagaccgacacccgcgctgagattgacttggtgtgtgagcttgcaaagcgggctggtgcctttgatgcagtcccctgctatcactggtccgttggtggaaaaggatcggtggacttggctcgggctgtgagagaggctgcgagtaaaagaagccgattccagttcctgtatgatgttcaggttccaattgtggacaagataaggaccattgctcaggctgtctatggagccaaagatattgaactctctcctgaggcacaagccaaaatagatcgttacactcaacagggttttggaaatttgcccatctgcatggcaaagacccacctttctctatctcaccaacctgacaaaaaaggtgtgccaa

SEQ ID NO: 5866 - DNA, 474 bp, Homo sapiens
  SIMILAR (205)..(420): 571254mologous to Homo sapiens dJ292B18.2 (novel protein similar to methylenetetrahydrofolate dehydrogenase, methenyltetra- hydrofolate cyclohydrolase, formyltetrahydrofolate synthetase, accession number AL133260,Smith-Waterman Score=185.
atgagggtgcttacaaagaaggacgaaaaaggagcaaagagcagaagaagttcattccatgcaatggaatcccacccaagtgttcttaaagcacacttggcttcaagccatctgccatctttcattgctcatgtggatcatttccgatctgggttaaaaggtaatgcattcgtgggccctgaaatccagaaagtgaaaccccagcttccaattgtggacaagataaggaccattgcccaggctgtctatggagccaaagatatcgaactctgtcctgaggcacaagtcaaaatagatcgttacactcagcagaactatggtgtgcagcctggatgcaccaagccaagatctgcagtgagcactcaagtgggagaggagcctacactgactttcaaaacattgagaggaagcatagctgcaacccatgaggaaatacggaggagccacatgactgagcaggagcctacacagtga

SEQ ID NO: 5867 - DNA, 609 bp, Homo sapiens
  SIMILAR (439)..(546): 971254mologous to Homo sapiens dJ292B18.2 (novel protein similar to methylenetetrahydrofolate dehydrogenase, methenyltetra- hydrofolate cyclohydrolase, formyltetrahydrofolate synthetase, accession number AL133260,Smith-Waterman Score=174.
atggccaaggtcccggagctggaagacaccttcctgcaggcgcagcctgcgccccaactgtccccggggatccaggaagactgctgtgtgcagctcctgggcaagggcttgctagtctatccggaagaaacagtgtacctggcggccgaagggcagcccgggggcgagcagggcggcggggagaaaggcgaagacccggagctgccgggggcagtgaaatcagaaatgcacttaaacaatggtaacttttcctctgaagaagaggacgccgacaaccacgacagcaaaaccaaagcagcggatcaatacctgtctcagaagaaaaccatcacgcagattgtgaaggataaaaagaagcagacacagctcacgctgcagtgcccctggcagtgcccttctactttctgtctcaatgaagttgactcctggataccccatgttccaattgtggacaagataaggaccattgctcaggctgtctatggagccaaagatattgaactctctcctgatgcacaagccaaaatagatcgttacactcaacaggaggctcagccaccttcaccaaaaggaccgtatgcctcgagtgtccctcctactttggtgtag

SEQ ID NO: 5868 - DNA, 2756 bp, Homo sapiens
  SIMILAR (2309)..(2572): 591254mologous to Homo sapiens MDMCSF (EC 1.5.1.5; EC 3.5.4.9; EC 6.3.4.3),accession number J04031,Smith-Waterman Score= 267.
gcagccccggcggccgaacgcccgcggcgcgggactccatcgtcagagaagtcattcagaattcaaaagaagttctaagtttattgcaagaaaaaaaccctgccttcaagccggttcttgcaattatccaggcaggtgacgacaacttgatgcaggaaatcaaccagaatttggctgaggaggctggtctgaacatcactcacatttgcctccctccagatagcagtgaagccgagattatagatgaaatcttaaagatcaatgaagataccagagtacatggccttgcccttcagatctctgagaacttgtttagcaacaaagtcctcaatgccttgaaaccagaaaaagatgtggatggagtaacagacataaacctggggaagctggtgcgaggggatgcccatgaatgttttgtttcacctgttgccaaagctgtaattgaacttcttgaaaaatcaggtgtcaacctagatggaaagaagattttggtagtgggggcccatgggtctttggaagctgctctacaatgcctgttccagagaaaagggtccatgacaatgagcatccagtggaaaacacgccagcttcaaagcaagcttcacgaggctgacattgtggtcctaggctcacctaagccagaagagattccccttacttggatacaaccaggaactactgttctcaactgctcccatgacttcctgtcagggaaggttgggtgtggctctccaagaatacattttggtggactcattgaggaagatgatgtgattctccttgctgcagctctgcgaattcagaacatggtcagtagtggaaggagatggcttcgtgaacagcagcacaggcggtggagacttcactgcttgaaacttcagcctctctcccctgtgccaagtgacattgagatttcaagaggacaaactccaaaagctgtggatgtccttgccaaggagattggattgcttgcagatgaaattgaaatctatggcaaaagcaaagccaaagtacgtttgtccgtgctagaaaggttaaaggatcaagcagatggaaaatacgtcttagttgctgggatcacacccacccctcttggagaagggaagagcacagtcaccatcgggcttgtgcaggctctgaccgcacacctgaatgtcaactcctttgcctgcttgaggcagccttcccaaggaccgacgtttggagtgaaaggaggagccgcgggtggtggatatgcccaggtcatccccatggaggagttcaaccttcacttgactggagacatccacgccatcaccgctgccaataacttgctggctgccgccatcgacacgaggattcttcatgaaaacacgcaaacagataaggctctgtataatcggctggttcctttagtgaatggtgtcagagaattttcagaaattcagcttgctcggctaaaaaaactgggaataaataagactgatccgagcacactgacagaagaggaagtgagtaaatttgcccgtctcgacatcgacccatctaccatcacgtggcagagagtattggatacaaatgaccgatttctacgaaaaataaccatcgggcagggaaacacagagaagggccattaccggcaggcgcagtttgacatcgcagtggccagcgagatcatggcggtgctggccctgacggacagcctcgcagacatgaaggcacggctgggaaggatggtggtggccagtgacaaaagcgggcagcctgtgacagcagatgatttgggggtgacaggtgctttgacagttttgatgaaagatgcaataaaaccaaacctgatgcagaccctggaagggacacctgtgttcgtgcatgcgggcccttttgctaacattgctcacggcaactcttcagtgttggctgataaaattgccctgaaactggttggtgaagaaggatttgtagtgaccgaagctggctttggtgctgacatcggaatggagaaattcttcaacatcaagtgccgagcttccggcttggtgcccaacgtggttgtgttagtggcaacggtgcgagctctgaagatgcatggaggcgggccaagtgtaacggctggtgttcctcttaagaaagaatatacagaggagaacatccagctggtggcagacggctgctgtaacctccagaagcaaattcagatcactcagctctttggggttcccgttgtggtggctctgaatgtcttcaagaccgacacccgcgctgagattgacttggtgtgtgagcttgcaaagcgggcatggtgcctttgatgcagtcccctgcctatcactggtccgttggtggaaaaggatcggtggacttggctcgggctgtgagagaggctgcgagtaaaagaagccgattccagttcctgtatgatgttcaggttccaattgtggacaagataaggaccattgctcaggctgtctatggagccaaagatattgaactctctcctgaggcacaagccaaaatagatcgttacactcaacagggttttggaaatttgcccatctgcaatggcaaagaccgatctttctctgtctcaccaacctgacaaaaaaggtgtgccaagtgacttcatcttacctatcagtgatgtccgggccagcataggtgctgggttcatttaccctttggtcggaacgatgagcaccatgccaggactgcccacccggccctgcttttatgacatagatcttgataccgaaacagaacaagttaaaggcttgttc

SEQ ID NO: 5869 - DNA, 457 bp, Homo sapiens
  SIMILAR (176)..(403): 1001254mologous to Homo sapiens electron transfer flavoprotein beta subunit,accession number X71129,Smith-Waterman Score=372.
  misc_feature (1)...(457): n = a,t,c or g
tgcggctcaaggagaagaagctggtgaaggaggtcatcgccgtcagctgtgggcctgcacagtgccaggagacgattcgtaccgccctggccatgggtgcagaccgaggtatccacgtggaggtgcccccagcagaagcagaacgcttgggtcccctgcaggtggctcgggtcctgtggtgacagctgacctgaggctcaacgagccccgntacgccacgctgcccaacatcatgaaagccaagaagaagaagatcgaggtgatcaagcctggggacctgggtgtggacctgacctccaagctctctgtgatcagtgtggaggacccgccccagcgcacggccggcgtcaaggtggagaccactgaggacctggtggccaagctgaaggagattgggcggatttgagcccctcccagagatggcaataaaactgactctcaacaaaaaaaaaaaaaa

SEQ ID NO: 5870 - DNA, 1054 bp, Homo sapiens
  SIMILAR (85)..(264): 881254mologous to Homo sapiens electron transfer flavoprotein beta subunit,accession number X71129,Smith-Waterman Score=264.
  misc_feature (1)...(1054): n = a,t,c or g
atggagcagtgcgtagtcacagaaaccctcctgcacctgcaccaactctggggcttcctgccgggatctcatatcctgagccagatcccctgtggggaaatgagggagacgattcgtaccgccctggccatgggtgcagaccgaggtatccacgtggaggtgcccccagcagaagcagaacgcttgggtcccctgcaggtggctcgggtcctggccaagctggcagagaaggagaaggtggacctggtgctgctgggcaaacaggtagctgtggtcagccctccctgtgcccccttgctcatccctgctcgggaggagggtggtggagatacgggnaccccccccctcctccctccatacggcccggacccgccgaccatcacggtctcctcggaccgcgacgccgcgcctgcccgctttgtcaccgcgggcagtaacgtgaccttgcgctgcgccgccgccgtctgctggccggccccgcctgacatcacgtggagcctggcggacccggccgaggccgcggtgcccgcggggtcgcgcctcctgctgcccgcggtcggaccgggccacgcaggcacctacgcctgcctggagggagaacctgtgtaccggccgccgccgccgatcgctgttcaaccttacagtggcgggcggccctggcaagagagtccatggagtggtcgagaggattcgatgtgttcctatgagcacagcccgtacctgcgaagaacgtcatgagcactgccacccagcccaggatgtaggaccaggaaaagcgccagtccccaaagcggcggcccaggaagctgacggtgactccagtgtagatggccaaggccaacacgacgaaaagggctggggagagagggcgggaggatgcagccccattaccagtgctcaaggttacccacaaacggcgccagagtgcccatatatgacagtccaggtcctagacatcacccaccagcccttttatgtggatctccaccaccagatcccagatccctggatcctcattctcagggtctttgagacccatggtgccagtcactag

SEQ ID NO: 5871 - DNA, 930 bp, Homo sapiens
  SIMILAR (88)..(870): 611254mologous to Homo sapiens electron transfer flavoprotein beta subunit,accession number X71129,Smith-Waterman Score=642.
  misc_feature (1)...(930): n = a,t,c or g
ttggagatcgatatcactagtccangtggtggaattcgagccgctgagggtgcgggctgaccctgtttggtggctgcggcgggatagatggcggacgtgcgcgtgctcgtagctgtcaagagggtcatcgactacgccgtgaagatccgagtgaagcctgacaggaccggtgtggtcacggatggtgtgaagcactccatgaaccccttctgtgagatcgcggtggaggaggctgtgcggctcaaggagaagaagctggtgaaggaggtcatcgccgttcagctgtgggcctgcacagtgccaggagacgatttcgtaccgccctggccagtgggtgcaagaccgaggtatccacgtggaaggtgcccccagcagaagcagaacgctttgggtccccttgcaggtggctcgggtcctgggccaagcttggcagagaaggagaaggttggacctggtgctgctgggcaaacaggcccatcgcatgcactgactgtaaccagcacagggcagatgacagctggatttcttgactggccacagggcacattttgcctcccaggtgacgctggagggggacaagttgaaagtggagcgggagatcgatgggggcctggagaccctgcgcctgaagctgccagctgtggtgacagctgacctgaggctcaacgagccccggtacgcccacgctgccccaacatcatgaaagccaagaagaagaagatcgaggtgatcaagcctggggacctgggtgtggacctgacctccaagctctctgtgatcagtgtggaggacccgccccagcgcacggccggcgtcaaggtggagaccactgaggacctggtggccaagctgaaggagattgggcggatttgagcccctcccagagatggcaataaaactgactctcaacatcaaaaaaaaaaaaaaaaa

SEQ ID NO: 5872 - DNA, 777 bp, Homo sapiens
  SIMILAR (325)..(771): 921254mologous to Mus musculus ubiquitin-protein ligase E3- alpha,accession number AF061555,Smith-Waterman Score=738.
atgtcagcaccgcccctagtgtgcacacacctggccggggccgcggcagcgcctgggcttggccacagctttgctccaaaatcggagcgggcattgggagtgcggagaggctcagaacacgcacttctgagctgggcagttgcagctgtgcccgggagcacggggcttctgccctgcaaacttggaaggggtggggttccctcctgttcccaacccaagggctacatggagcacgttgccccagccacgcctccactgctgcagcgacatctttgcaggagctgctctagacagaataataccacctacctcataggattattcaccccagcagtcagtgactactctagaattgctttgggtcctaaacggggtccatctgttactgaaaaggaggtgctgacgtgcatcctttgccaagaagaacaggaggtgaaaatagaaaataatgccatggtattatcggcctgtgtccagaaatctactgccttaacccagcacaggggaaaacccatagaactctcaggagaagccctagacccacttttcatggatccagacttggcatatggaacttatacaggaagctgtggtcatgtaatgcacgcagtgtgctggcagaagtattttgaagctgtacagctgagctctcagcagcgcattcatgttgacctttttgacttggaaagtggagaatatctttgccctctttgcaaatctctgtgcaatactgtgatccccattattcctttgcaacctcaaaagataaacagatag

SEQ ID NO: 5873 - DNA, 1557 bp, Homo sapiens
  SIMILAR (619)..(1365): 961254mologous to Homo sapiens HRIHFB2003,accession number AB015329,Smith-Waterman Score=1203.
gcgcccgcccgccggggtctcggcgatcgctgctcctcctcctccttctcctcctcttttttctcctccgcctcctccccccgccgcctcgccaccgccgcggctagggctggaggcgccgctgtcattcctgtgccggaggaaccggcgctgccggtgcctgggggtcggggcgcgggcgaagccgggccgcggaggacacaacaggtagagccgggggtgcccggccgcgcgccccccgcgcatcatgcagctctttgtcacctctctcgcccccaggccaaaatcctgagcatgatggaagacaataagcagctcgcgctccgcatcgatggggcggtccagtcggccagccaggaggtgaccaacctgcgagccgaactcacggccaccaaccggagactggcggaactgagcggcggcggcggccccggcccgggcccgggagccgcggccagcgcctcggcggcgggggactcggcggcgacgaacatggagaacccccagcttggagcgcaagtgctcctgcgggaagaagtgtcgcggctccaggaggaagttcaccttctccggcagatgaaggagatgttggcgaaggacctggaggagtcgcagggcggcaagtcctctgaggtcctctcggccaccgagctcagggtccagctggcccagaaggagcaggagctagccagagccaaagaagccttgcaggccatgaaagctgatcggaagcgcttaaagggcgagaagacagacctggtgagccagatgcagcagctgtatgccacactggagagccgcgaggagcagctccgagacttcatccgcaactatgagcagcaccgcaaggagagcgaggatgcggtcaaagcgctggccaaggagaaggacctgctggagcgtgagaagtgggagctgcggcgccaagccaaggaggccacagaccacgccacggcactgcgctcccagctggacctcaaggacaaccggatgaaggagctggaggccgagctggccatggccaaacagtccttagctacgctgaccaaggacgtccccaagcggcattccctcgccatgccgggcgagacggtgctcaatggcaaccaggagtgggtggtgcaggcggacctcccgctgaccgcagccatccggcagagtcaacagactctctaccactcacacccccctcaccctgcggaccggcaagcggtcagggtgagcccctgccactcccggcagccctctgtcatctccgacgcatctgccgccgaaggcgaccggtcgtccacaccgagcgacatcaactcccctcgacaccggacacactccctctgcaacgtaaggccagcagcagcggggcctgggcccctgggccctgcccagaaactgcaggggcgggggtggcggggtgaagccatactcgctgtttcctctcgtccacccagggagcactctggcgaatgcatttcctgttctgttctttccttttgcaagaagcgatggatgtggggagaaaaaggaatgaggcccgtttgctccttgtgtccgggaggg

SEQ ID NO: 5874 - DNA, 762 bp, Homo sapiens
  SIMILAR (678)..(625): 441254mologous to Nicotiana tabacum Pistil extensin like protein, partial CDS only,accession number Z14014,Smith-Waterman Score=56.
atgatagcaagtccctatgaagtggacccattttctgtcttggttcttaacatcagcctactggggtgtgagattgggactatttggggaacacgcaaaagggggaaccctgaaacagaacccacagtactgccaaattctcatagctgtgaatcccatggagagacagctgtggatgacagacttctctggaatccttctcccaacagtttgcaggccaaaatcctgagcatgatggaagacaataagcagctcgcgctccgcatcgatggggcggtccagtcggccagccaggaggtgaccaacctgcgagccgaactcacggccaccaaccggagactggcggaactgagcggcggcggcggccccggcccgggcccgggagccgcggccagcgcctcggcggcgggggactcggcggcgacgaacatggagaacccccagcttggagcgcaagctgctacacagatctgtgccgcagatcccagcagaacctttgtgtgccatcaactcatcctttctgtgccctcaaataacttaaattctgaaacagacaagctggaaacagaggagtcctctggaacttgctggctggccacagagcagataggcagctccaaggaggggacattttcctggagcttctacttcccaggggagctgccaagtgaaaagacagttgctggaatggaggccaaatccttcatgtgctggtccaccaggactggagcagggccacccaaggcatttgttatctgctaa

SEQ ID NO: 5875 - DNA, 640 bp, Homo sapiens
  SIMILAR (350)..(496): 971254mologous to Homo sapiens 165kD protein,accession number X69089,Smith-Waterman Score=269.
aaatgccagattattgtcactgtttcatccgcacatttttgccaacgtgccgttatgcaccatagcaggaccaagagaagatgacctgtaattcaggatctaatgacgaaaaattgtagactcagtgttttatcaaggattctatgttttgaagctttttaattcatacataattttatatttcttgtcaccaacccgccagagtaagaaatattctagtactttgaacatgagaattaaacagtggtcaaatcaaggggatagaattggagcttggaggagctgtaaacaggctttgcagtgaccccagcctttaaatgacaggcgtgtgccttttctctccctgccccaagatgctgacccgctggtcacaggggcccccggtgcacccatggacttgcagtgccacgacgccaaccgggactacgtcatcgtgacctggaagccgcccaacaccaccactgagagccccgtcatgggctattttgtggaccggttcgtggtgcacggcttaaccacgggagagcagtacatcttccgagtcaaggcggtcaatgctgtggggatgagtgaaaattcccaggaatcagacgtcataaaagtgcaggccgcactcagacccatcgaggacaccagatga

SEQ ID NO: 5876 - DNA, 540 bp, Homo sapiens
  SIMILAR (421)..(540): 801254mologous to Plasmodium lophurae histidine-rich protein,accession number X01469,Smith-Waterman Score=252.
ctagtctttttgtctgcatggcattgtgggggatgtggcgatgagggccaggatcgcagaagtcagagtacccgtggctggagcttccattttaaatgaagtgttcttgcttatggcttgatggtatcctttcagattttgcatctggctgtactccagatgtttatatagaaacttcacagtagacatgatggtggcgtaggtttgcaggaaggatcctttcctacttacagagtgacccaatgtggccgatcccttccgtgaggcaggaagccccagctcacaggccagcagctgagataagaagtcatgtcctttttcaatgacatcagcagacaaagagaatattatggatgtgtttagtggaagaagcagcagaatcagctggggtccccagttggctttgctttgaccctcttccaccaccaccaccaccatcaccaccaccaccacaaccaccactgccaccatcaccaccaccaccacaaccaccaccatcactaccaccaccaccatcaccaccagtaccatcaccaccat

SEQ ID NO: 5877 - DNA, 283 bp, Homo sapiens
  SIMILAR (131)..(3): 341254mologous to Bradyrhizobium japonicum ID664,accession number AF322013,Smith-Waterman Score=59.
ctgggtgaaactgcaagtcgagagcgtgggaaaccagcaagttgagagaggatccagaagtaaccccttctaaaacgggaaagatgccttccgaaagcacttggccctaaagagaaaacactaggaggatgggaaccagggacagagaagctacttgctctgcagctgtttgggccagtatgttccctaatcttgatggccatcctgggcttattttcctgagagtctctaagtgactcactgcatcacgtaaaactaagaaaaaggatgtcctgaaaaaaaa

SEQ ID NO: 5878 - DNA, 597 bp, Homo sapiens
  SIMILAR (124)..(594): 701254mologous to Homo sapiens NAG13,accession number AF194537,Smith-Waterman Score=567.
atggccatcaagattagggaacatactggcccaaacagctgcagagcaagtagcttctctgtccctggttcccatcctcctagtgttttctctttagggccaagtgctgtagcagcagcaggagacctggtggaggaccttcagtctagagaagaccagtaccaggccatccggtctatagatgcagaaaaagtattcaacaaaatccagcatccctttatgattaaaactctcagcaaaattggcatacaagggacataccttaatgtaatgaaagccatctatggcaaacccacagccaacataatactgaatggagaaaagttgaaagcattccctctgggcactggaacaagacaaggatgcccactctcaccactcctcttcaacatagtactggaagtcctagccagagcaatcaaacaagagaaagaaataaagggcatccaaatcagcaaagaggaagtcaaactgtcactgtttgctgaggatgtgatcgtttaccttgaaaaccctaaagactcctccagaaagcttctagaactgataaaagcattcggcaaagttttcagatacaaaattaatgtacaaaaatag

SEQ ID NO: 5879 - DNA, 597 bp, Homo sapiens
  SIMILAR (373)..(534): 511254mologous to Saccharomyces cerevisiae gene required for phosphoylation of oligosaccharides/ has high homology with YJR061w,accession number D83006,Smith-Waterman Score=129.
cttacgtatgggtgcacacaagataactaaccttatttcggattccagaactttaactttaaatatatcacacccatttgtattccacatacctgctgactgccattattttacctaaacatatgactctgcctcatcataaggactcttattgcaagatacctctaagatgaagcgcttcaatcaaacgctttcaaccaacaaaattggttatacaagtccgcaaccctcagtcataccacctacttattaaagaacaaagacagaaacagtcttctgaaacagtctttaatatttatgaaaggagacatggatgaatgtactcatgtagcaaatttctcaggtactaatttttatatgaaattgagaatatttgctgatgtcctgagcaatagagcaagaatctgtcaaaaaacaaaaaacaaacaaacaaaaaaaaacgaggaggaggagaggaaaaaggtgaaggaggagaaggaggagatgaagaaagaagaagaaggaagaataaagaaggaagaagtggaacacaaagtggtcgactaccaaaaactcaggcttgacatgcctgcatttcgactctatgagaccccttag

SEQ ID NO: 5880 - DNA, 939 bp, Homo sapiens
  SIMILAR (88)..(459): 851254mologous to Homo sapiens golgin-like protein,accession number AF266285,Smith-Waterman Score=520.
  misc_feature (1)...(939): n = a,t,c or g
atgtgtgatctntacatcaggcgcggactcatgnacgtagttctagtgctcctggtcatgctagtgcattttggctgccatggtgcacaggagaggctccaggagcaggacgagaggctccgagagcaggaggagtggagggtgcgggagcaggagagactgtgtgagcaaaatgagaggcttcgggagcagcagaagacgctacgggagcagggtgagaggctgcgaaagcaggagcagaggctatgcaagcaggaggagaggctgcgaaaggaggaggagaggctgcgaaagcaggaaaagaggctgtgggaccaggaggagaggctgtgggaccaggaggagaggctgtgggagaaggaggagaggctacaaaagcaggaggagaggctcatgctctcccagaaccacaagctcgacaagcagctggccgagccacagtgcagcttcgaggatctgacccttcacctcactatcttctactcatccttcaagtctcagcttaaatgtcatttcctcagagaagccttcctggatctcaccaccatcattgccacttgggctagtccgagccaccgcttcgctagcctgggttcctgtgaggaccttctcaccagcctgggttcctgtgaggaccttctcaccggactcgctgctcccgcctttgctctcaaaccatccatttacccaagacgatggtttagcccctggaggctgttgcctggagcccaggagtcagtctgggtgcaggcctgggtagaggtccaggagcagattctaccccccagctcatacctcctgtgcaccatggcagccaaagggtggtcctctacactcaagcctggatgtcatgcttcttcagggcgttttaatatccctgctccagtccttgccacactcgccctggggttgtcgtctctcagggaagtactagcctga

SEQ ID NO: 5881 - DNA, 2043 bp, Homo sapiens
  SIMILAR (1884)..(2042): 451254mologous to Homo sapiens Human secreted protein, SEQ ID NO: 8148,accession number G04067,Smith-Waterman Score=136.
ataatagaagaatttgttagtggcctggagtcttacattgaggatgaagacagtttcaggaactgccttttgtcttgtgagcgtctgcaggatgaggaagccagcaagaacagtgatgaaatcaacatacctcgactcattgtcagtcaactaaaatggcttgacagagttgtggatggcaaggacctcaccaccaagatcatgcagctgatcagtattgctccagagaacctgcagcatgacatcatcaccagcctacctgagatcctaggggattcccagcacgctgatgtggggaaagaactcagttcctcaggaaatcaagaaagcagcggtcagagctgtattattctcctctttgatgtaataaagtcagctattagatatgagaaaaccatttcagaagcctggattaaggcaattgaaaacactgcctcagtatctgaacacaaggtgtttgacctggtgatgcttttcatcatctatagcaccaatactcagacaaagaagtacattgacagggtgctaagaaataagattcgatcaggctgcattcaagaacagctgctccagagtacattctctgttcattacttagttcttaaggatatgtgttcatccattctgtcgctggctcagagtttgcttcactctctagaccagagtataatttcatttggcagtctcctatacaaatatgcatttaagttttttgacacgtactgccagcaggaagtggttggtgccttagtgacccatatctgcagtgggaatgaagctgaagttgatactgccttagatgtccttctagagttggtagtgttaaacccatctgctatgatgatgaatgctgtctttgtaaagggcattttagattatctggataacatatcccctcagcaaatacgaaaactcttctatgttctcagcacactggcatttagcaaacagaatgaagccagcagccacatccaggatgacatgcacttggtgataagaaagcagctctctagcaccgtattcaagtacaagctcattgggattattggtgctgtgaccatggctggcatcatggcggcagacagaagtgaatcacctagtttgacccaagagagagccaacctgagcgatgagcagtgcacacaggtgacctccttgttgcagttggttcattcctgcagtgagcagtctcctcaggcctctgcactttactatgatgaatttgccaacctgatccaacatgaaaagctggatccaaaagccctggaatgggttgggcataccatctgtaatgatttccaggatgccttcgtagtggactcctgtgttgttccggaaggtgactttccatttcctgtgaaagcactgtacggactggaagaatacgacactcaggatgggattgccataaacctcctgccgctgctgttttctcaggactttgcaaaagatgggggtccggtgacctcacaggaatcaggccaaaaattggtgtctccgctgtgcctggctccgtatttccggttactgagactttgtgtggagagacagcataacggaaacttggaggagattgatggtctactagattgtcctatattcctaactgacctggagcctggagagaagttggagtccatgtctgctaaagagcgttcattcatgtgttctctcatatttcttactctcaactggttccgagagaatgaccttctcaccttcactgtggaactactgttcgtcctggcacaggcatatgcctactgttttgattcaattgtaaatgccttctgccaggaaacatcacctgagatgaaggggaaggtgctcactcggttaaagcacattgtagaattgcaaataatcctggaaaagtacttggcagatgcatataccaatggaacagaagagagcccagaaataagtccatacacctacaatgaactcattctcagcaaaggtgccaagaatatacattggggaaagacactctcttcaataaatggtgttgggaaaactggatatccatatgcagaagaatga

SEQ ID NO: 5882 - DNA, 2301 bp, Homo sapiens
  SIMILAR (1)..(2298): 901254mologous to Homo sapiens ARF GTPase-activating protein GIT1,accession number AF124490,Smith-Waterman Score=3501.
atgtcccgaaaggggccgcgagcggaggtgtgtgcggactgcagcgccccggaccctggctgggcatccatcagcaggggtgtgctggtgtgtgacgagtgctgcagcgtgcaccggagcctgggacgccacatctccattgtcaagcaccttcgccacagcgcctggcctcccacgctgctgcagatggtgcacacgcttgccagcaacggggccaactccatctgggagcactccctgctggaccccgcacaagtgcagagcggccggcgtaaagcaaacccccaagacaaagtccaccccatcaagtcagagttcatcagggccaagtaccagatgctggcatttgtgcacaagctttcctgccgggacgaatgatggagtcaccgccaaagaccttcagcaaagcaaactaacactcgagcgtgcggaacaggcaaaccctggaagacatgtctgcgcctgctctcccctgggtgccccaggccaacttcttccacccagagaagggcaccacacctctgcacgtggctgccaaggcaggacagacactgcaggccgagctgtcttgtagtgtatggggctgaccctggctcccctgatgttaatggccgcacacccattgactatgcccaggcaggcggggcaccatgagctggcggaaaggctggttgagtgcccaatatgagcctcactgagcggctggccttctacctctgtggacgcaagccggatcacaagaatgggcattacatcatcccacagatggctgacagccttgacttatccgaattggccaaagctgctaagaagaagctgcaggcgctcagcaaccggctttttgaggaactcgccatggacgtgtatgacgaggtggatcgaagagaaaatgatgcagtgtggctggctacccaaaaccacagcactctggtgacagagcgcagtgctgtgcccttcctgcctgttaacccggaatactcagccacgcggaatcaggggcgacaaaagctggcccgctttaatgcccgagagtttgccaccttgatcatcgacattctcagtgaggccaagcggagacagcagggcaagagcctgagcagccccacagacaacctcgagctgtctctgcggagccagagtgacctcgacgaccaacacgactacgacagcgtggcctctgacgaggacacagaccaggagcccctgcgcagcaccggcgccactcggagcaaccgggcccggagcatggactcctcggacttgtctgacggggctgtgacgctgcaggagtacctggagctgaagaaggccctggctacatcggaggcaaaggtgcagcagctcatgaaggtcaacagtagcctgagcgacgagctccggaggctgcagcgagagatccacaagctgcaggcggagaacctgcagctccggcagcctccagggccggtgcccacacctccactccccagtgaacgggcggaacacacacccatggcgccaggcgggagcacacaccgcagggatcgccaggccttttccatgtatgaacctggctctgccctgaagccctttgggggcccccctggggacgagctcactacgcggctgcagcctttccacagcactgagctagaggacgacgccatctattcagtgcacgtccctgctggcctttaccggatccggaaaggggtgtctgcctcagctgtgcccttcactccctcctccccgctgctgtcctgctcccaggagggaagccgccacacgagcaagctttcccgccacggcagtggagccgacagtgactatgagaacacgcaaagtggggacccactgctggggctggaagggaagaggtttctagagctgggcaaagaggaagacttccacccagagctggaaagcctggatggagacctagatcctgggcttcccagcacagaggatgtcatcttgaagacagagcaggtcaccaagaacattcaggaactgttgcgggcagcccaggagttcaagcatgacagcttcgtgccctgctcagagaagatccatttggctgtgaccgagatggcctccctcttcccaaagaggccagccctggagccagtgcggagctcactgcggctgctcaacgccagcgcctaccggctgcagagtgagtgccggaagacagtgcccccagagcccggcgccccagtggacttccagctgctgactcagcaggtgatccagtgcgcctatgacatcgccaaggctgccaagcagctggtcaccatcaccacccgagagaagaagcagtga

SEQ ID NO: 5883 - DNA, 1341 bp, Homo sapiens
  SIMILAR (253)..(429): 911254mologous to Homo sapiens ARF GTPase-activating protein GIT1,accession number AF124490,Smith-Waterman Score=273.
  misc_feature (1)...(1341): n = a,t,c or g
gtgtttgacctggtgatgcttttcatcatctatagcaccaatactcagacaaagaagtacattgacagggtgctaagaaataagattcgatcaggctgcattcaagaacagctgctccagagtacattctctgttcattacttaggcattttagattatctggataacatatcccctcagcaaatacgaaaactcttctatgttctcagcacactggcatttagcaaacagaatgaagccagcagccacatccagcaactacactcgagcgtgcggacaggcaacctggagacatgtctgcgcctgctctccctgggtgcccaggccaacttcttccacccagagaagggcaccacacctctgcacgtggctgccaaggcaggacagacactgcaggccgagctgcttgtagtcgccgcaaagaatccggaaaaacgtgaatataccaccgaaaacggatctccggctgaaacccctacgtgtagcgcaggaaaacgaggaacaccacgaaccaagatgtcggacatctccagcgaggacctgcgtcgtgaaattcaggcggttttgaaggacgccgatttggcgaccatttcggcaaagagggtgcgcgagcaggtggagggaaagctgaactgctcgttgctgagccgcaagaaggagttcgacaagatcgtgatggaggtgatcaacgagcagcaggacgaggaggacgaagacgatgacgagggcaaggatcccgatgccgatcccgacgatgagagcgagcccagcgaggaggaggaccccagcagcagcgaggaggaggccgccaagaagaagaagcagacccccaagaagaggccacagcccacgaagcacaaggcgcccaagaagaagcgcaagaccctaaatgccgacgattccggcaccgctgatgaacgactgccnnnnnnnnnnnnnnnnnnnnnnnnnnnnnnnnnnnnnnnnggtgtagagtacaatagcacacttcacacttgtcctgaagtggttggtgccttagtgacccatatctgcagtgggaatgaagctgaagttgatactgccttagatgtccttctagagttggtagtgttaaacccatctgctatgatgatgaatgctgtctttgtaaagctcagcaaccggctttttgaggaactcgccatggacgtgtatgacgaggtggatcgaagagaaaatgatgcagccggattccagcccaaactctgggtctggatgagtggcactggccttgttccatttgtctgtccccagccggccacgcccagccttgccctggcccggcctagctctgcgtgcccaaagaccacccctgtctga

SEQ ID NO: 5884 - DNA, 531 bp, Homo sapiens
  SIMILAR (329)..(364): 501254mologous to Lumbricus terrestris ATP synthase subunit 8,accession number U24570,Smith-Waterman Score=39.
ttactctggtgcccttgaggaggaggaactagagacttcagtagcaacaggcaaatggctggccaggtaattgggaatggggtggaatgacggcttttgcggattacaaggaggtacatctgcagagggaattaaggacaacctgggtgtcctggaagcccatttgagttggaaacggtaatggtggattttccagctctgatactttcttagcgtcgtgcattccaccccacacctgttacttctgctagaagcaccctccactcctttggacaactgcgtcttccccattccatgtagtctggtgggacccttctgattagtatgatgcaggccaatcagagtctttccttggaattttctaaatggacctccttccccttggattaggaactgtgaaggtgtgatctcagagctgtcagtgaacacaccagattgctcagtagtatctgatccccacccccaaacctcagtcacttgacaagtttccacaatcattgtgatagaagaaggagttcctgtgtagggcat

SEQ ID NO: 5885 - DNA, 1738 bp, Homo sapiens
  SIMILAR (70)..(1638): 1001254mologous to Homo sapiens serine/threonine protein kinase,accession number X66360,Smith-Waterman Score=2720.
gaattcctcgcctcgggacccgcggtccccgctcttgctggatttttcaagccacattcaattgataggatgaaaaaatttaagagaaggctatccctcacactccgaggaagtcagactattgatgaatcattgtctgaattggctgaacaaatgactattgaagaaaacagcagcaaggataatgagcctattgtgaagaatggcaggcctccaacgtctcacagtatgcattccttcctccaccagtacacaggatctttcaagaagcccccattgcggagaccacacagtgttattggagggagccttggctccttcatggcaatgcccagaaatggaagcagattagatattgttcatgaaaatctaaaaatgggatcagatggtgagagtgaccaagcttctgggacatcatctgatgaagtccagtcacctacaggtgtttgtctcagaaatcgtatacatagacggatctcaatggaggatttaaataagcggttatcactgcctgcagacatcagaatacctgatggatatcttgaaaagttgcagataaacagtccaccatttgaccaaccaatgagtcgaaggtctcgtagagcttccttatcagaaattggctttggaaaaatggaaacctacatcaaattggaaaagcttggagagggtacatatgcaacagtatataaaggaagaagtaaattgacagagaatttggtggcattaaaagagatccgattggaacatgaagaaggtgcaccctgcacagctataagagaagtttcactattaaaggatttaaaacatgcaaatatagtaaccttacatgacattgttcacacagataaatccttgactttggtgtttgagtatctggataaagacctgaaacagtacatggatgactgtggaaacatcatgagtatgcacaacgtaaagctgtttctgtaccaaattctacgtggtttggcatattgccatagaagaaaggtattgcatcgagacttgaaaccacagaacctcctcattaatgagaaaggagaattaaagctagcagattttggactagcccgagccaagtcagttcccacaaagacctactcaaatgaagttgtcacactatggtaccggccacctgatgtgcttcttggttcctcggagtacttaacacagattgacatgtggggtgttggttgcattttctttgaaatggcttctggaagacctttatttccaggatcaaccgtggaagatgaactgcacttaattttccgactgctaggaactccatctcaggaaacttggccaggtatttcttcaaatgaggagttcaagaactacaactttccaaaatataaaccagagcctctaattaaccacgcacccaggttagactctgaaggaattgagttgataagaaaatttcttcagtatgaatctaagaaaagggtttcagctgaagaggccatgaaacatgtgtactttcgaagtctgggaccaagaatacatgctttaccagaaagtgtatcaatattcagtttgaaagagattcagttgcaaaaggacccgggttttcgaaattcttcttatccagagacaggacatgggaagaacagaagacagagcatgctcttttaagtctgataacatggtttcaagcccagcccccagcctttcttaccaatcaaggactcagaactgaaggcaattatttcttttggtggacttggaatct

SEQ ID NO: 5886 - DNA, 1101 bp, Homo sapiens
  SIMILAR (1)..(258): 931254mologous to Homo sapiens serine/threonine protein kinase,accession number X66360,Smith-Waterman Score=408.
atgggatcagatggtgagagtgaccaagcttctgggacatcatctgatgaagtccagtcacctacaggtgtttgtctcagaaatcgtatacatagacggatctcaatggaggatttaaataagcggttatcactgcctgcagacatcagaatacctgatggatatcttgaaaagttgcagataaacagtccaccatttgaccaaccaatgagtcgaaggtctcgtagagcttccttagggccgctgtgtttctcggaatgcgcgcgggatgcccggttgccacgagaccgtcgccaggcaaccgcgtgtacacatactccaggcgggccggggcgcgtcaatatggcggcgcagggctccccctcgagctctccgtcagacgactctaccacctcggggtctctgccagaactgccgccgacctccaccgcgacttcgaggtcgcccccagagtcgaaggggagctcccggagctcgctgcttcagtggacctgccccgaggactcattgcccctagccgtgttttatgggccgctggacgcgaaaaacccgctcctggcctcttgtgagaaggagatccaggagttgttaggctttatgaggaaaaagaaggctttagccaccacggaggaagagaagcacgaattccgccggcgttgttcttgggggaatgctttccaacttttgctcattcagtatgatattggctgtgactttgtcattgatggctcttattatcttgaggaatacaaactggcccttttacaatgctatggaagatatcttcagcagttcaataccaattttgatgagaataaagtggatgtaactcaattcaaagctacctttttcccaaaaggctttaaagataaaactgctggacttacactaagaaagtatcagagctggaaaatccaccattaccgtttccaactcaaatgggcttccaggacacccaggttgtccttaattccctctgcagatgtacctccttgtaatccgcaaaagccgtcattccaccccattcccaattacctggccagccatttgcctgttgctactgaagtctctagttcctcctcctcaagggcaccagagtaa

SEQ ID NO: 5887 - DNA, 546 bp, Homo sapiens
  SIMILAR (161)..(544): 451254mologous to Human endogenous retrovirus K gag protein,accession number Y10392,Smith-Waterman Score=334.
aactcttcccaggttcttcagttttaatatttgtgggtaaatgaggctccatttcggctgctcacaatgccccagccctaccctcaaattaatataactgcagaccaactttgggggtcagtggctgtgctggtttagatgcacaagtggtttgccaggattgtgcatttgagcttgggaaaaaaccacttcaggtggagaacaatacccttcctctagtgctataaaacagggacctaaagaaccatatgcagattttatagctcggttacaggagtctcttaaaaaggtgattgcagatttggctgctcaggatatagtgttgtggttattagcttttgacaatgctaatcctgagtgccaggctgctctgcgacctatcagagggaaagcacatttagttgattataccaaggtctgtgatggtatcagagataaactgcataaggctactctgctagcccaggcaatggcaggactgagaatgggtaaaggaaatactccgtttcctggagcttgttttaactgtgggaagcatggtcatac

SEQ ID NO: 5888 - DNA, 648 bp, Homo sapiens; identical to SEQ ID NO: 3931
  SIMILAR (154)..(612): 451254mologous to Human endogenous retrovirus K gag protein,accession number Y10392,Smith-Waterman Score=384.

SEQ ID NO: 5889 - DNA, 378 bp, Homo sapiens
  SIMILAR (103)..(258): 331254mologous to Borrelia hermsii BdrA3-,accession number AF143475,Smith-Waterman Score=71.
ttactcattgtgactggttgttccactttcctcaggttttcttttatcatcagtgacagcttcttgatctgtccccaggtgggtggcagagtttgactggtattgctcatgacagttgaagtcctcctcagcatcagtatcaacctggccagtgtcctccagaaaagaaagatctggagggtcattttcttcaaaataataatgagggggtgcagaatggtagggatgaacctctccctcctttgccgctttagctttagctggtaaataaacatgctttgtaacctcttctgttacttcgttatactctccttcctcctccacatcagtgtgaaaaagttccaaggtggaatgaaccagaccccacacttttcccat

SEQ ID NO: 5890 - DNA, 507 bp, Homo sapiens
  SIMILAR (384)..(503): 421254mologous to Human endogenous retrovirus K gag protein,accession number Y10392,Smith-Waterman Score=92.
  misc_feature (1)...(507): n = a,t,c or g
aagctgtnnnttatgacgtatgtacgactggcgcagagcgacgaggtgacaggagaatccgtaccctactgcaccccctcattattattgtgaagaaaaagagtggcctgaccctccagatctttcttttccagaggacagtgggcaaaaattagttgccccagtgactgttcaagcagcacctcgagcgactgctcttagttctattcagtcaggaattcagcaagctagatgagaaggtgattaagaggcttggcagttccctgttagactacactgcccagaccaacagggaaatattgtagctacatttgagcctttttgttttaaattactcaaagaatttaaacaagctattaatcagtatggaccaggttctcctttttgtaatgggactattaaagaacattgctgtttccagtcagatgattcctactgactgcgacgctcttactcaagcttgtctaactcctgcttagntcttacaatttaaaacttggtgggcag

SEQ ID NO: 5891 - DNA, 936 bp, Homo sapiens; identical to SEQ ID NO: 5307
  SIMILAR (328)..(540): 401254mologous to Homo sapiens Gag-Pro-Pol-Env protein,accession number AF164611,Smith-Waterman Score=152.

SEQ ID NO: 5892 - DNA, 843 bp, Homo sapiens
  SIMILAR (247)..(840): 291254mologous to Cucumis sativus expressed in cucumber hypocotyls,accession number AB029147,Smith-Waterman Score=145.
atgggaaaagtgtggggtctggttcattccaccttggaactttttcacactgatgtggaggaggaaggagagtataacgaagtaacagaagaggttacaaagcatgtttatttaccagctaaagctaaagcggcaaaggagggagaggttcatccctaccattctgcaccccctcattattattttgaagaaaatgaccctccagatctttcttttctggaggacactgggacccccagacttgctgctgctgccaccactaaggccaatgccaatacaaccactgctgctgtcaccctcgatgcaccggcactccctacaaggcccctactagctggccacagccacagccctgccacagggagtgtaacccctgatagcgcccccaacccgtccccacctcgaacactgcagcacccaatagagaccccaacccgcccccacactgggagaaataacgcccgtaacagtgccccaagccccactccatccccgggcagtgcagccctggatagcaccccaacccgctcctggctgcaggcagtgatgcccggaatagcgcccccaagccgctccccaccgtgggcagtgcagttgagaatactcacctacctgggctgcctttctaccactccagcagccgtgcagtccctgtcacagccaccagcttcagtgaggcaagccagggtgccacaggctccggcctccagcttgtgtcaggagaaaccaccttcccctccccctgtagcaccgcacggagctgctgcagctgctcgtccgccatcttaccactccagctgcgcttcagtcgctgtcgtcgcagccaatgttctaattggatga

SEQ ID NO: 5893 - DNA, 648 bp, Homo sapiens
  SIMILAR (319)..(507): 301254mologous to Plasmodium falciparum merozoite surface protein 2,accession number AF217010,Smith-Waterman Score=85.
atgggacaagtgtgggctgtggttcgttctaccttggaactttttcacactgataatgaggaggaaggagagtataacaaagtaacagtagaggttacagaccaggtttatttgccacctaaagctaaagcagaaaaggagggagaggttcatccctacccttctgcaccccctcattattattttgaagaaaacgaccctccagatctttcttttctggaggacactggtggattagaagatattattccgaatatcacaggggttgtacatccccaagtgatattgttaatatccagtgggaaagaggatgatattactccccatatcacgggggatgtaaacccgtttgtgatattagtaacaatatcactgaaggggtctacaccccctgtgatagtgacagtaatatcctctccccccccagatattaggaacaataacacgggaggatgtacaccccctgtgacattgacagtaatatcaacctctccccccaccccggatattaggaagaataccaccgggggacacttgcttcccttcttcctgccctcggacatgagactccaggttcttacgcctttggactctgggactttcaccagcggcttccccgaggctctcaggccctcggcctcatactga

SEQ ID NO: 5894 - DNA, 1161 bp, Homo sapiens
  SIMILAR (697)..(1158): 571254mologous to Homo sapiens Gag-Pro-Pol protein,accession number AF164614,Smith-Waterman Score=466.
atgggtatttcctgcccagggtcctcaaaaatgcttaatagtcgagcgctccctgtgctgaaactgacccaaggagctctgcgggattgtaaagaacgagcaaactacacaaacttcaacatttacaaggctgtagagagccagggaaagtttgtatgtgttctctataatggacagcaaagccctgaatatgtcatgataccatgtacatctgtgtctccaacaggccaggaagtccctgaggacagaggaatgagaatggtgatgaagaataaacccaataagcctagcaaaatgcagagtctgaaatccagtaagcatctcacaaattctgtcattgttattgctgtaggaattttcttctcggtcactttgcaagccagggacccccagctggatgatgccatagaacagcttagaggagtgtgcattagagcttgggaaaaaatcacttcaggtggagaacaatacccttcctttagtgctataaaacagggaccaaaagaaccatacattgattttatagctcggttacaggagtctcttaaaaagatgattgcagattcggctgctcaggatatagtgttgcagttattagctttcgacaatgctaatcccgattgccaggctgctctgcgacctatcagagggaaagcacatttagttgattgtatcaaggcctgtgatgatattggagatgggtctagtaatggtaaagcttcttattttggctcaaaaagtaaagttttccagacatcctatacttcagctcaaaaagcagagcttgtagcggtaattgaggtattgactgcttttgatatgcctattaatgtgatttctgattcttcatacatggtttattccacacagttaattgaaaatgctcagttacgatttcatacagatgaacaactgatgactttatttacccaattgcaaacagcatttaggagtacaatgcatcctttttacatcactcacattagggctcatacacctcttccaggacctttgactgaagggaatcaaatggccgatcgcctagttgctaatgcaatatctaatgctagacactttcacaatttaacccatgttaatgcctctggtctcaaacgcagatacaacattacctggaaagaagctaaagctattatccagtga

SEQ ID NO: 5895 - DNA, 981 bp, Homo sapiens
  SIMILAR (834)..(517): 991254mologous to Cloning vector pZC320 SopA,accession number U26464,Smith-Waterman Score=540.
atgggcattgccttgggctccccaactactggtcctaaagccatgaagcagaatctgtctatagggccagctggcatcctccttccacagcctgtcatgacccctggatgcccagctgccgcacctcccgtggccccacgctgtggctacgtgttgtctgaagacgcctggggaaaccttcagggcctctgtactggcctgtcatgtggtcaaccagtggcgccatgggccacggattccggcggggctcaggatccagtggctctcctacctccttttccttcacgtgggttgttgggcccctcctgcatgcagcgcagccaggtggtgaagggtgggcgacagagtgagatttcatctcaaaacaaaaaggtgattgcagatttggctgctcaggatatagtgctgcagttattagcttttgacaatgctaatcctgactgccaggctgctctgcgacctatcagaggcaaagcacatttagttgattttatcaaggcctgtgatgttatcggaggcatcccgaatttgctcctccatccacggggactgagagccattactattgctgtatttggtaagcaaaatacgtacatcaggctcgaaccctttaagatcaacgttcttgagcagatcacgaagcatatcgaaaaactgcagtgcggaggtgtagtcaaacaactcagcaggcgtgggaacaatcagcacatcagcagcacatacgacattaatcgtgccgatacccaggttaggcgcgctgtcaataactatgacatcatagtcatgagcaacagtttcaatggccagtcggagcatcaggtgtggatcgcagggttactgtactggaaacaggctcagtgccaatacagcaccaagaatgtccatggccacctcacccaccacatctgcaagggtgacatcacaagccatctgcagctctggacaacacaagcccctgttggcctggtgatgaagctgtga

SEQ ID NO: 5896 - DNA, 1185 bp, Homo sapiens; identical to SEQ ID NO: 5795
  SIMILAR (160)..(825): 411254mologous to Human endogenous retrovirus gag,accession number X72791,Smith-Waterman Score=496.

SEQ ID NO: 5897 - DNA, 2129 bp, Homo sapiens
  SIMILAR (1987)..(2088): 321254mologous to Human endogenous retrovirus K gag protein,accession number Y10392,Smith-Waterman Score=42.
tccaggttgaagggtcgccagagcaacagtttgaggattggggaactaagctggaggacacccaagtactcttaagcaatcctcgtagtgagtaagatggggagcttggaagcatcgggtaacaatgggacaagtgtgggctctggttcgttccaccttggaactttttcacactgatgatgaggaggaaggagagtatgacgaagtaacagaagaggttacagagcaggtttatttgccagctaaagctaaagtggcacaggaggaagaggttcatccctacccttctgcaccccctcattattattttgaagaaaaagagtggccagaccctccagatctttcttttctggaggacactgggcgaaaagtagttgccccagtgactgagcagcacctcgagcgactgctgtcagttctattcaggcaggagttcagcaggctagacgagagggatgatgccgtagagcagcttagaggagtgtgcattagagcttgggaaaaaatcacttcaggtggagaacaatacccttcctttagtgctgtaaaacagggaccaaaagaactgtatgcagattttatagcttggaatctcttaagacaggagtctcttaaaaaggtgatttcagattcagctgctcaggatatagtgttgcagttattagcttttggcaatgttaatctcgattgccaggctgctttgcgacctattagagggaaagcacatttagttgattatatcaaggcctgtgacggtatcggagctaagcaagacagtgaacggtttgcatttacaattcctgtggtaaacaatctgcagcctgctaagcattttcattatttcacagatgggtctagcaatggtaaagcttcttattctggatcaaaaggccaaaaccagcagccaatttggatactatcaagacacctaaaaccttatcatgagccagatgccaaggaagagattccaggaggatcccgaggaccccctggttgcagccatgtcgagactgatgctgaggaggaccctaactgtcacgagcaacacccgttgaacacagccacccacctggggacagatcaagaagctgtcacagatggtggaagaaaacctgaggaaagcgggacaactggtcacaatgaataatttaatggtagctatgatagtggttatcaccactactgaggaacaagagtatagtgaagtaacagaagaggttacagagcaggtttatttgccagctaaagccaaagtggcaaaggagggagaggttcatccctacccttctgcaccccctcattattattttgaagaaaaagagtggcctgaccctccagatctttcttttctggaggacactaggcaaaaagtagttgccccagtgactgttcgagcagcgcctcgagcaaccgttctcagttctattcaggcaggaattcagcaagctagatgagagggcgatttagaggcttggcaattccctgttagaatacaccccccagatcaacagggaaatattatagttacatttgagccttttccttttaaattatttaaagaatttaaacaagctgttaatcagtatggaccaggttctccttttgtaatgggactgttaaagaatgttgctgtttccagttggatgattcctactgactgggatgctcttactcgagcttgtctaactcctgctcagttcttacaatttaaaacttgtgctatgaaacagggaccaagggaaccatatgttgattttatagctcggttacaggagtctcttaaaaagatgattgcagattcggctgctcaggagatagtgttgcagttactagctttcgacaatgctcatcccgattgccaggctgctctgcgacctatcagagggaaagcacatttagttgattatgtcaaggcctgtgatggtattggagagtatacgccttctacttatgaaaagaaagttaactgtaaaacagcttcatgcaggtccttcaggaggtatccagaagaaggcattgttatcacaggagatgacagctccatgcgtgtcgttgtccctgaggaccttccagtggggcaagatgtggaggtggaagacagggatattgatgatcctgaccctgtgtag

SEQ ID NO: 5898 - DNA, 303 bp, Homo sapiens
  SIMILAR (1)..(246): 931254mologous to Mus musculus g1-related zinc finger protein,accession number AF171875,Smith-Waterman Score=399.
atgagctgcgcggggcgggcgggccctgcccggctcgccgcgctcgccctgctgacctgcagcctgtggccggcacgggcagacaacgcgagccaggagtactacacagcgctcatcaacgtgacggtgcaggagcccggccgcggcgccccgctcacgtttcgcatcgaccgcgggcgctacgggcttgactcccccaaggccgaggtccgcggccaggtgctggcgccgctgcccctccacggagcggaaggagcccccgagagcagcagcgaggaggaccacacttccccaactttctga

SEQ ID NO: 5899 - DNA, 424 bp, Homo sapiens
  SIMILAR (323)..(421): 1001254mologous to Homo sapiens Human secreted protein encoded by gene 137 clone HMWIF35,accession number W74865,Smith- Waterman Score=179.
aggaattacgcacgaggcgccctccgcaagggcggcggagaccggttacaggtgatttctgattttgacatgaccttgagcaggtttgcatataatggaaagcgatgcccttcttcttacaatattctggataatagcaagatcatcagtgaggagtgtcggaaagagctcacagcgctccttcaccactattacccaattgagatcgacccacaccggaccgtcaaggagaagctacctcatatggtggaatggtggaccaaagcgcacaatctcctatgtcagcagaagattcagaagtttcagatagcccaggtggttagaaattatccgacagatgaaagtgttccaccccaacatccacatcgtgtctaactacatggattttaatgaagatggttttctccagggatttaagggccac

SEQ ID NO: 5900 - DNA, 2979 bp, Homo sapiens
  SIMILAR (1156)..(1572): 861254mologous to Homo sapiens Human secreted protein encoded by gene 137 clone HMWIF35,accession number W74865,Smith-Waterman Score=640.
atggcggctgcggcagtggcggcggcggcggcggcggccgcggctgcatctcttcagaacgagcagcggcgccagggcctcttctgcgacattaccctgtgcttcggcggggctggaggccgcgagttccgggcccaccgctcggtactggctgccgccaccgagtacttcacgcccctgctctcgggccagttttccgagtcccgctcgggacgggtggagatgcgcaagtggagctccgagccggggcccgaacccgacacagtggaagccgtaatcgagtacatgtacaccgggcgcatccgcgtcagcacgggcagcgtgcacgaggtgctggagttggccgacaggttctctgttggggccataaatgctccaggagattttggcccaagtgtgtccatgcacagtagcactggtgccgctgctcctggggagaaggaccagagtcagcgacctgcaggcctggaaagtaggataaacaacccagacatgcgagtgcagatcctcaaagattacgtcaggcagcacttccctgccactcctctgctcgattatgcactggaagtagagaagattaccacctcgaagaagccaaatcttatcctgaatgtagatggtctcatcggagtcgcatttgtagacatgcttagaaactgtgggtcctttactcgggaggaagctgatgaatatattgacattggagccctcaatggcatctttgtgctgggaaggagtatggggttcattggtccggagctgctccctaagcctaacagctgtctagctccaggaaggaggccaaaagcgtccactgaccgactcagaattttggaaggccaagtcaggcagattgctagagcccagaagttcaagtacagcctgggtaacatggtccagtttggccatgctggagcttgtgccaaccaggcttctgaaactgcagtagccaagaaccaggctttgaaggaagcaggagtgtttgtgccccggagctttgatgagcttggagagatcatccagtctgtatacgaagatctcgtggccaatggagtcattgtacctgcccaggaggtgccgcccccaaccgtgcccatggactactcctgggccaggagggggatttggcagggtcataggacaatagtggagggaagggagggatataagaccttcttcaacacactctaccataacaacattccccttttcatcttttctgcgggcattggtgatatcctggaagaaattatccgacagatgaaagtgttccaccccaacatccacatcgtgtctaactacatggattttaatgaagatggttttctccagggatttaagggccagctcatacacacatacaacaagaacagctctgcgtgtgagaactctggttacttccagcaacttgagggcaaaaccaatgtcatcctgctgggagactctatcggggacctcaccatggccgatggggttcctggtgtgcagaacattctcaaaattggcttcctgaatgacaaggctgctgatatgatacggagaaatttccacaaagtgattcaggatgaagaattttatacgttacctttccatctcattagagactggctttcagatttggaaattacagttgattctgaagaggttctctttgaaaccgttttgaaatgggttcagagaaatgctgaagagagagagagatactttgaagaactttttaaattgctcaggttgtcccagatgaaacctacctaccttactcgacatgtcaaaccagagaggctggtagccaataatgaagtttgtgtcaagttggtcgctgacgcagtggagagacatgctctgagagctgagaatatacaatctggcacatgccagcaccccacttctcatgtgtcactattgcctcgttatgggcaaaacatggatgtgatcatggttattggaggtgtgtcagaaggaggggactatttaagtgaatgtgtgggatactttgttgatgaggacagatgggtaaatctgccacatattcataatcacctcgatggacatgctgttgcagtaacagaatcctacgtgtatgttgctggatcaatggagccagggtttgctaaaactgtagaaaggtataacccaaatttgaatacatgggaacatgtttgtagtctgatgacaagaaagcattcttttggactaacagaagtcaaagggaagctctatagcattggaggacatggcaactttagtcctggttttaaagatgtgactgtttataatcctgagcttgataaatggcacaacttggaatcggcaccaaagattcttcgagatgtcaaagcactagccattgaagaccggtttgtatacattgccgcccgcactcctgtagaccgggacactgaagatggattaaaggctgtaattacttgctatgatacagagactcgacagtggcaagatgtggaatctttgccgcttattgacaattactgctttttccaaatgtctgtggtcaattcaaacttttatcagacagcatcatgttgtcccaagagttattgtttagaaaacgaagaggcagtaagaaaaattgccagccaagtgtctgatgagatccttgaaagcttgcctccagaagtcctaagcatcgaaggagcagccatttgctattacaaagatgatgtcttcattataggaggctggaaaaacagtgatgatattgataaacagtatcggaaagaagcctaccgatattgtgcggagaggaagaggtggatgcttcttcctcctatgccacaacctcgttgtagagccactgcttgtcacgtgaggatcccataccggtacttgcatggcacacagagataccctatgcctcaaaacctgatgtggcagaaggaccgcatcagacagatgcaagagatacatcgtcacgccctgaacatgaggcgagtgccaagctctcagattgaatgctag

SEQ ID NO: 5901 - DNA, 544 bp, Homo sapiens
  SIMILAR (341)..(544): 1001254mologous to Homo sapiens Human secreted protein encoded by gene 137 clone HMWIF35,accession number W74865,Smith- Waterman Score=378.
tttcgtgggatggcagaggaggtgaggagggatgaagcgtccggagtggggcgggcccggactccgacccccggggcgcttcgagccccccagctggtcaccgaggcaccgccgcttcacccaggtgagcaccctgatgaaggccacggtcctgatgcggcagcctgggcgggtgcaggagatcgtgggcgccctccgcaagggcggcggagaccggttacagatttctcaatatggtcatgctgcttcctctaattggacagaaggcgcccacaccagtacctagggccgatattatcctccccaagccagcggctccccagtgatttctgattttgacatgaccttgagcaggtttgcatataatggaaagcgatgcccttcttcttacaatattctggataatagcaagatcatcagtgaggagtgtcggaaagagctcacagcgctccttcaccactattacccaattgagatcgacccacaccggaccgtcaaggagaagctacctcatatggtggaatggtggaccaaagcgcacaat

SEQ ID NO: 5902 - DNA, 4556 bp, Homo sapiens
  SIMILAR (1065)..(1790): 951254mologous to Homo sapiens 65kDa FK506-binding protein,accession number AB045981,Smith-Waterman Score=1207.
atgcatgctgagtacttcatgaacaatgttaagatgaatgactatgtcaaagacagtgaggaatgcaaaccagtcatcattaatgccctaaaggccatgtatgacctcaacatgaatggaccctctaattctgatttcaccaacccactcaccagaccacgcttgccctatgccatcctctttgcaattggtggctggagtggtgggagccccaccaatgccattgaggcatatgacgctcgggcagacagatgggtgaatgttacttgtgaggaagagagtccccgtgcctaccatggggcagcctatttgaaaggctatgtgtatatcattggggggtttgatagtgtagactatttcaatagtgttaagcgttttgacccagtcaagaaaacttggcatcaggtggccccgatgcactccagacgttgctatgtcagtgtgacagtcctcggcaattttatttatgccatgggaggatttgatggctacgtgcgtctaaacactgctgaacgttatgagccggagaccaatcaatggacactcatcgcccccatgcacgaacagaggagtgatgcaagcgccacaacactttatgggaaggtaaaggaccaggcggggctcattccaccggatgccaccctctacttcgatgtggttctgctggatgtgtggaacaaggaagacaccgtgcaggtgagcacattgctgcgcccgccccactgcccccgcatggtccaggacggcgactttgtccgctaccactacaatggcaccctgctggacggcaccttcttcaacaccagctacaggaagggcggcacttatgacacctacgtcggctctggttggctgatcaagggcatggaccaggggctgctgggcatgtgtcctggagagagaaggaaattatcatccctccattcctggcctatggcgagaaaggctatggtgagggtgggaaaggacacaaggggaaattccgcagaagagggaaaaaccaggcctccacatacagttgctcaggttgtatactgcacgagggcatccaaccaaggactcaagggacagtgatccccccacaggcctcgctggtctttcacgtcctcctgattgacgtgcacaacccgaaggacgctgtccagctagagacgctggagctcccccccggctgtgtccgcagagccggggccggggacttcatgcgctaccactacaatggctccttgatggacggcaccctcttcgattccagctactcccgcaaccacacctacaatacctatatcgggcagggttacatcatccccgggatggaccaggggctgcagggtgcctgcatgggggaacgccggagaattaccatccccccgcacctcgcctatggggagaatggaactggagacaagatccctggctctgccgtgctaatcttcaacgtccatgtcattgacttccacaaccctgcggatgtggtggaaatcaggacactgtcccggccatctgagacctgcaatgagaccaccaagcttggggactttgttcgataccattacaactgttctttgctggacggcacccagctgttcacctcgcatgactacggggccccccaggaggcgactctcggggccaacaaggtgatcgaaggcctggacacgggcctgcagggcatgtgtgtgggagagaggcggcagctcatcgtgcccccgcacctggcccacggggagagtggaggtgttaccaaaatagtctcagtagtcttaaaatatctttatgcttatgaactccacccttgtatccaaaagaactggtgggaagaaaagatccctctggcaaaaaccaccctggagaagacctggctgttccacgagatcggccgctgctacttggagctggaccaggcctggcaggcccagaattatggcgagaagtcccagcagtgtgccgaggaggaaggggacattgagtggcaactgaatgccagtgttctggtggcccaggcacaggaagcttcactgtatgaagatagaataataacaagagagaaggacatgaggagagtgagagatgagcccgagaaggtggtgaagcagtgggaccatagtgaggatgagaaagagacagatgaggacgatgaggcttttggggaagctctgcagagcccagcaagcggaaagcagaaggatgtactgacccagctatctcttttgctgagggctgaagttgctttggtattcgatttgataaacaacccagacatgcgagtgcagatcctcaaagattacgtcaggcagcacttccctgccactcctctgctcgattatgcactggaagtagagaagattaccacctcgaagaagccaaatcttatcctgaatgtagatggtctcatcggagtcgcatttgtagacatgcttagaaactgtgggtcctttactcgggaggaagctgatgaatatattgacattggagccctcaatggcatctttgtgctgggaaggagtatggggttcattgttacttcgggccatctggttgtatacgtgcaggaagccaattttgagaatgttctgcacaccaggaaccccatcggccatggtgaggtccccgatagagtctcccagcaggatgacattggttttgccctcaagttgctggaagtaaccagagttctcacacgcagagctgttcttgttcccaaacaggatttggctcacatcttcattaaaatccatgtagttagacacgatgtggatgttggggtggaacactttcatctgtcggataatttcttccaggatatcaccaatgcccgcagaaaagatgaaaaggggaatgttgttatggtccagtttggccatgctggagcttgtgccaaccaggcttctgaaactgcagtagccaagaaccaggctttgaaggaagcaggagtgtttgtgccccggagctttgatgagcttggagagatcatccagtctgtatacgaagatctcgtggccaatggagtcattgtacctgcccaggaggtgccgcccccaaccgtgcccatggactactcctgggccaggctcacagcgctccttcaccactattacccaattgagatcgacccacaccggaccgtcaaggagaagctacctcatatggtggaatggtggaccaaagcacacaatctcctatgtcagcagaagattcagaagtttcagatagcccaggtggttagagagtccaatgcaatgctcagaatccctctgtgtcgtaccaacagccgcatcgttccgaggctgtggaggccgggcgcagcggcgtcaagatggcggctgcggcagtggcggcggcggcggcggcggccgcggctgcatctcttcaggtactggaaatggagagcatggagacgggccgccgccggctcggcaggactggccgccgaggtccgaggcagcggcacggtggacttcgggcctgggccggggatctctgcaatggaggcgagcgggggcgatccgggcccagaagccgaggatttcgagtgcagctctcactgctcagagctgtcctggcggcagaacgagcagcggcgccagggcctcttctgcgacattaccctgtgcttcggcggggctggaggccgcgagttccgggcccaccgctcggtactggctgccgccaccgagtacttcacgcccctgctctcgggccagttttccgagtcccgctcgggacgggtggagatgcgcaagtggagctccgagccggggcccgaacccgacacagtggaagccgtaatcgagtacatgtacaccgggcgcatccgcgtcagcacgggcagcgtgcacgaggtgctggagttggccgacagctctggcttccaggcgaagagcacccacctcactgcagccctgccagatgtaccatgcgccacatacttccatgtgatcgccctgcagacagacagcatggccgttcagttcaggaaatattcgccgagtgtagattggctccaggctgccaagctcaaatgtgccttggacgatgccaacaagggtatcatcagagaactgaggaaaaccaactacgtggagaatctcaaagaaaaaagcgagggaggaaagagcaccaccctcttcagccgccacaccaaggccattgtgtggggcatgcagacccgggccgtgcaaggcatgctggactttgactatgtctgctcccgagacgagccctcagtggctgccatggtctaccctttcactggggaccacaagcagaagttttactgggggcacaaagagatcctgatccctgtcttcaagaacatggctgatgccatgaggaagcatccggaggtagatgtgctcatcaactttgcctctctccgctctgcctatgacagcaccatggagaccatgaactatgcccaggtggaggagcggcgggagcgctacatggactcctatgacatcgtgctggagaaggacgagactctggatgtggtcaacgggctactgcagcacatcctgtgccagggggtccagctggagatgcaaggcccctga

SEQ ID NO: 5903 - DNA, 434 bp, Homo sapiens
  SIMILAR (148)..(71): 421254mologous to Homo sapiens retinoblastoma 1,accession number M26460,Smith-Waterman Score=70.
  misc_feature (1)...(434): n = a,t,c or g
cttgaccnncncgtggaatnnnnnnnnnnnnnnnnnnnnnnnnnnnnnnnnnnnnnnnnnnnnttaagattcttttctttgtcttaactttagataacctgacgacaatgtgcctaggcgatgatctttttctgatgaatttcccagggnnnnnnnnnnnnnnnnnnnnnnnnnnnnnnnnnnnnnnnnnnnnnnnnnnnnnnnnnnnnnnnnnnnnnnnnnnnnnnnnnnnnnnnnnnnnnnnnnnnnnnnnnnnnnnnnnnnnnnnnnnnnnnnnnnnnnnnnnnnnnnnnnnnnnnnnnnnnnnnnnnnnnnnnnnnnnnnnnnnnncnnnnnnnnnnnncccttttttttggaaaaaaggtttatttttttcccccagtcttaaggggtggggggcaattttgggttattggaaccttccccccccggat

SEQ ID NO: 5904 - DNA, 461 bp, Homo sapiens
  SIMILAR (52)..(195): 501254mologous to Homo sapiens p40,accession number U93570,Smith-Waterman Score=128.
  misc_feature (1)...(461): n = a,t,c or g
ccccccagcccccccctttcgagatcatattgagagcggtggaattcctagatccaaatacaagaagcacaaagaacatctgggaaattcatcgcaaaaagatcatcatctaggcacattgtcgtcaggttatctaaagttaagatgaaagaaagagctgtgaaacaaaagcaccaggtaacctgtaaaggaaaacttacnnnnnnnnnnnnnnnnnnnnnnnnnnnnnnnnnnnnnnnnnnnnnnnnnnnnnnnnnnnnnnnnnnnnnnnnnnnnnnnnnnnnnnnnnnnnnnnnnnnnnnnnnnnnnnnnnnnnnnnnnnnnnnntatgaaggcaagatacagctttttcagacaaacagagaattcaccactaccaagccaccagtgcaagaatgctaaaaggaactctaaatcttgaaacaaatccaggaaacatatcaaaacagaacctctttaaa

SEQ ID NO: 5905 - DNA, 1107 bp, Homo sapiens
  SIMILAR (490)..(1098): 611254mologous to Homo sapiens unknown protein,accession number M22333,Smith-Waterman Score=674.
atggcagcagacctgggggccacaccctgcaaagccacaggggaagacatgcccaaggccttaggagtccactgcttgcaccagtgtgccttggatgtgggacatggggtcaaaggagattattttggagccttaagatttaacgactgctttgctggttttcagacgtctccagatcaactgcaagaacaaaccagcaatcccgagaggacccacagaccctctgaaaaaagcggactgctcctgcaggaccagggagacaccacaaataccgaagaagagaattctaaaagcttggaaaacatatttgggagagtaatcaaggaaaatttccaaagccttgttagagacctagacatccgaatacaagaagcacaaagaacacccgggaaattcatcacaaaaagatcatcacctaggcacattgtcatcaggttatccaaagttaagacaaaggaaagaatcttaagagctgtcagacagaagcaccaggaaaatatcacaatcctaaacctatatacacccaacactggagcccccagatttataaaacaattactaacagacctaagaaatgagatagacagcaacacaataatagtggggtacttcagtactccactgacagcactagacaggtcatcaagacagaaagtcaatgatgaaacagtggatttaaactataccttggaacaaatggacttaacagaaatatacagaacatttcatccaacaaccacagaatacacattctattcaacagtgcatggaactttctccaagatagaccatatgatatgccataaaatgagcctcaatgaatttaagaaaactgaaattatatcaagcactctctcagatcacagtggaataaaactggaaatcaactccaaaatgaaccttcaaaaccatgcaaatacatggaaattaaataacctgctcctgaatgagcactgggtcaaaaacgaaatcaagatggaaattgaaaaattcttcaaactgaacgacagtaatgacacaacctatcaaaacctctgggatatggcaaaggcagtgctgagaggaaagttcatagccctaaacacctacatcaaaaaaatgatgtag

SEQ ID NO: 5906 - DNA, 2367 bp, Homo sapiens
  SIMILAR (1717)..(2256): 411254mologous to AKV murine leukemia virus gag-pol polyprotein (tag amber codon at 2250-2252 inserts Gln in Mo- MuLV),accession number J01998,Smith-Waterman Score=362.
atggtctctggacacctgggctgtgcactgcagcagtgcgatgagggacagctggatgctgacgagcctcggcccgctttcctgacctggctcccaggatgctgcagtcagtcttcaccttccagtcaggagacctggagagtgttctctcgggagtctgtccagccaaagaagaaagagttaaagaaatgtgggctcctaaggacgtgtcagggatcatctcccccggtccagaccaggaagggctctagaccaaagggctctgggacaaaagtccattctcctaatcagactccaagggccacaacagctgagaaagggcggtctggctgggtaactccccagcacttccagggagaatgccctgatgcagtgattccggaagccaagaataagcacagggacagttcccggctcctggtggagcccaacgtttcatgggaattggctacacttggagagccacaagcatgtgccatgtgcccagcattaactgtcattatctccttgaatctgaacaatgctccaagtagcattgttaatgccattgtgcagataaagactttgatcctccatatggacagtggaataatgaggcctatcttgttctctcttctgttaagcccctggaagccttttgggaactcggaagcacttatcctcagacatgtggctcattcttgtttcctccaggagccaataggtggtagcaacgggccagcaaagaagcacctgctaagagacctggacattcaaatacaagaagcacaaagaacacctgggaaattcatcgcaaaaagatcatcacctaggcacattgtcatcaggttatctaaagttaagacaaaggaaagaatcttaagagctgtgagacaaaagcaccagatacagaattgtggaatggataagaattcaccaaccatctgctgccttcaagagactcacccaacacataaggacttgcacaaacttaagtgggcagttttgggtggagcagaccctccttctctcagttctgatggttcagagctggttctttctccctccagtccacttgaaagttcagttgagaaccttttgtcccctcttccttacctgtctagtctactctatacccacgactccctgaggaacttagcccaggaggtggcagatggggaagaaggcactgtgagagtacatcttcccttttctatgtctgatttggctctatgtaaagagaagtttggtcatttctctgaagatccaggaaaattcatagacgagtttgagaaattaactctgacctatggtttaacttggcaagatccgcatgttttgtgttctctgtgttgtacagtggaagagaaacaacgcattttggggacagctaggactcatgcagatgaagtattggctcataatctgaaccataatatgtatcaggcaggaggtatagcagttccagatcaagatccagagtggaactatcaaaggggcagtgaggacttggggaggagaattgaaactacaaaaaccagctatgggtccccaaactcctatggacagcttttggagatgacatttttagtttttaacaacagggacaaagcagaggaagcagaaagagcaagaaggacctcccacaaggtgcagctcttggctgcagcctccaacttacctcccacgtggggctgccctcctggctgttggcctggacaagggaagctgaaagatcattcttgtatacaaattatggagctagtttactccagccatctggatttaaaggatgagcctctagataatcctgaggtagaatggtttacagatggaagtagcttcgtgcaccaggaaaactggcaagctggggctgttgtcagtcaacatgaggtaattggatctcaagccttacaagcctctaccttagctcaaaaggcagaattaatagctcttattagagccctgcaactgggaaaggacctaagaattaacatttacactgattctaagtatgcctttctggaatggggactcctaactgttaagggttcccctgcaaaacattacttagaaattcggagaatattgggtgctgttttgctgcccaaggaagtagctataaaccattgtagaggttatcaaagaggagactctggtgcggctaagggaaactcctttgcagatgcaactgctaacgcagcagcactaaaggagccaataggacttattggcatgttggtgccctcagccactgcattgacagaccctagatatactaaagaggaacaagaatgggctaaaggtcagggtttaattaaagatcctctggctggcttatcaatgacaacaaactgttattaccaggtgctaatcagtggaaaataa

SEQ ID NO: 5907 - DNA, 469 bp, Homo sapiens
  SIMILAR (1)..(390): 841254mologous to Homo sapiens farnesyl pyrophosphate synthetase,accession number M29863,Smith-Waterman Score=551.
atgtacatggcaggaattgatggcgagaaggagcacgccaatgccaagaagatcctgcagagttcctatcagactgagattgggcagaccctggacctcctcacaacgccccagggcaaaattggcactgacatccaggacaacaaatgcagctggctggtggttcagtgtctgcaacgggccactccagaacagtaccagatcctgaaggaaaattacgggcagaaggaggctgagaaagtggcccgggtgaaggcgctatatgaggagctggatctgccagcagtgttcttgcaatatgaggaagacagttacagccacattatggctctcattgaacagtacgcagcacccctgcccccagccgtctttctggggttgcgcgcaaaatctacaagcggagaaagtgacctagagattgcaagggcggggagaggaggctctcaataaataatcgtgtaaccttaaa

SEQ ID NO: 5908 - DNA, 1464 bp, Homo sapiens
  SIMILAR (7)..(504): 881254mologous to Mus musculus ubiquitin-protein ligase E3- alpha,accession number AF061555,Smith-Waterman Score=732.
atgcaggaggactttcaagtagaggtactagtggaatatcctttacgttgtctggtgttggttgcccaggttgttgctgagatgtggcgaagaaatggactgtctcttattagccaggtgttttattaccaagatgttaagtgcagagaagaaatgtatgataaagatatcatcatgcttcagaagaaatatgatgctggatttctttcacagattggtgcatctttaatggatcccaataagttcttgttactggtacttcagaggtatgaacttgccgaggcttttaacaagaccatatctacaaaagaccaggatttgattaaacaatataatacactaatagaagaaatgcttcaggtcctcatctatattgtgggtgagcgttatgtacctggagtgggaaatgtgaccaaagaagaggtcacaatgagagaaatcattcacttgctttgcattgaacccatgccacacagtgccattgccaaaaatttacctgagaatgcttttcatattctggcattgggtttactagaagagaagcaacagcttcaaaaagctcctgaagaagaagtaacatttgacttttatcataaggcttcaagcacaaggagagaatttgatcccttgccttttccagcttctagaggctgcccatattccccagctgatggcccactttctccatcttcaaagtcagcagcaacagtgggccaagtcctcatgagcttcaggcagcaccagtgtctgggggcttgtcgagtacctgttctacaacatggaattccactcagcatagcatgtaaccagggaacccatttcacagatctggtagtgttccggagtggcccgttgcagacactgaaccagcagccagctgcatttattgtcctggatgtcagtgccaactttgctggtcacactggggtccccaaaagaggtgaagcaggatcttcttggcattgtcgtgctccttctcgccatcaatgcctgccatgtacatggctgcagctacaggaatgtagaagtagaaactgccttgtacttgacagtagatttgtacctcttttcagtgaatctgccaagatccgcattgccctggggggctgtgatgaggtccagggtctgcccaatctcagtctgatagaaactctgccggaagagctggatcaggttctggcaatagggctgctcccagcaatagagcttcagcaggcagtagatacatgcttccacaaggatagcatcactgatggcatccaaacccacgcccggcttctgaaaccagcagatctgttaccagcggtgagcaatgaatccgtgatgtcatttgccaccaggaacaaagcttgcagcagttccacacaccagcccacagtcagggcccgctggagactctcagcatcatgtttccttggctccaccagctcccagaacgctactagcactgtcaaaccccggtga

SEQ ID NO: 5909 - DNA, 1309 bp, Homo sapiens
  SIMILAR (187)..(1095): 691254mologous to Homo sapiens partial sequence,accession number Z47055,Smith-Waterman Score=998.
cgcccccccattgaatcgattgctctctagtccgcgtggtggaattcgcgggaactactcgacccacagagccgatcgcggagcggattctgcttttaggagtacccgccaacaagcgggaccgagcaggaatccgtatctgggaacagagccctttgctcctccctcagaatgaacggagaccagaattcagatgtttatgcccaagaaaagcaggatttcgttcagcacttctcccagatcgttagggtgctgactgaggatgagatggggcacccagagataggagatgctattgcccggctcaaggaggtcctggagtacaatgccattggaggcaagtataaccggggtttgacggtggtagtagcattccgggagctggtggagccaaggaaacaggatgctgatagtctccagcgggcctggactgtgggctggtgtgtggaactgctgcaagctttcttcctggtggcagatgacatcatggattcatcccttacccgccggggacagatctgctggtatcagaagccgggcgtgggtttggatgccatcaatgatgctaacctcctggaagcatgtatctaccgcctgctgaagctctattgccgggagcagccctattacctgaacctgatcgagctcttcctgcagagttcctatcagattgagattggggcagaccctggacctcctcacagcccccccagggcaatgtggatcttgtcagattcactgaaaagaggtacaaatctattgtcaagtacaagacagctttctactccttctaccttcctatagctgcagccatgtacatggcaggaattgatggcgagaaggagcacgccaatgccaagaagaatcctgctggagatgggggagttctttcagattcaggatgattaccttgacctctttggggaccccagtgtgaccggcaaaattggcactgacatccaggacaacaaatgcagctggcttggtgggttcagtgtctgcaacgggccactccagaacagtaccagatcctgaaggaaaattacgggcagaaggaggctgagaaagtgggcccgggtgaaggcgctatatgagggagctggatctgccagcagtgttcttggcaatatgagggaaggacagttacagccacattatggctctcattgaacagtacgcagcacccctgcccccagccgtctttctggggcttgcgcgcaaaatctacaagcggagaaagtgacctagagattgcaagggcggggagaggaggctctcaataaataatcgtgtaaccttaaaaaaaaaa

SEQ ID NO: 5910 - DNA, 532 bp, Homo sapiens
  SIMILAR (188)..(490): 271254mologous to Rana catesbeiana myosin heavy chain,accession number AF097906,Smith-Waterman Score=86.
agacttaatgaggcagaacaaaagtacaaggatattcaagataaactacaaattattagtgaagagacaaatgcgcgagcaccagaatgtatggcattgaaagcagatgttgttgctaagaaaagggcctataatgaagctgaggttttatataaccgatccttaaacgaatataaagcattaaagaaagatgatgagcagctttgtaaacgaattgaagagctgaaaaaaaagtactgaccaatctttggaacctgaacggttggaaagacaaaaaaaaatatcttggttaaaagagagagtaaaggcctttcaaaatcaagaaaattcagtcaatcaagagatcgaacagtttcagcaagccttagaaaaggacaaagaagaacatggcaaaattaagagagaaaaattagatgtgaagcatgcactgagctacaatcagaggcttctgaaagaattgaaagatagtaaaactgatcgactcaaaagatttggccctaatgttccagctcttcttgaagccatagatgat

SEQ ID NO: 5911 - DNA, 868 bp, Homo sapiens
  SIMILAR (539)..(661): 361254mologous to Schizosaccharomyces pombe dna repair protein rad18,accession number AL033406,Smith-Waterman Score=72.
  misc_feature (1)...(868): n = a,t,c or g
atggccaaaagaaaggaagaaaatttttcctctcctaaaaatgccaaaaggccaagacaagaagaattggaggattttgataaagatggtgacgaagacgaatgtaaaggtactactttngatatctcaataacattgaggaacagaggagatgatgcctttaaagccagtgtgtatggtaactctatacttatacagcaacacatcagcatagatggaagtcgatcttataaacttaaaagtgcaacaggctccgtggtttccacgaggaaagaagagctgattgcaattcttgatcattttaacatccagttcttcatgaaagcaacgcaacttgaacagatgaaggaagattattcatacattatggaaacgaaagaaagaacaaaggagcagatacatcaaggagaagaggtcagacttaatgaggcagaacaaaaagtacaaggatattcaagacaaactagaaaagattagtgaagagacaaatgcacgagcaccagaatgtatggcattgaaagcagatgttgttgctaagaaaagggcctataatgaagctgaggttttatataaccgatccttaaacgaatataaagcattaaagaaagatgatgagcagctttgtaaacgaattgaagagctgaaaaaaagagtcattcttgactcctttctgctaccccacatcctactggctgtacttcagaaatatatccaagatctgaccacttgtgtggtgactctactggctcacgccatcatcatgtttcccttgagaattgcacaggctgatctccctgcttctggttacttggcaccacagtctcagtacagcagccaacggctgactgtgacctctaggcctggatga

SEQ ID NO: 5912 - DNA, 3079 bp, Homo sapiens
  SIMILAR (743)..(2875): 1001254mologous to Homo sapiens dJ268D13.1.1 (seizure related gene 6 (mouse)-like (KIAA0927) (isoform 1)),accession number AL023513,Smith-Waterman Score=3816.
aaaggaagggagggagggagaaaggagaagttggtttagaggccagccggacgagctttgggcaccgcccttaggagggccaccctcagagtctgacagcaggtgaaggtcctaaatctccccaaactaactggtgtcttttctcctcttccaagatgctcttcccgagggagatgctagccctttgggtccttacctcctgccctcaggagccccggagagaggcagtcctggcaaagagcaccctgaagagagagtggtaacagcgccccccagttcctcacagtcggcggaagtgctgggcgagctggtgctggatgggaccgcaccctctgcacatcacgacatcccagccctgtcaccgctgcttccagaggaggcccgccccaagcacgccttgccccccaagaagaaactgccttcgctcaagcaggtgaactctgccaggaagcagctgaggcccaaggccacctccgcagccactgtccaaagggcagggtcccagccagcgtcccagggcctagatctcctctcctcctccacggagaagcctggcccaccgggggacccggaccccatcgtggcctccgaggaggcatcagaagtgcccctttggctggaccgaaaggagagtgcggtccctacaacacccgcacccctgcaaatctcccccttcacttcgcagccctatgtggcccacacactcccccagaggccagaacccggggagcctgggcctgacatggcccaggaggccccccaggaggacaccagccccatggccctgatggacaaaggtgagaatgagctgactgggtcagcctcagaggagagccaggagaccactacctccaccattatcaccaccacggtcatcaccaccgagcaggcaccagctctctgcagtgtgagcttctccaatcctgaggggtacattgactccagcgactacccactgctgcccctcaacaactttctggagtgcacatacaacgtgacagtctacactggctatggggtggagctccaggtgaagagtgtgaacctgtccgatggggaactgctctccatccgcggggtggacggccctaccctgaccgtcctggccaaccagacactcctggtggaggggcaggtaatccgaagccccaccaacaccatctccgtctacttccggaccttccaggacgacggccttgggaccttccagcttcactaccaggccttcatgctgagctgcaactttccccgccggcctgactctggggatgtcacggtgatggacctgcactcaggtggggtggcccactttcactgccacctgggctatgagctccagggcgctaagatgctgacatgcatcaatgcctccaagccgcactggagcagccaggagcccatctgctcagctccttgtggaggggcagtgcacaatgccaccatcggccgcgtcctctccccaagttaccctgaaaacacaaatgggagccaattctgcatctggacgattgaagctccagagggccagaagctgcacctgcactttgagaggctgttgctgcatgacaaggacaggatgacggttcacagcgggcagaccaacaagtcagctcttctctacgactcccttcaaaccgagagtgtcccttttgagggcctgctgagcgaaggcaacaccatccgcatcgagttcacgtccgaccaggcccgggcggcctccaccttcaacatccgatttgaagcgtttgagaaaggccactgctatgagccctacatccagaatgggaacttcactacatccgacccgacctataacattgggactatagtggagttcacctgcgaccccggccactccctggagcagggcccggccatcatcgaatgcatcaatgtgcgggacccatactggaatgacacagagcccctgtgcagagccatgtgtggtggggagctctctgctgtggctggggtggtattgtccccaaactggcccgagccctacgtggaaggtgaagattgtatctggaagatccacgtgggagaagagaaacggatcttcttagatatccagttcctgaatctgagcaacagtgacatcttgaccatctacgatggcgacgaggtcatgccccacatcttggggcagtaccttgggaacagtggcccccagaaactgtactcctccacgccagacttaaccatccagttccattcggaccctgctggcctcatctttggaaagggccagggatttatcatgaactacatagaggtatcaaggaatgactcctgctcggatttacccgagatccagaatggctggaaaaccacttctcacacggagttggtgcggggagccagaatcacctaccagtgtgaccccggctatgacatcgtggggagtgacaccctcacctgccagtgggacctcagctggagcagcgaccccccattttgtgagaaaattatgtactgcaccgaccccggagaggtggatcactcgacccgcttaatttcggatcctgtgctgctggtggggaccaccatccaatacacctgcaaccccggttttgtgcttgaagggagttctcttctgacctgctacagccgtgaaacagggactcccatctggacgtctcgcctgccccactgcgtttcagaagcggcagcagagacgtcgctggaaggggggaacatggccctggctatcttcatcccggtcctcatcatctccttactgctgggaggagcctacatttacatcacaagatgtcgctactattccaacctccgcctgcctctgatgtactcccacccctacagccagatcaccgtggaaaccgagtttgacaaccccatttacgagacagggggaacccaaaaggtttagggtttcatttaaaaagaggtaccctttaaaaaggggcttgtgaactcaaccccaatttccccgagacatttatccaaaggccctgggggccttgatttaaacccccaaaaggcggctgttttttggttaaactttttaacaaagggttacgggttttttccccggattttataaattttaaaagtg

SEQ ID NO: 5913 - DNA, 6397 bp, Homo sapiens
  SIMILAR (743)..(3073): 981254mologous to Homo sapiens dJ268D13.1.2 (seizure related gene 6 (mouse)-like (KIAA0927) (isoform 2)),accession number AL023513,Smith-Waterman Score=4157.
aaaggaagggagggagggagaaaggagaagttggtttagaggccagccggacgagctttgggcaccgcccttaggagggccaccctcagagtctgacagcaggtgaaggtcctaaatctccccaaactaactggtgtcttttctcctcttccaagatgctcttcccgagggagatgctagccctttgggtccttacctcctgccctcaggagccccggagagaggcagtcctggcaaagagcaccctgaagagagagtggtaacagcgccccccagttcctcacagtcggcggaagtgctgggcgagctggtgctggatgggaccgcaccctctgcacatcacgacatcccagccctgtcaccgctgcttccagaggaggcccgccccaagcacgccttgccccccaagaagaaactgccttcgctcaagcaggtgaactctgccaggaagcagctgaggcccaaggccacctccgcagccactgtccaaagggcagggtcccagccagcgtcccagggcctagatctcctctcctcctccacggagaagcctggcccaccgggggacccggaccccatcgtggcctccgaggaggcatcagaagtgcccctttggctggaccgaaaggagagtgcggtccctacaacacccgcacccctgcaaatctcccccttcacttcgcagccctatgtggcccacacactcccccagaggccagaacccggggagcctgggcctgacatggcccaggaggccccccaggaggacaccagccccatggccctgatggacaaaggtgagaatgagctgactgggtcagcctcagaggagagccaggagaccactacctccaccattatcaccaccacggtcatcaccaccgagcaggcaccagctctctgcagtgtgagcttctccaatcctgaggggtacattgactccagcgactacccactgctgcccctcaacaactttctggagtgcacatacaacgtgacagtctacactggctatggggtggagctccaggtgaagagtgtgaacctgtccgatggggaactgctctccatccgcggggtggacggccctaccctgaccgtcctggccaaccagacactcctggtggaggggcaggtaatccgaagccccaccaacaccatctccgtctacttccggaccttccaggacgacggccttgggaccttccagcttcactaccaggccttcatgctgagctgcaactttccccgccggcctgactctggggatgtcacggtgatggacctgcactcaggtggggtggcccactttcactgccacctgggctatgagctccagggcgctaagatgctgacatgcatcaatgcctccaagccgcactggagcagccaggagcccatctgctcagctccttgtggaggggcagtgcacaatgccaccatcggccgcgtcctctccccaagttaccctgaaaacacaaatgggagccaattctgcatctggacgattgaagctccagagggccagaagctgcacctgcactttgagaggctgttgctgcatgacaaggacaggatgacggttcacagcgggcagaccaacaagtcagctcttctctacgactcccttcaaaccgagagtgtcccttttgagggcctgctgagcgaaggcaacaccatccgcatcgagttcacgtccgaccaggcccgggcggcctccaccttcaacatccgatttgaagcgtttgagaaaggccactgctatgagccctacatccagaatgggaacttcactacatccgacccgacctataacattgggactatagtggagttcacctgcgaccccggccactccctggagcagggcccggccatcatcgaatgcatcaatgtgcgggacccatactggaatgacacagagcccctgtgcagagccatgtgtggtggggagctctctgctgtggctggggtggtattgtccccaaactggcccgagccctacgtggaaggtgaagattgtatctggaagatccacgtgggagaagagaaacggatcttcttagatatccagttcctgaatctgagcaacagtgacatcttgaccatctacgatggcgacgaggtcatgccccacatcttggggcagtaccttgggaacagtggcccccagaaactgtactcctccacgccagacttaaccatccagttccattcggaccctgctggcctcatctttggaaagggccagggatttatcatgaactacatagaggtatcaaggaatgactcctgctcggatttacccgagatccagaatggctggaaaaccacttctcacacggagttggtgcggggagccagaatcacctaccagtgtgaccccggctatgacatcgtggggagtgacaccctcacctgccagtgggacctcagctggagcagcgaccccccattttgtgagaaaattatgtactgcaccgaccccggagaggtggatcactcgacccgcttaatttcggatcctgtgctgctggtggggaccaccatccaatacacctgcaaccccggttttgtgcttgaagggagttctcttctgacctgctacagccgtgaaacagggactcccatctggacgtctcgcctgccccactgcgtttcggaggagtccctggcatgtgacaacccagggctgcctgaaaatggataccaaatcctgtacaagcgactctacctgccaggagagtccctcaccttcatgtgctacgaaggctttgagctcatgggtgaagtgaccatccgctgcatcctgggacagccatcccactggaacgggcccctgcccgtgtgtaaagtagcagaagcggcagcagagacgtcgctggaaggggggaacatggccctggctatcttcatcccggtcctcatcatctccttactgctgggaggagcctacatttacatcacaagatgtcgctactattccaacctccgcctgcctctgatgtactcccacccctacagccagatcaccgtggaaaccgagtttgacaaccccatttacgagacaggggaaaccagagagtatgaggtttctatctaaagagagctacacttgagaaggggacttgtgaactcaaccacaatctcctcgagacattcatccagagaccatgtggcacttgattgaaaccccagaatgtcgactgtcttttgtttagactctttatcaaaggtttactgttttcttccctgtatttattatatttaaaagtgaaataggtgtgggtttggatgtttcgcggcctcagccaaattcatgttacagcctcaattctgaaggcaggtggaagacttgcaaaatggcaaaccgcggcagcaaaaacacaaaacagcagatggagtttctcccatcagcaatgccatgctaaggctgcattgaattgcatgcatctttgggaaccatgcccatgatgttttcagtacaaatctaagtcccaagattaggttggaaagggtatttcttgttggcttagtttgggttggaatttagcatgggtacttaaacccatttggagagctgtgctcctaaacaaattctgtgtcctctcttcccattttgccagcttctgaaaggtttttccacagcccctccctctcacggttcttctgaaggtagcaaaggtgttatataaacattgtcttttaccactctggcctcgctggacagtgacaaaacaagaaaacgttttctttctagaaaggtgataaacgaccaaaggcaatttttcagagacaaatgagagatttgagagttccaatgaagaattgggtgagggggatcattgggtaagggaattgggttaaaatgttcttttctttgacactctttcaatgatgaaagagcgtgtaatttatgctacaagtgccagaattgatcaccatgttcagcaagccactctcaagctgtggtaataaacacacaggcttgggaggcaccagcggccccactcatacagtgacaaggatttgtgatgggaaaaaggaggtgccatgtttggaaatgcaggggtgagctctggtttctcctggggttctggaatatctcagccctcaaaatagaggagactcaagtgcactgattctctaaaaggtgtcatcttcagaatatacttgccatcaagtatttcagggggcgggagggtcccatgagaagaaactatttttctattctccaaagctgtctggatgttggagggtggtgtgaatgctgactgaggaggtgcagagaacaggggcaggggattttaaatcacagcagaccatccagtggaatcctgtatcatctgatctgaacatcaatgaagacagagagaggaatttcattcagaaaggattccatagccccacatctagtcacacgggcattcctcttattttatcagggtctgttttcccccaacccagtgaaaccggtgagtgtgtaactcttgggaagattcttttctaaatacaggtataaagagaaggtggagggtgcgggtgcatggaagaaatactatgtgtgaagcagattcaccttcctgggaccggtgacatggtggtgacagtcaatggcttggacagacagacgggctcagtggcatttggaaccctctttggtgccctcccattctctctggaattgtttcaagtctgctggttttcaaacaagaaaagacctttctggccatagggagaatagcagggagtctatgttttggtggttacattggaaacatcttaagcaagagagggaaagttgattttaggcacacatgtaccctccttgacagcaggaactcagacttcaatcttgggggtctaagaccagaatattttccttctgccagaaaagaatcttgcacatatactcctgaggcatgagtgtgtggtccatggcaagaaatagctaaaggctgctttccaggacccaaagccccatttaatgcaagaaccagagaagtgttctaggccattagtggacaatgtcatgtttggagaaagataacaacacaaataatgtaacctttccttaaaaggcagaactcaatccattttatttgatgcttattctaaccctaaccctgggtcacctggaatgaagaactctatgaataatatttgattttacaacgtgttatggttatgtgaaaactaaacatttgccttttataaagactgacaaaatataaatctttattctaaccctatccccaaaactagccaggccacaccccagatgttcttattgactattgggaagatagaaaaggcgttgtgttttttgtttttttgttgttgttgtcattgttgtttttttcagaagaccagtgtctcagttctgtcttagtagtaccacacccgtaaccgtgttttaaaagtttgttttagcctagagacagatcatacgagttcaacaatgtacagtgtgattgaaaagacaggttggtgtctatttttctttttaaaatatctgaatgtgtatttgtaatacgtaaaggtaaaaaaaaatagtgccaaaaatgtgcaaggcatctcattacagctcatgtacgtctgtttttataagatcaatattaaaacccattgggattaaatatttttgaataggatacactcttgagaaactcgagaatggactgagccttcctacaagccactctttgtttttaaaacagtggggaaatacgtttacagagattgtgagcttcagagaatgcatgtgatggtgtgtattacatgctaattcatataagctgtatctgtcagctaccaccctgtgctttaaaaatgcacacactcaaccctctttagcttggagctcagctttttgctttttttttttttttttttgtagaattatttagctaacataagtattctgattgctacctgatggccattcttacttagtttcatagatgtgctttaactatgatcctttgaagctcaccccttggagagcctacagaacctcaggctgatagctttgaagactgccaaacagcccagaaggaagcaaagcatctgcataatcaggagggttgtataacaagtagtgatttggcaaatatgtgggtagctttaggctgaggcacgggcctcaggcaaaaatgcccttcgagtgaatccgaagggcatgatcttcctatgtccttgactaggcatgacgagtcatttgaggtcagatattatttgagttgttcagcacccccaaaggtaggcattctcctgggaaattttcatttccattttatcgccaaacaaaataaaaagcaaaacaaactttttaagctagaataatgaaattaagtcattttccactttgtatatattgatgctaataaaacagatg

SEQ ID NO: 5914 - DNA, 396 bp, Homo sapiens
  SIMILAR (175)..(231): 891254mologous to Eimeria tenella ribosomal protein S3a,accession number AF042107,Smith-Waterman Score=84.
gccatggtcaaaaatggcagacaatgattgaagctcacgttgatgtcaagactaccgatggttacttgcttcgtctgttctgtgttggctttactaaaaaacgcaacaatcagatacggaagacctcttatgctcagcaccaacaggtccgccaaatccggaagaagatgatggaaaatcatgaccggagaagtgcagacaaatgacttgaaagaagtggtcaataaattgtaagtgtttctttgcttcctcacacaacacaaccttgagtattggattattcctgagatgagagaacgcatatgagacaaggtaaaggtctgtggaaatcctgtctgtgaatccttctagctatatctctttaagtgaaagagtgttaagtactcagtaaatatg

SEQ ID NO: 5915 - DNA, 681 bp, Homo sapiens
  SIMILAR (425)..(378): 811254mologous to Homo sapiens super cysteine rich protein; SCRP,accession number U63332,Smith-Waterman Score=105.
ggaccctggtaagccaacggggacgatgtcagaaagtggtctggagcttcagaaggaccctgcaggtaagcacgtaaccttatttggaaataaggtctttgcagatgtaattcgtcagatggggtcatattggattggggtgggccttaagtccaatgactggtatcttcctaagaaggtcatgtggaagatgcagagagacacactcagagaagaatgccatgtgatgatgggggcaggtaggagaactggacaaagagttcagggtgcatttggaggattgcagggcagggacaaggaaaagctgcaatacctggacaagtccctgatgacagctcagcatcaggacctactgtgtgccaggtagttcggcggcggcagcagcagcatcagcgacagcagcagcacaggcagcagcagcacctgggagctagttagaaatgcagacgcttggatcccatcccaggcctacccagtcagagtctacattttaacaaggtccccaggtgtctcattgaccaccaggataccctttcttatgcatcagaagggcatcaccagcatagtcttggcttcagctctccactcctgcataaaatgtgtatgttcccctgcctctggaacctttattgttggtggtactgctgctgctgctgatgatgatgatatttagttggtttt

SEQ ID NO: 5916 - DNA, 3308 bp, Homo sapiens
  SIMILAR (743)..(2671): 1001254mologous to Homo sapiens dJ268D13.1.3 (seizure related gene 6 (mouse)-like (KIAA0927) (isoform 3)),accession number AL023513,Smith-Waterman Score=3465.
aaaggaagggagggagggagaaaggagaagttggtttagaggccagccggacgagctttgggcaccgcccttaggagggccaccctcagagtctgacagcaggtgaaggtcctaaatctccccaaactaactggtgtcttttctcctcttccaagatgctcttcccgagggagatgctagccctttgggtccttacctcctgccctcaggagccccggagagaggcagtcctggcaaagagcaccctgaagagagagtggtaacagcgccccccagttcctcacagtcggcggaagtgctgggcgagctggtgctggatgggaccgcaccctctgcacatcacgacatcccagccctgtcaccgctgcttccagaggaggcccgccccaagcacgccttgccccccaagaagaaactgccttcgctcaagcaggtgaactctgccaggaagcagctgaggcccaaggccacctccgcagccactgtccaaagggcagggtcccagccagcgtcccagggcctagatctcctctcctcctccacggagaagcctggcccaccgggggacccggaccccatcgtggcctccgaggaggcatcagaagtgcccctttggctggaccgaaaggagagtgcggtccctacaacacccgcacccctgcaaatctcccccttcacttcgcagccctatgtggcccacacactcccccagaggccagaacccggggagcctgggcctgacatggcccaggaggccccccaggaggacaccagccccatggccctgatggacaaaggtgagaatgagctgactgggtcagcctcagaggagagccaggagaccactacctccaccattatcaccaccacggtcatcaccaccgagcaggcaccagctctctgcagtgtgagcttctccaatcctgaggggtacattgactccagcgactacccactgctgcccctcaacaactttctggagtgcacatacaacgtgacagtctacactggctatggggtggagctccaggtgaagagtgtgaacctgtccgatggggaactgctctccatccgcggggtggacggccctaccctgaccgtcctggccaaccagacactcctggtggaggggcaggtaatccgaagccccaccaacaccatctccgtctacttccggaccttccaggacgacggccttgggaccttccagcttcactaccaggccttcatgctgagctgcaactttccccgccggcctgactctggggatgtcacggtgatggacctgcactcaggtggggtggcccactttcactgccacctgggctatgagctccagggcgctaagatgctgacatgcatcaatgcctccaagccgcactggagcagccaggagcccatctgctcagctccttgtggaggggcagtgcacaatgccaccatcggccgcgtcctctccccaagttaccctgaaaacacaaatgggagccaattctgcatctggacgattgaagctccagagggccagaagctgcacctgcactttgagaggctgttgctgcatgacaaggacaggatgacggttcacagcgggcagaccaacaagtcagctcttctctacgactcccttcaaaccgagagtgtcccttttgagggcctgctgagcgaaggcaacaccatccgcatcgagttcacgtccgaccaggcccgggcggcctccaccttcaacatccgatttgaagcgtttgagaaaggccactgctatgagccctacatccagaatgggaacttcactacatccgacccgacctataacattgggactatagtggagttcacctgcgaccccggccactccctggagcagggcccggccatcatcgaatgcatcaatgtgcgggacccatactggaatgacacagagcccctgtgcagagccatgtgtggtggggagctctctgctgtggctggggtggtattgtccccaaactggcccgagccctacgtggaaggtgaagattgtatctggaagatccacgtgggagaagagaaacggatcttcttagatatccagttcctgaatctgagcaacagtgacatcttgaccatctacgatggcgacgaggtcatgccccacatcttggggcagtaccttgggaacagtggcccccagaaactgtactcctccacgccagacttaaccatccagttccattcggaccctgctggcctcatctttggaaagggccagggatttatcatgaactacatagaggtatcaaggaatgactcctgctcggatttacccgagatccagaatggctggaaaaccacttctcacacggagttggtgcggggagccagaatcacctaccagtgtgaccccggctatgacatcgtggggagtgacaccctcacctgccagtgggacctcagctggagcagcgaccccccattttgtgagaaaattatgtactgcaccgaccccggagaggtggatcactcgacccgcttaatttcggatcctgtgctgctggtggggaccaccatccaatacacctgcaaccccggttttgtgcttgaagggagttctcttctgacctgctacagccgtgaaacagggactcccatctggacgtctcgcctgccccactgcgtttcggaggagtcctgtttaatgtgacaacccagggctgcctgaaaatggataccaaatcctgtacaagcgactctacctgccaggagagtccctcaccttcatgtgctacgaaggctttgagctcatgggtgaagtgaccatccgctgcatcctgggacagccatcccactggaacgggcccctgcccgtgtgtaaagttaatcaagacagttttgaacatgctttagaagcagaagcggcagcagagacgtcgctggaaggggggaacatggccctggctatcttcatcccggtcctcatcatctccttactgctgggaggagcctacatttacatcacaagatgtcgctactattccaacctccgcctgcctctgatgtactcccacccctacagccagatcaccgtggaaaccgagtttgacaaccccatttacgagacagggggaacccaaaaggtttagggtttcatttaaaaagaggtaccctttaaaaaggggcttgtgaactcaaccccaatttccccgagacatttatccaaaggccctgggggccttgatttaaacccccaaaaggcggctgttttttggttaaactttttaacaaagggttacgggttttttccccggattttataaattttaaaagtg

SEQ ID NO: 5917 - DNA, 1188 bp, Homo sapiens
  SIMILAR (970)..(1179): 941254mologous to Homo sapiens dJ268D13.1.1 (seizure related gene 6 (mouse)-like (KIAA0927) (isoform 1)),accession number AL023513,Smith-Waterman Score=371.
atggacataaagatggaaatagtagacactggagactccaaagatttggcggacctgttgatgctaagcataagaagtcttccatatttgattgttgcattttttagtaaaaccaacacagaacagacaaagcaagtaaccattggtagtcttgacatcaacatgagcttcgatcactgtctgccattttttgaccatggaacacattttgtcatgggtaagattcatgccatggaagttcgtcagtgtccccaccctccccaaattcatgtctgccgaaaagctcaggatgtaaccttatttggaaataaggtctttgcagatgtaattcgtcagatggggtcatattggattggggtgggccttaagtccaatgactggtatcttcctaagaaggtcatgtggaagatgcagagagacacactcagagaagaatgccatgtgatgatgggggcagagagccagactggacaaagagttcagggtgcatttggaggattgcagggcagggacaaggaaaagctgcaatacctggacaagtccctgatgacagctcagcatcaggacctactgtgtgccaggcccacacacatccgaggcattgttcttgttggctgcgagagctcgttaggctctgggcagaggctggctggactccaggaggcagacatcaagccccacaactcaaagaatggaggagcctggggcttggcattagatgatgccagtccactcctccgcatgcactggggctctgatgcccacctctccagaggtcaagctaataccaaggccaaggcccccaccatcaatcacaatgttagcatggagtatcttgctaacactggcgttgcccaaggaccccagctcctaaagtacaagaagtgcgaaaggaaggctgtccttgttcaacgaggctacaggaaaagaagaggccttagaggagagctgagcttcagttcgggcaagaaggtatcaaggaatgactcctgctcggatttacccgagatccagaatggctggaaaaccacttctcacacggagttggtgcggggagccagaatcacctaccagtgtgaccccggctatgacatcgtggggagtgacaccctcacctgccagtgggacctcagctggagcagcgaccccccattttgtgagaaaaagctcatggtctgcatgctctaa

SEQ ID NO: 5918 - DNA, 762 bp, Homo sapiens
  SIMILAR (760)..(65): 581254mologous to Rattus norvegicus v-fos transformation effector protein,accession number M84716,Smith-Waterman Score=518.
ttttttttttttttttttcacaaatagcactttttatttgccactatttgaagtctgaactttaaacagattcttggactggtggttcatatccatcagctcgttcaactttagcacctgtctcgtccccaagtggctttttccagaaactactgcccttccacccatggaagctcccaatgagctttcccaaattcaaaacttggggcttcttcagcatttttactttttctaacggaagacatcatgggagaggataaaataagattggcaaagcccttttcctatgtcttttcccaatgcttgtctgggaatcaaatttattggaccacttcctttcaaagtcatttgtctggcacctctcgggtcaatgaatttccatcatctgtctgccggaatttggcggacctgttggtgctgagcataagagggtcttccgtatctgattgttgcgttttttagtaaaaccaacacagaacagacgaagcaagtaaccatcggtagttcttgacatcaacgtgagcttcaatcattggtctgccatttttttgaccatggaacacattttgtcaccgggtaagatcccatgccatggaaagtagataaggcagtgtattaccctgaaacaaacctcagtaatcagcttgaattttctaaatgcaactgcatcattctggcaatcgagcagactcacttcaaacacacgacccttgagaccatcagagacaaaattggttccttgggtcctggtgacgagcgtct

SEQ ID NO: 5919 - DNA, 417 bp, Homo sapiens
  SIMILAR (5)..(373): 751254mologous to Homo sapiens non-muscle myosin light chain,accession number M22919,Smith-Waterman Score=471.
  misc_feature (1)...(417): n = a,t,c or g
aaaaggtcccggagagctgagccacaagatgtgtgacttcaccgaaaaccagaccgcagagttcaaggaggccttccagctgttggaccgaacagagatgaatgtgaaggtgctggactttgagcactttctgcccatgctgcagacaggggccaagaacaaggaccagggcacctatgaggattatgtcgaaggacttcgggtgtttgacaaggaaggaaatggcaccgtcatgggtgctgaaatccggcatgttcttgtcacactgggtgagaagatgacagaggaagaagtanagatgctggtggcagggcatgaggacagcaatggttgtatcaactatgaagagctcgtccgcatggtgctgaatggctgaggaccttcccagtctccccagagtccgtgcctttccctggg

SEQ ID NO: 5920 - DNA, 856 bp, Homo sapiens
  SIMILAR (63)..(656): 901254mologous to Homo sapiens myosin light chain 1 slow,accession number M31211,Smith-Waterman Score=946.
tcggcactagcgcaggagatgggtgcccccatccgcacactgtcctttggccaccggacatcatgcctcccaagaaggatgttcccgtgaagaaaccagcagggccctccatctccaaacctgctgctaagccagcagcagcaggggctcctccagccaagaccaaagctgagccagctgtcccccaggcccctcagaaaacccaggagcctccagtcgatctctccaaagtggtgatcgagtttaacaaggaccagctggaggagttcaaggaggccttcgagctgtttgaccgagtgggggatggcaagatcctgtacagccagtgtggggacgtgatgagggccctgggccagaaccccaccaacgccgaggtgctcaaggtcctggggaaccccaagagtgatgagatgaatgtgaaggtgctggactttgagcactttctgcccatgctgcagacagtggccaagaacaaggaccagggcacctatgaggattatgtcgaaggacttcgggtgtttgacaaggaaggaaatggcaccgtcatgggtgctgaaatccggcatgttcttgtcacactgggtgagaagatgacagaggaagaagtagagatgctggtggcagggcatgaggacagcaatggttgtatcaactattgaagagctcgtccgcatggtgctgaatggctgaggaccttcccagtctccccagagtccgtgcctttccctgtgtgaattttgtatctagcctaaagtttccctaggctttcttgtctcagcaactttcccatcttgtctctcttggatgatgtttgccgtcagcattcaccaaataaacttgctctctgggccctcgg

SEQ ID NO: 5921 - DNA, 758 bp, Homo sapiens
  SIMILAR (119)..(298): 951254mologous to Homo sapiens smooth muscle myosin alkali light chain,accession number U02629,Smith-Waterman Score=302.
  misc_feature (1)...(758): n = a,t,c or g
gcacggatattccgggtcgactcacgcgtncggaaaagggcccggagagctgagcagtctatatgtgtgacttgaccgaaaaccagaccgcagatctgatcccaagcactggagttcaaggaggcgcttccagctgtttgaccgaacaggtgatggcaagatcctgtacagccagtgtggggatgtgatgagggccctgggccaaaaccctaccaacgccgaggtgctcaaggtcctggggaaccccaagagtgatgagatgaatgtgaaggtgctggactttgagcactttctgccccatgctgcagacagtggccaagaacaaggaccagggcacctatgaggattatgtcgaaggacttcgggtgtttgacaaggaaggaaatggcaccgtcatgggtgctgaaatccggcatgttcttgtcacactggggtgagaagatgaccgaaggaggatgttcatatgctggtggcagggcatgaggacagcaatggttgtatcaactatgaagcgtttgtgaggcatatcctgtcggggtgacgggcccatggggcggagctcgtccgcatggtgctgaatggctgatgaccttcccagtctccccagagtccgtgcctttccctgtgtgaattttgtatctagcctaaaggttccctaggctttcttgtctcagcaactttcccatcttgtctctcttggatgatgtttgccgtcagcattcaccaaataaacttgctctctgggccaaaaaaaaaaa

SEQ ID NO: 5922 - DNA, 408 bp, Homo sapiens
  SIMILAR (103)..(402): 381254mologous to Xenopus laevis p75-like transmembrane protein fullback,accession number AF131890,Smith-Waterman Score= 161.
atgattcacaactctagccacagcaaagtcctggcctatgtgggtaagcatccgttgatccagatcatgggcactgggcaggctgggagctggcgctcacataaacaaagacagcagctggccaaagctcgaactgcagagctgggaggtctcaacaaggaccagatgcatggggatagcagtgtcttcctggactctcctagcagtctggagccctgtgcccccagccagggaccacatcctgagcttgggtgccgacttcaccttgatctccctcggcagcaccaggagaaagtggagcggctgttagaggtgtcacgtgaacctgacaagggctggcggggactggcagaccatctgggctaccaagctgaggctgtagaaatcatggcccaaggccaggtgtga

SEQ ID NO: 5923 - DNA, 621 bp, Homo sapiens
  SIMILAR (493)..(612): 901254mologous to Homo sapiens FLJ00002 protein,accession number AK000002,Smith-Waterman Score=175.
tcggctggggaaaaagctccttgctggctgccatcgcgggagagctccacagatgggaacaagtacaatgtggtggccatactctccactgagctcctgaacaaatgctgcgtgggcatgtgacagtgcgggggctgtccaagggctttggcctggccacccaggaaccctggatccagtttgccaccatccgagacaacatcctctttgggaagacatttgatgcacagctgtacaaggaggtgctagaagcctgcgccctcaatgatgacctcagtatcctgcctgctggagaccagacaaaggtgggggagaagggtgtcacccttagcggaggacagcgtgcccggattgcccttgctcgtgctgtctaccaggaaaaggagctttatttcctcaatgaccctctggccgctgtgaatgcaaatgtggccaaccccctgctgcacaggggcatcctgggcatgttgagttaccccacacggtgctctcaccccccgcactgagtacctgaaaagggctgacgcggtgctgttaatggaggccgggcgcctcatccgggctggacctccctttgagattctgcccctggtacaagctgtccccaagtcgacgcggccg

SEQ ID NO: 5924 - DNA, 952 bp, Homo sapiens
  SIMILAR (1)..(363): 1001254mologous to Homo sapiens FLJ00002 protein,accession number AK000002,Smith-Waterman Score=623.
  misc_feature (1)...(952): n = a,t,c or g
ctcactgccaccaaggtgttcacggccctggcactggtgcgaatgctcattcttcctctcaacaacttcccttgggtgatcaatggtctcctggaggccaaagtgtccttggaccggatccagcttttcctcgaccttccaaaccacaacccccaggcctactacagcccagatccccctgcagagccatctacagtattggagctgcatggagccttgttctcctgggacccagttggaaccagcctggagaccttcatcagtcatctcgaagtgaaaaagggtatgctggtgggcatcgtggggaaggtcggctgtgggaagagctccctgctggctgccatcgctggagagctccacagatgggaacaagtacaatgtggtggccatactctccactgagctcctgaacagatgctgcgtgggcatgtggcagtgcgggggctgtccaagggctttggcctggccacccaggaaccctggatccagtttgccaccatccgagacaacatcctctttgggaagacatttgatgcacagctgtacaaggaggtgctagaagcctgcgccctcaatgatgacctcagtatcctgcctgctggagaccagacagaggtgggggagaaagtgtcacccttagcggaggacagcgtgcccggattggcccttgtcgtgctgtctaccaggaanaaggagctctatctcctgatgaccctctggccgctgtgnatgcaatgtggccaaccacctgctgcacggtgcatcctgggcatgctgagctacaccacacggctgctctgcacccaccgcnctgagaaccctggaaaggccnnnaccgtgctgcttgatgaaggccgggccgcctcatcccgggctggaacctcccctctgagatcttgcccatggtaacagctgnttcccaagtcgaagccgggcgcaaatccagaattta

SEQ ID NO: 5925 - DNA, 789 bp, Homo sapiens
  SIMILAR (468)..(635): 261254mologous to Homo sapiens FLJ00002 protein,accession number AK000002,Smith-Waterman Score=48.
cactcgaacctcgttgcatgcagccttgttctcctgggacccagttggaaccagcctggagaccttcatcagtcatctcgaagtgaaaaagggtatgctggtgggcatcgtggggaaggtcggctgtgggaagagctccctgctggctgccatcgctggagagctccacagatgggaacaagtacaatgtggtggccatactctccactgagctcctgaacagatgctgcgtgggcatgtggcagtgcgggggctgtccaagggctttggcctggccacccaggaaccctggatccagtttgccaccatccgagacaacatcctctttgggaagacatttgatgcacagctgtacaaggaggtgctagaagcctgcgccctcaatgatgacctcagtatcctgcctgctggagaccagacagaggtgggggagaagggtgtcacccttagcggaggacagcgtgcccggattgcccttgctcgtgctgtctaccaggaaaaggagctctatctcctcgatgaccctctggccgctgtggatgcagatgtggccaacccacctgcttgcacagggtgcaatccctggggcaatgcctgagcctaacaccacaccgggctggcttctggcaccccaacccgccacctggaaggtacccctgggggaagagggggggccttgaaccgcccggggtggcctggccttgaaatgggaagccgggcgcctatccgggctggacctcctctgagattctgccactggtacaagctgtccccaagtcgacgcggccg

SEQ ID NO: 5926 - DNA, 497 bp, Homo sapiens
  SIMILAR (367)..(495): 1001254mologous to Homo sapiens endocrine regulator,accession number AF121141,Smith-Waterman Score=225.
ggcaccgcggccgccgggcctcgccgtccccgccacgggttcgtcgcgtctccccgtccccgcctcgggcccgtcgcggctccccgtcgccaccgcggggccgacgactcttcccgccgggcccggccggcttcagaggcagcagccgaggggagtcccgcgccgactatgcccgggacggccgcggagaccatccaggcgacagcggcagccggagacgctctcctggtctgtgttctgactctttggaaaagagcttaaggatcactgttggcaatgaccacttctgtgttagcacaccagaacggcgacggcttagtgatcggctggggtcaccagtggataatctggaagacatggacaggggatgacctgactgatgattctgtcttcactcgaagctcccagtgctctcggggtcttgagcgatatatttcccaggaggaagggcctctcagtcccttcttgggacaacttgatgaggactaccgaacaaa

SEQ ID NO: 5927 - DNA, 1401 bp, Homo sapiens
  SIMILAR (1115)..(1186): 331254mologous to Homo sapiens FLJ00002 protein,accession number AK000002,Smith-Waterman Score=40.
atgctcattcttcctctcaacaacttcccttgggtgatcaatggtctcctggaggccaaagtgtccttggaccggatccagcttttcctcgaccttccaaaccacaacccccaggcctactacagcccagcagatgcttgtgtggcttctttgcagggtatgctggtgggcatcgtggggaaggtcggctgtgggaagagctccctgctggctgccatcgctggagagctccacaggctgcgtgggcatgtggcagtgcgggggctgtccaagggctttggcctggccacccaggaaccctggatccagtttgccaccatccgagacaacatcctctttgggaagacatttgatgcacagctgtacaaggaggtgctagaagcctgcgccctcaatgatgacctcagtaaatgtcaccaccactaccctacccagaaaaaagaagtccgaaaggaaaaacagtattctaaaaaatgttccctttccctcacctatcccccagatcagtacagctcagacaccattggagaactgaggtctaagcagcaaagcaggctgcgtgggcatgtggcagtgcgggggctgtccaagggctttggcctggccacccaggaaccctggatccagtttgccaccatccgagacaacatcctctttgggaagacatttgatgcacagctgtacaaggaggtgctagaagcctgcgccctcaatgatgacctcagtaaatgtcaccaccactaccctacccagctgcggcggcgcgctccgagcctgcgtctagggcgcccccgggtcagagctgtcgccgtggccgccgctgcaagaaccatgtaccgcagcagcgctcgctcctccgtctcttcccaccggcctaaagacgacggcgggggcggcccgcgcagcggccgcagctctggctcctcctcaggcccggctcgccgcagctcaaagccgcctccgccctccggctcctcgtcgcggaccccggctcgccgaccccgctcgccctcagggcaccgcggccgccgggcctcgccgtccccgccacggggtcgtcgcgtctccccgtccccgcctcgggcccgtcgcggctccccgtcgccaccgcggggccgacgactcttcccgccgggcccggccggcttcagaggcagcagccggggggagtcccgcgccgactatgcccgggacggccgcggagaccatccaggcgacagcggcagccgggtaatcccacccctcgtccaggactccctccatcccccagtcccctcccccggaattcccgtttccagaaacgcccggggcctccagaccagggtcctaagcgcgaagcctccggccaactccctcggggatgccgagcctggaggcttctgtcagacccgggagcgttga

SEQ ID NO: 5928 - DNA, 918 bp, Homo sapiens
  SIMILAR (88)..(912): 521254mologous to Homo sapiens Human protein clone HP10574,accession number Y94897,Smith-Waterman Score=764.
atgagcttccttagaattaccccttcgacgcatagttctgtttcatctggacttttgaggcttagtatctttctactacttagctttcctgactcaaacggaaaagccatttggacagctcacctgaatataacatttcaggttggaaatgagatcacatcggaattaggagagagtggagtgttcgggaatcattctcctctggaaagggtgtctggtgtggtggcacttcctgaaggatggaatcagaatgcctgtcatcctttgaccaatttcagcaggcccaaacaggcagactcatggctggccctcatcgaacgtggaggctgtacttttacacataaaatcaacgtggcagcagagaagggagcaaatggggtgatcatctacaactatcaaggtacgggcagtaaagtatttcccatgtctcaccaggggacggaaaatatagtcgcggtgatgataagcaacctgaaaggcatggaaattttgcactcgattcagaaaggagtctatgtgacagtcatcattgaagtggggagaatgcacatgcagtgggtgagccattacatcatgtatctatttaccttcctggctgccacaattgcctacttttacttagattgcgtctggagacttacacctagagtgcccaattctttcaccaggaggcgaagtcaaataaagacagatgtgaagaaagctattgaccagcttcaactgcgagttctcaaagaaggggatgaggaattagacctaaatgaagacaactgtgttgtttgctttgacacatacaaaccccaagatgtagtacgcattttaacttgcaaacattttttccataaggcatgcattgacccctggcttttagcccataggacatgtcccatgtgcaagtgtgacatcctgaaaacttaa

SEQ ID NO: 5929 - DNA, 567 bp, Homo sapiens
  SIMILAR (172)..(288): 531254mologous to Deinococcus radiodurans zinc metalloprotease, putative,accession number AE001941,Smith-Waterman Score=124.
ggggaagactgatcgccggcaggccggctcggaccatgagcacagttccaagaatgcagggatgaggaggagccgggctgggctgttgagtccaggctgagcccacacatcatgttcctctctcagagcatcttgacaggagggaaccatctctgtgggacccgcctctgccatgaaattgcccatgcctggtttggcctaaccatcggggcccgagactggacggaggagtggctgagtgaaggcttcgccactcacttggaggatgtgttttgggccacagcacagcagctggccccctatgaggcccgggagcagcaggagctgagggcttgtctgcgctggcgtcgcctccaggacgagatgcaatgctcccccgaggagatgcaggtgttaagatgcaagacgcagacctatttgaaatgtgttttggctgtggaacgggcaggtctttggttgattgaatgtggagaagaggaaaatgagtgtatccagaatgactttgaggtttttgagttggacagttgggtagatggtgatcccatttgtgtgatggtaaagacatga

SEQ ID NO: 5930 - DNA, 318 bp, Homo sapiens
  SIMILAR (182)..(271): 1001254mologous to Homo sapiens unnamed protein product,accession number AK000370,Smith-Waterman Score=164.
tcatgtggagctcccaggaatgtctggcagctggaaagtgctctcatgtgggagccattgaccccactcttcactctttccactggaggactggaagcccaggaaggtgccggtcgctaaccacctctggtcctctaccctcctaaggctcagagcattcttgacgagctcagagcaacccatcccgtgggtggagctcggaggaaaagtcagcatcaactgtgccaagactgggtactcagcgacagtgatattccacacgaagcctttcagctcgtaagaactgatttgtgtgtacttcacgttcagtgctatcat

SEQ ID NO: 5931 - DNA, 744 bp, Homo sapiens
  SIMILAR (34)..(141): 751254mologous to Homo sapiens unnamed protein product,accession number AK000370,Smith-Waterman Score=148.
ccaccgcttttggtgaaccgacccacgcgtacggaagttcccaaggacagggtcaagcctaagaggactgctttccgctctcctgccagctgtcgcaaacaccccatggccgatgacccttcccaaaagctacaaactaaggtttgtggctgagcaagtgtcccatcacccacccatctcctgcttctactgtgagtgcgaggagaagagactgtgcgtcaacactcatgtatggaccaaaagcaagttcatgggcatgtccgcgggggtctctatgataggggaaggtgtgttgaggctcctggaacacggggaggagtacgtattcaccctgcctagtgcctacgccgggtccattctcaccatcccgtgggtggagctcggagaaaaagtcagcatcatctgtgccaaggctgggtactcagcgacagtgatattccacacgaagcctttctatggagggaaagtccacagggttcccgcagaagtgaagcacaacccaaccacccccattgtttgtaaagcccatggggaatggaatggtactttagagttcccctacaacaatggagaaaccaaagtcatcgacacaaccacactgccagtgtatcccaagaagatcagacctcttgagaagcagggacccatggagtccagcaacctctggcgggaggtgacccgatacatgcggttggggaacattgacgcagccgccgagcataagcggcccctggaggagaagcc

SEQ ID NO: 5932 - DNA, 540 bp, Homo sapiens
  SIMILAR (7)..(300): 971254mologous to Homo sapiens cadherin-12,accession number L34057,Smith-Waterman Score=498.
atggcgctccattccgacttagacaagggagagggcactgcgaaatacaccctctcaggagatggcgctggcaccgtttttaccattgatgaaaccacaggggacattcatgcaataaggagcctagatagagaagaaaaacctttctacactcttcgtgctcaggctgtggacatagaaaccagaaagcccctggagcctgaatcagaattcatcatcaaagtgcaggatattaatgataatgagccaaagttttgggatggaccttatgttgctactgtcccagaaatgtctcctgtggataaaacaattaggatttttcttgggccaactagaataattagggctgcagagttggagcctttatataaggagtttgcagctcatatccgaagagagaaatgtatttcgaaagtcaaaagtgtagatttttttacttttagttttggagtacctgtgcaggatgtgcaggtttgttacattgataaacatgtgccagggtggtttgctgcacctatcaacccatcacataggtattaa

SEQ ID NO: 5933 - DNA, 700 bp, Homo sapiens
  SIMILAR (59)..(112): 331254mologous to Mus musculus Q300 protein (AA 1- 77),accession number X52164,Smith-Waterman Score=40.
agcacgtgcactgaaaatcaatttaagtatttactcggagttgtcttgaaggcccaatgggaaatgtcagtaagggcacatgagaaaacactttaagaacctattcttccaaagatctttccagtatcttatgacaacacagtaaattatacccactccaactgcaaaagctgaaactactctgctttctcacttacctacacttttgactttccaaatacatttctctcttcggatatgagctgcaaactccttatataaaggctccaactctgcagccctaattattctagttggcccaaggaaaaatcctaattgttttatctaaggagacgggaattttccaatactgtaggagggcatgtgtgtgtgtttgctttaagggaaggctgttttgggtaataaaaagtcactggaggggtccataaatttcatgtttaacacatccagtgtacatgaagtaggcaccgagttaaactatttgtctactatatagcatggtcatcttaaaagccttattttttcctcaaaatattaactttatttttctccctgtaaaatcaagacacagttaaaatggtagccttcctcattttctgggaatactttctaacaagatatgcttctttccaattggacttctaaatttctagcaattctaacagtgcataaaagaggcaaccccaaaagtgtagcaggt

SEQ ID NO: 5934 - DNA, 4167 bp, Homo sapiens
  SIMILAR (1089)..(3470): 1001254mologous to Homo sapiens Br-cadherin,accession number L33477,Smith-Waterman Score=4124.
cccgcctaatcttcacccgctgctaggctcgtttaatgagtcttctgagagctaaggagtcctcggattcattcaaagcattctacaatgaacgctaggggggaaaaagaacaaacaaaatacatttcaaatataggattcaattacttttcactactcaatgatgtgtcaaaggcacgctgtgttttgttttgagggcggggagatgacaggagggaatcctgggcccccattggctcgccgctcgccgctgcagttgagctccagccgctccgagagcattattgatctgaagggtaaatgtggagggagccacagagaggggtccaggcttttctgagaagagaggcagcctcttccaggaagaaagtggtgtctactggctgcccggcctggagaaccttctttgaatgaaaacggacaaaatgcaaagcagtgcgttggcacagtgatttggaaaggggaaacagaagagaagggtctcaccttccgcgcaaggctgagctgttggcaccctgctgcggccgtcggtgctgctgctcctgcagctgccttttctgccatcagctttgttacctaacagcttggctcttttgggaatatagacaagctggaacccaggagcagttgggagttttaaagaatgccagcctttttaaagctttgatgtccagtgctatagaatcaagttactgtggaggtcaaaacaatttgagatacataagctggccttagaaaataaattgcctctaacttacagtgaggagctcaacataacagggaaaaggagcacaggatgcagctacttggagggtgttgattgaaaacttcgatctccccaccccattcacggttgatttgacggatttctcaccttgttcacagagaaaatttcaattaaggcccctttagatggaatataatacagcagaagccttttcatcaaaaggattaatgcctgcatcatcatttctgcaataaaacaagaagctaagtggtggaggccacagacacctcaaacctggattccacaattctacgttaagtgttggagtttttattactctgctgtaggaaagcctttgccaatgcttacaaggaactgtttatccctgcttctctgggttctgtttgatggaggtctcctaacaccactacaaccacagccacagcagactttagccacagagccaagagaaaatgttatccatctgccaggacaacggtcacatttccaacgtgttaaacgtggctgggtatggaatcaattttttgtgctggaagaatacatgggctccgagcctcagtatgtgggaaagctccattccgacttagacaagggagagggcactgtgaaatacaccctctcaggagatggcgctggcaccgtttttaccattgatgaaaccacaggggacattcatgcaataaggagcctagatagagaagagaaacctttctacactcttcgtgctcaggctgtggacatagaaaccagaaagcccctggagcctgaatcagaattcatcatcaaagtgcaggatattaatgataatgagccaaagtttttggatggaccttatgttgctactgttccagaaatgtctcctgtgggtgcatatgtactccaggtcaaggccacagatgcagatgacccgacctatggaaacagtgccagagtcgtttacagcattcttcagggacaaccttatttctctattgatcccaagacaggtgttattagaacagctttgccaaacatggacagagaagtcaaagaacaatatcaagtactcatccaagccaaggatatgggaggacagcttggaggattagccggaacaacaatagtcaacatcactctcaccgatgtcaatgacaatccacctcgattccccaaaagcatcttccacttgaaagttcctgagtcttcccctattggttcagctattggaagaataagagctgtggatcctgattttggacaaaatgcagaaattgaatacaatattgttccaggagatgggggaaatttgtttgacatcgtcacagatgaggatacacaagagggagtcatcaaattgaaaaagcctttagattttgaaacaaagaaggcatacactttcaaagttgatgcttccaaccttcaccttgaccaccggtttcactcggcgggccctttcaaagacacagctacggtgaagatcagcgtgctggacgtagatgagccaccggttttcagcaagccgctctacaccatggaggtttatgaagacactccggtagggaccatcattggcgctgtcactgctcaagacctggatgtaggcagcagtgctgttaggtacttcatagattggaagagtgatggggacagctactttacaatagatggaaatgaaggaaccatcgccactaatgaattactagacagagaaagcactgcgcagtataatttctccataattgcgagtaaagttagtaaccctttattgaccagcaaagtcaatatactgattaatgtcttagatgtaaatgaatttcctccagaaatatctgtgccatatgagacagccgtgtgtgaaaatgccaagccaggacagataattcagatagtcagtgctgcagaccgagatctttcacctgctgggcaacaattctcctttagattatcacctgaggctgctatcaaaccaaattttacagttcgtgacttcagaaacaacacagcggggattgaaacccgaagaaatggatacagccgcaggcagcaagagttgtatttcctccctgttgtaatagaagacagcagctaccctgtccagagcagcacaaacacaatgactattcgagtctgtagatgtgactctgatggcaccatcctgtcttgtaatgtggaagcaatttttctacctgtaggacttagcactggggcgttgattgcaattctactatgcattgttatactcttagccatagttgtactgtatgtagcactgcgaaggcagaagaaaaaagacaccctgatgacctctaaagaagacatcagagacaacgtcatccattacgatgatgaaggaggtggggaggaagatacccaggctttcgacatcggggctctgagaaacccaaaagtgattgaggagaacaaaattcgcagggatataaaaccagactctctctgtttacctcgtcagagaccacccatggaagataacacagacataagggatttcattcatcaaaggctacaggaaaatgatgtggatccaactgccccaccatacgattcactggccacatatgcctacgaagggagtgggtccgtggcagagtccctcagctctatagactctctcaccacagaaaccgaccaggactatgactatctgacagactggggaccccgctttaaagtcttggcagacatgtttggcgaagaagagagttataaccctgataaagtcacttaagggagtcgtggaggctaaaatacaaccgagaggggagatttttaaaaaagaaaaagaaacacaaatattaatagaaatctctctcacacacacacacacacacaaacacacacacacacacacactctttctgggacaagattcctttgattacctggtttctagtaagttactaaattaatcatattgtcagttttggtttattctgccaacacgagatacatcctataatgtgtacttgctttgttttgttgttttgttttttcacaatcacactgagacaagctcaggcctattcaatacaatttactgacatgacaacctagaacgaagatagctatgtggcatcacggtggaagagtgttagatttttcttaattccactaaagtgcctattgaaactcttatcatttaaagtggtgtacagtacactctgctgtgatggtattgcgggattcagagataaagacataaaacaaagacaccgtctttatgtcaagaagcaatagcgacactctgactctcctcattccttttgagaacaaaagaagaacactttctgatctccaccttcttctaattcaaaaggttttctttttcttttttaaactgtatgctaaaacgtatttgtttatcctatcctttcagaaaattgaaataaatatgaaaatatcaagttcaatatgtaagtccc

SEQ ID NO: 5935 - DNA, 922 bp, Homo sapiens
  SIMILAR (28)..(351): 921254mologous to Homo sapiens cadherin-12,accession number L34057,Smith-Waterman Score=508.
atggttgaaatttataatttgaaattcctccattccgacttagacaagggagagggcactgcgaaatacaccctctcaggagatggcgctggcaccgtttttaccattgatgaaaccacaggggacattcatgcaataaggagcctagatagagaagaaaaacctttctacactcttcgtgctcaggctgtggacatagaaaccagaaagcccctggagcctgaatcagaattcatcatcaaagtgcaggatattaatgataatgagccaaagttttgggatggaccttatgttgctactgtcccagaaatgtctcctgtgggacatgcgatgaagattgtgcacgctaccgtgagggcagaagcagataaaacaattaggatttttcttgggccaactagaataattagggctgcagagttggagcctttatataaggagtttgcagctcatatccgaagagagaaatgtatttggaaagtcaaaagtgtagatttttttacttttagttttggagtacctgtgcaggatgtgcaggtttgttacattgataaacatgtgccagggtggtttgctgcacctatcaacccatcacataggtattaagtccagcatgcattagctattttttgaataggatacaacttttatctgaaaagcgtatttcaaactttggaaactaaagcaaacattatatatgaccattaaaatatacatatacatatcatgataggtaaacattatatatgacaattctatgctatacataaatacataaagtctatgtgtataataaataccccatttgtcatagaaagacatactgtgtggtttagctacgattggaaaggtacagttctctaaatcaccatatgcacgttcttttagcaagttagggcctatttctatatagtaatgtgat

SEQ ID NO: 5936 - DNA, 981 bp, Homo sapiens
  SIMILAR (421)..(708): 401254mologous to Homo sapiens Br-cadherin,accession number L33477,Smith-Waterman Score=97.
tttttttttgcctgctgctatatctgaggttgtacttttgttctgatctttgtaacacctcaaaaaaaaaaaatgggttaagagaaggatgaacagaagaatggatatgagacctatctgataaggcaagcagattaatagacgaatggaggaatgtttggatgtatatgtatatgtgttcattgcagttttcaactttttgtgttgaaatttttataaaaagaagttggagaaataaaaaacaagaaaacagaaccataagatttttatttaacatttttgattaaaggaattgtattgcaaattatgactttttaattttgccaacatccttttaatggtgttctttctttgtccttctctttctcttcctctctctctccctctcttccctaaagctccattccgacttagacaagggagagggcactgcgaaatacaccctctcaggagatggcgctgggcccggtttttaccattgatgaaaccacaggggacaattcatgcaataaggagcctacgatagagaagaaaaacctttctacactcttcggtgctcagggctgtggacatagaaaccagaaagcccctggagcctgaatcagaattccatcatcaaagtgcaggatatttaatgataatgagccaaagttttggggatgggaccttatggttgctactggtccccagaaatggtcccctgtggggtgagtagggcaaatcaaaattctgtgagatacaatgagacctcttcaacattgactttttgcaggttgatgtaaacatcttatctatcatctaaaagaattatttttcaattctagaaaatacagttcttttcatttatttttgtaacttttttgtttttctttctgcttcattatgaagataactacaggaatatataacattagttcctgttttccaccctgtgaatttacctgaattcatagaatccttgcgtgctttaagcaaaaaatg

SEQ ID NO: 5937 - DNA, 1510 bp, Homo sapiens
  SIMILAR (100)..(1410): 571254mologous to Homo sapiens Human brain-specific transmembrane glycoprotein,accession number B09968,Smith-Waterman Score=1309.
atggctccaggacccttctcctcggccctcctctcgccgccgcccgctgccctgccctttctgctgctgctctgggcgggggcatctcgtggccagccctgccccggccgctgcatctgccagaacgtggcgcccacactgacaatgctgtgcgccaagaccggcttgctctttgtgccgcccgccatcgaccggcgcgtggtggagctgcggctcaccgacaacttcatcgccgccgtgcgccgccgagacttcgccaacatgaccagcctggtgcacctcactctctcccggaacaccatcggccaggtggcagctggcgccttcgccgacctgcgtgccctccgggccctgcacctggacagcaaccgcctggcggaggtgcgcggcgaccagctccgcggcctgggcaacctccgccacctgatccttggaaacaaccagatccgccgggtggagtcggcggcctttgacgccttcctgtccaccgtggaggacctggatctgtcctacaacaacctggaggccctgccgtgggaggcggtgggccagatggtgaacctaaacaccctcacgctggaccacaacctcatcgaccacatcgcggaggggaccttcgtgcagcttcacaagctggtccgtctggacatgacctccaaccgcctgcataaactcccgcccgacgggctcttcctgaggtcgcagggcaccgggcccaagccgcccaccccgctgaccgtcagcttcggcggcaaccccctgcactgcaactgcgagctgctctggctgcggcggctgacccgcgaggacgacttagagacctgcgccacgcccgaacacctcaccgaccgctacttctggtccatccccgaggaggagttcctgtgtgagcccccgctgatcacacggcaggcggggggccgggccctggtggtggaaggccaggcggtgagcctgcgctgccgagcggtgggtgaccccgagccggtggtgcactgggtggcacctgatgggcggctgctggggaactccagccggacccgggtccggggggacgggacgctggatgtgaccatcaccaccttgagggacagtggcaccttcacttgtatcgcctccaatgctgctggggaagcgacggcgcccgtggaggtgtgcgtggtacctctgcctctgatggcacccccgccggctgccccgccgcctctcaccgagcccggctcctctgacatcgccacgccgggcagaccaggtgccaacgattctgcggctgagcgtcggctcgtggcagccgagctcacctcgaactccgtgctcatccgctggccagcccagaggcctgtgcccggaatacgcatgtaccaggttcagtacaacagttccgttgatgactccctcgtcttacaggtgggtgcgggtgctgcagtcccagggcctcctcccaagcccagggggaccctccctcccacctgcccattcccttggccttcttgctcagccagggttctag

SEQ ID NO: 5938 - DNA, 606 bp, Homo sapiens
  SIMILAR (136)..(552): 701254mologous to Homo sapiens dJ738A13.1 (similar to TBP (TATA box binding protein)),accession number AL109801,Smith- Waterman Score=457.
atgagtgaaagccaggatgaagttcctgatgaagttgagaaccagtttatattgcgtctgcctctggaacatgcttgtactgtcaggaacctagcacgttctcaaagtgtcaagatgaaggataaactaaaaattgacttattgcgaagtttaagagttcactgggaagatatcaactttaatctttacttctcttcagctgatgggcgccatgcagttgttgaagtagaagatgtcccactagctgctaagctggttgacttgccttgtgttattgaaagcctgagaacgcttgataaaaaaaccttttataaaacagcagacatttctcagatgcttgtgtgcactgctgatggtgatatccacctttctccagaagaaccagctgcctctactgatcctaatatagtcaggaaaaaagaaagggggagagaagaaaaatgtgtctggaagcatggcactcatttccctacaggaacagttgcagcgttttctgaagaagtgaggagagccattggcgtggcccacaaaccttggattcaccatccagactgcagattggatgaaactgtgcacgtttttgtcccttcagttgccttatgttga

SEQ ID NO: 5939 - DNA, 505 bp, Homo sapiens
  SIMILAR (377)..(108): 281254mologous to Drosophila melanogaster BACN4L24.f,accession number AL121805,Smith-Waterman Score=105.
ttttaacatcatttattgctaacatgaattcaaagcaagtatacagtttattgatactagaacaaatcaggacatcaagacatgattgccatcctaaaatcttaatcttcagagaacaacatttccaccaggttggcctgaagacactcagattctaccagtttttgaggtgttccatacttaagtagtgtaggcactgctgttactttcaagttttttctgaagtcattatttggatctttccaataaggcttttctcctacttggcagtagatgaacacacatccttcactaatgtgcttcagcccctctcgtacgactggttcagctgcagctaactgaagaggtcaacagaagtcaggtgttcccttctggtcttagagccacgttaagggtaaggaccaaatcccagtcccgatttgcccctgcaccaccgcgcccgtaacaatggaaagcacatgtatttgctgaccaactcacgtatcctgtaagacactaatggtac

SEQ ID NO: 5940 - DNA, 516 bp, Homo sapiens
  SIMILAR (177)..(410): 271254mologous to Drosophila melanogaster BACN4L24.f,accession number AL121805,Smith-Waterman Score=97.
gcagagtcttggttccagacatccgcggagcaatctgagctgtccccaagtctccttctattaaatcctaccccgccctgccaagagcgctcttccttttaccaccttacccggatgatcttggaatctagttccttaaaacttctcactcccccagtaccattagtgtcttacaggatacgtgagttgctgaaccagtcgtacgagaggggctgaagcacattagtgaaggatgtgtgttcatctactgccaagtaggagaaaagccttattggaaagatccaaataatgacttcagaaaaaacttgaaagtaacagcagtgcctacactacttaagtatggaacacctcaaaaactggtagaatctgagtgtcttcaggccaacctggtggaaatgttgttctctgaagattaagattttaggatggcaatcatgtcttgatgtcctgatttgttctagtatcaataaactgtacccttgctttgaattcatgttagcaataaatgatgttaaa

SEQ ID NO: 5941 - DNA, 1405 bp, Homo sapiens
  SIMILAR (1058)..(1156): 311254mologous to Chlamydomonas reinhardtii vegetative cell wall protein gp1,accession number AF309494,Smith-Waterman Score=48.
atggctaaagagacaacaacaagtgttggcaaagatgtggagcaactggagctctcatacattgtcagcaggaatgtaaaacggtaccaccactatgtaaaaaggcctgagacaccttcagagcctgtctccccctccacaggtccaggaaccctggcagctgtgggcccctcagtggccagtctccttccccatatgcctgagccgtcatccccagagcccgtatcccctaccattggccctggaagcccgggagctgtgggcactcccacggccatggaacctctagcagccacaggcctcccagcagtctgccttcttccagacaggccagagacatgctcaaagatggtcccctcccccacagaccccagcagccccacagccatggacactcctgtagtctgtctgcctcccaacaaacctgagacacccccagagccagtcttctccgccatgggcccaggcatcctggtcgaggtgggcacctccatccttgtgggacccttggcatctgcaggtgcggggccatttcagaacttgacgccaaagccccaggcacactcgcaggaggcaccctcccagcctgtccctgtccacagaagcctaaggctctctcgaagctcggccaggaacacccctttcgacaggtccctctcctgcaggcacgggatggagctcgactctacttccttccccacatcccgaggcggccctcatagcctgcaccttcagccacagcggctgcacgtcgtgccaatggcccccttttggggaggtgagcgtgtccggcttcggaggagttccaccgggaccgtggaacggccccattggcaagaccattttcgcctacttttacgggttctaaggaccgccggggggaaaagctggtgccccgactgcgtgctaggctgaacccagtcgtacgagaggggcttgaagcacattagtgaaggatgtgtgttcatctacttgccaagtaggatgaaaagccttatttggaaagattccaaataaatgactttcagaaaaaaactttgaaagtaacaagccagtgcctacactacttaagtatggaacacctcaaaaacttggtagaatctcgagtgtcttcaggccaacctggtggaaatgttgttctctgaagattaagattttaggatggcaatcatgtcttgatgtcctgatttgttctagtatcaataaactgtatacttggctttggaattcatgttaggcaataaatgatgttaaaaaaaactgggcatgtgtctaaacaataggagtgctatttaaaatgcccatgaacctttagtttgcctgtaatacatggatatttttaagatataaagaagtcttcagaaatagcagtaaaggctcaaaggaacgtattcttgaaggtgac

SEQ ID NO: 5942 - DNA, 177 bp, Homo sapiens
  SIMILAR (177)..(4): 1001254mologous to Homo sapiens Human peptidase, HPEP-4 protein sequence,accession number Y90287,Smith-Waterman Score=306.
ctaaaaaaggcgtgagcagcggcgtctgcgaatgggaacatcaaagactctcctccgtctctcctcttcatcatcttcatctgattcatccatatctgctgaatcatcatcctcgtcttcctcctcttcctcctcctcctcttcttccatctcttcatattcatcaggacccatttc

SEQ ID NO: 5943 - DNA, 383 bp, Homo sapiens
  SIMILAR (174)..(371): 541254mologous to Felis silvestris polyprotein,accession number X51929,Smith-Waterman Score=192.
gagataacaaggatcaagtaacagcaatttcagttaacttcctaaatttcctaaggggacaaggattacgggtctcaaagaacaaaatccaattcatagaatctgaggtaaaatatctaggacacctaatcagtaaaggtgaacgaaagataggatccgaacgaattgaagaacagccattccatcttttcattaatgtaagcaaaggagtggccttaggggtactcacccaaaaacatggaggccaccggcagcctgtagtctttctgtcaaaaatccttgacccagtaacccgtggatggcccgaatgtgttcaatccatagcagcaactgccttgctaacagaagaaagcaggaaaataacctttgggggaaacctcttc

SEQ ID NO: 5944 - DNA, 1326 bp, Homo sapiens
  SIMILAR (157)..(1002): 351254mologous to Felis silvestris polyprotein,accession number X51929,Smith-Waterman Score=494.
atgactttggaagagctggaggatcgtgaagacaagtttaatgaggaggatgaatgtgctattgaaatgtacagacagcagagactggatgagtggaaagcaactaaattgaagaataaatttgaagaagttttggggatctggagggggggcgggggggaacaagggttacaggtctcaaagaataaactccaattcgtagaacctgaggtgaaatacctaggacacctaatcagtaaaggcaaacgaaagataggacccaaacaaattgaaggtatggtatctttgcctttacctgaaacaaagcaggaacttaggaaattctcaggattggttggatattgtcatctgtggattaactcttatgccttaaaaacaaagcccctatatcaaaaactcactcaagaaagaccagaccctgtaaacccttctctggaccccatcagagatccaacagaacagccattccacctttttgttaatataagcaaaggagtggccttaggagtactcacccacaaacacggaggccaccaatggcccgtagccttcctgtcaaaaatccttgaccccgtaacccgtggatggcccgaatgtgtccaatccatagcagcaactgccttgctaacagaagaaagcaggaaaataacctttgggggaaacctcatcataagtacccctcatcaagtcagaactattcttaatcagaaggcagagagatggcttactgactcaagaattttaaaatatgaagttatcttattagagagggatgacctaacactaaccactgacaattcactcaaccccgctgctttcctaacaggaaatccaaacccagaagaatctacgcataaatgcttagatctaatcagttctcaaactagagtcagactggatctaagcaaaacccctttccaaacagggcatcacctctttacagatggttccccccggatcattgaaggaaaaaggtacaacaggtactccacagttgatggggaaatcctcacagagaatcaagaaggaactatttacactgactccaagtatgccttcagagtagtccatacctttggaaaaatctggactgaacgaggcttcatcaatactgcgatccccatcttctcccacgtagacctttctctaaagaaaataggagctcaggagagcccagagggaaagcaggcattaccagatggaagggaaatgctgtctaagcccctcatgagggaaatattgtcacagcttcatccaggaactcactggggtcctcaagctatgtgcaatgtagccctcagagtctatgggtgtatagagtactag

SEQ ID NO: 5945 - DNA, 594 bp, Homo sapiens
  SIMILAR (486)..(1): 971254mologous to Homo sapiens HTPHLP,accession number AF267853,Smith-Waterman Score=814.
agccttgatatctccttccaggtaaacaaatatcgtgggcagattcctatcaggataattgggtatgcaggttgttgaaatggctttgataaatttgacatcaggaaacttcctggcaagtccactgaggtgctgatttatcagggcacagaggggaattccttgtttgtaaaggtgcaagatgacccacaagccctcgccagctttggtaacttcttgaacataatccttccctgagatctccaaaacttctccaaatttattcttcagtttagttgctttccactcagccagtctctgctgtctgcacatttcaatagcacattcatcctcctcattaaactcgtcttcatgatcctccagctcttccaaagtcatatcttcatatgttttcaccactgactgctggaggatgcgctgctcctcttctgcctcctcttccaattctttcagactttccttggggggtaagataccctttttgcgttaagatgtcattccattcagtgtatgcgttgggaaacatgcatcttgtttccagttcagttgctcaaaccagctgtgccgcagcgcccccgcccctcagctctcttt

SEQ ID NO: 5946 - DNA, 1305 bp, Homo sapiens
  SIMILAR (429)..(944): 971254mologous to Homo sapiens HSPC063,accession number AF161548,Smith-Waterman Score=865.
atggggagcgatcgggcccgcaagggcggagggggcccgaaggacttcggcgcgggactcaagtacaactcccggcacgaggtgagcgcgggccggggacccggggcgctgggaagctcctgcccgcccgaccctgcagcgcggcgctgggctcggccggctcccctggcgtgtccgtcggtggccgagctctgggcgcacagccaggaaatgcttggaaagctaaatatgctgcgaaatgatggacatttttgtgatatcactattcgtgtccaggacaaaatcttccgggcacataagtggttactaggcagcttgcagtgatttctttcgcaccaaacttgtaggccaagccgaggatgagaaacaagaaatgtgttggatctgccatcatgttaccatgactggctttatacctcttttagaatatgcttacacgagccactctatcaattaacacagaaaatattattgatgttctagcagcagccagctatatgcaaatgttcagtgttgccagcacctgctcagagttcatgaaatcaagcattttatggaatacacccaacagccaacctgaaaagggtctagatgctggacaagaaaataattctaactgcaattttacttctcgagatgggagcatttctcccgtgtcctcagagtgcagagtggtagaaagaaccattcctgtctgccgagaatcccggagaaagcgcaaaagctacattgttatgtctcctgaaagtcctgtaaagtgtggcacacaaacaagctcaccccaggtattgaattcttcagcttcctactcagaaaatagaaaccaaccagttgactcttccttagcttttccttggacttttccttttggaattgatcgaaggattcagcctgagaaagttaagcacgcagaaaatacccggacttttagaattacctggcccatctgagaccggtagaagaatggctgattatgtgacttgtgagagcacaaaaactaccttgcctttaggtaccgaagaagatgtccgggtcaaagtagaaagattaagtgatgaggaggtccatgaggaagtgtcccagcctgtcagtgcatctcagagttcgctgagtgatcagcagacagttccaggaagtgaacaagtccaagaggaccttctgattagtccacagtcttcctctataggaaggggtgagcctcctggaaatggtgggtggagtttctccaactttcaggttcccaagaatgacctggagcacttgaataaaaacttccacatccgaggccctgctcctgatgcatga

SEQ ID NO: 5947 - DNA, 601 bp, Homo sapiens
  SIMILAR (9)..(599): 381254mologous to Homo sapiens hiwi,accession number AF104260,Smith-Waterman Score=343.
gcggtggaattcatcagcccatgcttgttagtctgttaaagaagaagagaaatgacaacagtgaggctcagctcgcccacctgatacctgagctctgctttctaacagggctgactgaccaggcaacatctgatttccagctgatgaaggctgtggctgaaaagacacgtctcagtccttcaggccggcagcagcgcctggccaggcttgtggacaacatccagaggaataccaatgctcgctttgaactagagacctggggactgcattttggaagccagatatctctgactggccggattgtgccttcagaaaaaatattaatgcaagaccacatatgtcaacctgtgtctgctgctgactggtccaaggatattcgaacttgcaagattttaaatgcacagtctttgaatacctggttgattttatgtagcgacagaactgaatatgttgccgagagctttctgaactgcttgagaagagttgcaggttccatgggatttaatgtggactaccccaaaatcataaaagtacaagaaaatccagctgcatttgttagagctatacagcaatatgttgatcctgatgttcagttggtggc

SEQ ID NO: 5948 - DNA, 1026 bp, Homo sapiens
  SIMILAR (175)..(729): 481254mologous to Mus musculus MIWI (piwi),accession number AB032604,Smith-Waterman Score=483.
atgaagcatcctctagcaatggcttcttgggaacaagcaggatctcaaccaacggtcacagagttgtcaagtgaaactcaaagaggtgagactataaagatgactatcaccctgaagagggagctgccatcaagttctcccgtgtgcatccaggtcttcaatatcatcttcagaaaattatccctttggcctgggtttgccatttctgtgtcatattttgaaaggaagctcctgtttagtgctgatgtgagttacaaagtcctccggaatgagacggttctggaattcatgactgctctctgtcaaagaactggcttgtcctgtttcacccagacgtgtgagaagcagctaatagggctcattgtccttacaagatacaataacagaacctactccattgatgacattgactggtcagtgaagcccacacacacctttcagaagcgggatggcaccgagatcacctatgtggattactacaagcagcagtatgatattactgtatcggacctgaatcagcccatgcttgttagtctgttaaagaagaagagaaatgacaacagtgaggctcagctcgcccacctgatacctgagctctgctttctaacagggctgactgaccaggcaacatctgatttccagctgatgaaggctgtggctgaaaagacacgtctcagtccttcaggccggcagcagcgcctggccaggcttgtggacaacatccagaggtttccagtagcagagttcactgttcccccgtgcaaggggcagtacagagaggagacagacaggtacatccagcaagggcaggaaaggaagggccaagcacgagtgggagaagccaaaagactgggatctcataccaggggtcaggatagagaatctctgaccagggtgttccaggctcagcccagagacacagtcctcagctcagtgcagaccctcatccctgagtccatggcactacacagctcctgcgaagctgttcatgtagactttaatgtgagtgatgcctctcagggttga

SEQ ID NO: 5949 - DNA, 609 bp, Homo sapiens
  SIMILAR (1)..(606): 891254mologous to Homo sapiens putative p150,accession number U93564,Smith-Waterman Score=990.
acaaaaattaattcaagatggattaaagacttaaatgttagacctaaaaccataaaaactctagaagaaaacctaggcaataccattcaggaactaggcgtgggcaaggacttcatgactaaaacaccaaaagcaatggcaacaaaagccaaaatagacaaatgggatctaattaaacgaaagagcttctgcacagcaaaagaaactaccatcagagtgaacaggcaacctacagaatgggagaaaatttttgcaatctacccatctgacaaagggctaatatccagaatctacaaagaacttaaacaaatttacaagaaaaaaacaagcacccccatcaaaaagtgggcaaaggatatgaacagacactgctcaaaagaagacatttatgtagccaacggacacatgaaaaaatgctcatcatcactggtcgtaagagaaatgcaaatccaaaccacaatgcgataccatctcacaccagttagaatggcgatcattaaaaagtcaggaaacaacagatgctggagaggatgtggagaaataggaacgcttttacactgttggtgggaatgtaaactagtccaaccattgtggaagacagtgtggtga

SEQ ID NO: 5950 - DNA, 1539 bp, Homo sapiens
  SIMILAR (151)..(1098): 821254mologous to Homo sapiens Gag-Pro-Pol-Env protein,accession number AF164611,Smith-Waterman Score=1344.
atgccaattcagatgcagtatccacaatataagctggtagaaaataagacccaaccaccagtaatttatcagtactggccgccagccgaccttcagtatcggccacctccagaggttaaatacagacctcaagtggtgtgtcctgtgccaaatagcacggcaccataccagcaacccacggcagtggtgtttaatcctaccgcaccacctagtggacaaggcattattgctcaaaatacagatcttgtggagtggttcttccttcctcatagtacaattaagacttttacattgtacttggatcaaatggctacattaattggtcaggcaagattacgaataataaaattgtgtgaaagtgactcagataaaatcattgttcctttaaacaaggaacaggttagacaagcctttatcaattctggtgcatggcagattggtcttgctgattttgtgggaattattgacaatcattacccaaaaacaaaaatcttccagtttttaaaattgactacttggattttacctaaaattactagacataaacctttagaaaatgctctgacagtgtttactgatggttccagcaatggaaaagcggcttacaccaggccaaaagaacgactcattgaaactcaatatcactgggctcaaagagcagagttggttgctgtcattacagtgttacaagattttaatcagcctattaacattgtatcagattctgcatatgtagtacaggctacaaaggatgttgagacagccctaatcaaatatagtatagatgatcagttaaaccagctgtttaatatgttacaacaaactgtaagaaaaagaaatttcccattttatgttactcatattcgagcacatactaatttaccagagcctttaactaaagcaaatgaacaagttgacttgctagtatcatctgcattcctggaagcacaagaacttcatgccttgactcatgtaaatgcaacaggactaaaaaataaatttgacatcacatggaaacaggcaaaaaatattgtacaacattacacccagtgtcagattccacacctgcccactcaggaggcaggagttaatcccagagaacaacattttactggtaaaaagaatagcccacatgaaggaaaactgatttggtggaaagacaagaaaaataagacatgggaaatagggaaggtgataacatgggagagaggctttgcttgtgtttcacaaggagaaaatcagcttcctggttggatacccactagaaatttaaagttctacaatgaaccccttggagatgcgaagaaaagcgcctctgcggagacaaaaaaccctcaattgagcatcatcgactcgccagggaaggcaccaggatgtttaatgcctacaacccaaaactggttggtagaagtacctaccgtcagtgccaccagtaaatttacttatcacatggtgtatccaccagctccgaagagacagcgaccagcaagaacgggccataacgacgatggcagttttgtcaaaaagggggatatgtag

SEQ ID NO: 5951 - DNA, 1396 bp, Homo sapiens
  SIMILAR (611)..(1393): 621254mologous to Homo sapiens putative p150,accession number U93567,Smith-Waterman Score=858.
gctaagagaattcatcattaccaaaccaccactacaaaaactgctaaaaggagctctaaatcttgaaacaaatcctggaaacacatcaaaacagaacatttttaagcacaaattacacaggacctataaaacaaaaatacaagttaaaaagctaaaacagaaaacaaaaaacctaagtactcagacaacaaagaatatgatgaatgtaaccatacctcacatctcaatacaaacgttgaatgcatatggcctaaatgctccacttaaaagatacagaactgcagaatgcgtaagaattcaccaaccaaccatctgctgccttcaagagactcacctaacacataaggactcacataaacttaaagtaaagggttggaaaaaggcactccatgcaaatggacaccaaaagcaagcaggagtagctattcttataccaaacaaaacaaattttaaagcaatagcagttaagagagacaaagagggacattatataatggtaaaaggccttgtccaacaggaaaatatcacaatcctaaacatatatggacctaacactggagtttccagattaataaaacaattactagtagacctaacaaatgaaatagacaacaacacaataacagtgagtgacatcaatattccactgacagcactagacagctgcaaaaataaaataaaatacttagaaatatacctaatcacggaggtgaaagacctctacaaggaaaactatgaaacactgctgaaagaaatcacagacgacacaaacaaatggaaacacaacccatgctcatggatgggtagaatcaatattgtaaaaatgaccatagtgccaaatgcaatctataaattcaacacaattctcatcaaaatatcaccatcattcttcacagaattcgaaaaaacaattttaaaattcataaaaagagcccacatagccaaagcaagactacgcaaaaagaacaaacctggaggcatcacattacctgatttcaaactatactgtaaggccatagtcaccaaaacagcatcgtgctggtatgaaaacaatcacatagaccaatggaacagaacagagaactcagaaataaacccaaatacttacagccaactgatctttgacaaagcaaacaaagatataaagtggggaaaggacacccttttcatcaaatggttctgggataaatggctagccacatgtaggagaatgaagctggatcctcatctctcaccttattcaaaaatcaactcaagatggattaagggcttaaatctaagacctgaaactataaaaattctagaagataatgttggaaaaacccttctagacattggctttggcaaggatttcataaccaagaacccaaaagcaaatgcaaaaaaacaaagataa

SEQ ID NO: 5952 - DNA, 1045 bp, Homo sapiens
  SIMILAR (551)..(1045): 721254mologous to Homo sapiens putative p150,accession number U93572,Smith-Waterman Score=606.
  misc_feature (1)...(1045): n = a,t,c or g
gctaagagaattcatcattaccaaaccaccactacaaaaactgctaaaaggagctctaaatcttgaaacaaatcctggaaacacatcaaaacagaacatttttaagcacaaattacacaggacctataaaacaaaaatacaagttaaaaagctaaaacagaaaacaaaaaacctaagtactcagacaacaaagaatatgatgaatgtaaccatacctcacatttnnnnnnnnnnnnnnnnnnnnnnnnnnnnnnnnnnnnnnnnnnnnnnnnnnnnnactgcagaatgggtaagaactcaccaaccaatcatctgctgccttcagaagactcacctagcacataaggactcaaataaacttaaagtataggggtggaaaaaggcatttcatgcaaatggacaccaaaagcgagcaggggcagctattcttataccagacaaaacaaattttaaagtaacagcagttaaaagagaccaagagggacattatataatggtaaaaaccttgtccaacaggaaatatcacaatcctaaaaacagaggcacctgcgatgcagaaaaagcattcgacaaaatccagcatccctttatgattaaaactctcagcaaaatcagcattcaaaggacataccttaatgtaataaactccatctatgacaaaccaacagcaaacgtgatactgaatggggaaaagttgaaagcattccctctgggaactggaacaagacaagaatgcccgctgtcaccactcctgttcaacatagtactggaagtcctagccagagcaatcagacaagagaaagaaataaagggcatccaaatcagtaaacaggaagtcaaactgtcactgtttgctgatgatacaatcgtttaccttgaaaaccctaaggactcctccagaaagctcctagaactgataaaagaattcagcaaagtttctggatacaagattaatatacacaaatcagtagttcttccatacaccaacagtgaccaagcagagaatcaaatcaagaactcaacctcttttacaatagctgcaaaa

SEQ ID NO: 5953 - DNA, 360 bp, Homo sapiens
  SIMILAR (3)..(359): 991254mologous to Homo sapiens PDC-E2 precursor (AA -54 to 561),accession number Y00978,Smith-Waterman Score=626.
gttttgaagtacaggaagaaggttatctggcaaaaatcctggtccctgaaggcacaagagatgtccctctaggaaccccactctgtatcattgtagaaaaagaggcagatatatcagcatttgctgactataggccaaccgaagtaacagatttaaaaccacaagcgccaccacctaccccacccccggtggccgctgttcctccaactccccagcctttagctcctacaccttcagcaccctgcccagctactcctgctggaccaaagggaagggtgtttgttagccctcttgcaaagaagttggcagtagagaaagggattgatcttacacaagtaaaagggacaggaccagatggta

SEQ ID NO: 5954 - DNA, 639 bp, Homo sapiens
  SIMILAR (184)..(339): 1001254mologous to synthetic construct Human 70kd mitochondrial antigen of PBC,accession number A05169,Smith-Waterman Score=271.
atgatgcaaaaccaaagtacctacttggtggatccctgggtagaggatcctgattggttgagagcccctcatgctttgtacacagagcagaaaatattgagacatcagagggagatcctgctgacagttatctatgccagaggtcagcgtttctcaaacaagtctttgatcaaagtaggatctgtggccgctgttcctccaactccccagcctttagctcctacaccttcagcaccctgcccagctactcctgctggaccaaagggaagggtgtttgttagccctcttgcaaagaagttggcagtagagaaagggattgatcttacacaagtaaaaggatgtcttagtcagttgagtgttgccataaaggaatacctgaggctaggtaacttaggaggaaaagaggtttgtttggctcacaattcggctggctggaaagttgggcatctggtgaaagcctcaatcggctttcactcacggcagaaggcaaatgggagttggcatgtgctgagattacatggagagaggaagcaagagagtggagggagggactcactgaggaaaaggcagctactaacccagcatgccaaagagctggatgaggggtcagcattagaagaaaatgtcaaaatccagtag

SEQ ID NO: 5955 - DNA, 861 bp, Homo sapiens
  SIMILAR (595)..(855): 561254mologous to Baboon endogenous virus strain M7 gag-pol precursor polyprotein,accession number D10032,Smith-Waterman Score= 252.
atgggtcaggcacaaagtaagcccaccccaccaggaactatgttgaaaaatttcaagaaaggatttaagggagattatggtgttactctgacaccaggaaaagttagaactttatgtgaaatagactggccagcattagaggtggatttcccatcagaagtaagccttgacgggtccgttgtttcaaagggagaaaacttagcattccttggagacctgaagggatgcagtgagcttaagaattttcaagagcttatcaatcagtcagccctggttcatccccaagcagatgtgtggtggtattgtggtggacctttactgggcactctgccaaataactggagtggcatttgtgctttagtccagttggctatccctttcaccctggcatttcatcaaccagagggaggaaaaataagacattgtaaagtgagagaagccccttatgggcctttcaactctcacatctatttagatgcaattggaatccaaaagggaataccagatcaatttaaagcccaaaatcaaatagctgcaggatttgagtcaatattttggtgggtgacagttaataaaaatgtagattggataaactacatctattacaaccaacagcaacgagcttttcatgagttaaaagaaaaactcatgtcggccctagccctggggctacctgaccagacaaaaccttttacactatatgtgtcagacagagaaaaaaaaatggcggttagagttttgacccagaccatggggccctggctggggccagtggcctacctctctaaacaactagatggcgtttctaagagttggcccccatgtttgagggctttggcagcaacagccctgctagcataa

SEQ ID NO: 5956 - DNA, 714 bp, Homo sapiens
  SIMILAR (10)..(144): 1001254mologous to Homo sapiens bA508N22.3 (novel gene),accession number AL117339,Smith-Waterman Score=238.
atgattgaggaactccagaaacgttgcatccacctggagtaccctctgttggcagaatatgactttcagaaggattctgtcaaccttgatatcaacactgacctaaagcccacaggtgtcctcagaccctatcaggagaagagcttgtggaagattaaatcaaattcaaatgagaataatccagaaaaggtggtgaaacaacaggttggaaactggattaggaagatagcggctgcttcatctcttcacagatgtcccaatggatcaatcagagctttaggagttcagtgccacagacccagcaccttgattgacagtactcattttttggcaatgagccacaaggaatatctgcttgaaaccagtggagagtatctggcgtggagatatgcaggctgcctgtccattcatcataacaggctccatctcattagaggatttaatgaatctgaacagttcatcatcaaggccttgcttaatgatggttatctcgatgatgcaccccgtgggcataaacatagccatccctgtcagggacagatgaagagagatgaatatgctcatcatgccaatcacgggccaggaaatagcaagagattaatatcagaagcaggagtgtggcagtgcttgatgtttgtcattgtgacccactgccaaagcatcagcaccaggttctggaacatccgggttgtatgtagcttgcaagctaactga

SEQ ID NO: 5957 - DNA, 2447 bp, Homo sapiens
  SIMILAR (96)..(2444): 971254mologous to Homo sapiens DNA repair helicase,accession number M31899,Smith-Waterman Score=3946.
gggagcttccggattgagccggaagtccccccagagcggatgccgcggcgggcctgtgggagcggggtcatcttctctctgctgctgtagctgccatgggcaaaagagaccgagcggaccgcgacaagaagaaatccaggaagcggcactatgaggatgaagaggatgatgaagaggacgccccggggaacgaccctcaggaagcggttccctcggcggcggggaagcaggtggatgagtcaggcaccaaagtggatgaatatggagccaaggactacaggctgcaaatgccgctgaaggacgaccacacctccaggcccctctgggtggctcccgatggccatatcttcttggaagccttctctccagtttacaaatatgcccaagacttcttggtggctattgcagagccagtgtgccgaccaacccatgtgcatgagtacaaactaactgcctactccttgtatgcagctgtcagcgttgggctgcaaaccagtgacatcaccgagtacctcaggaagctcagcaagactggagtccctgatggaattatgcagtttattaagttgtgtactgtcagctatggaaaagtcaagctggtcttgaagcacaacagatacttcgttgaaagttgccaccctgatgtaatccagcatcttctccaggaccccgtgatccgagaatgccgcttaagaaactctgaaggggaggccactgagctcatcacagagactttcacaagcaaatctgccatttctaagactgctgaaagcagtggtgggccctccacttcccgagtgacagatccacagggtaaatctgacatccccatggacctgtttgacttctatgagcaaatggacaaggatgaagaagaagaagaagagacacagacagtgtcttttgaagtcaagcaggaaatgattgaggaactccagaaacgttgcatccacctggagtaccctctgttggcagaatatgacttccggaatgattctgtcaaccctggatatcaacattgacctaaagcccacagctgtccctcagaccctatcaggagaagagcttgcgaaacgatgtttggaaacgggcgtgcacgttcgggggtcattgttcttccctgcggtgctggaaagtccctggttggtgtgactgctgcatgcactgtcagaaaacgctgtctggtgctgggcaactcagctgtttctgtggagcagtggaaagcccagttcaagatgtggtccaccattgacgacagccagatctgccggttcacctccgatgccaaggacaagcccatcggctgctccgttgccattagcacctactccatgctgggccacaccaccaaaaggtcctgggaggccgagcgagtcatggagtggctcaagacccaggagtggggcctcatgatcctggatgaagtgcacaccataccagccaagatgttccgaagggtgctcaccatcgtgcaggcccactgtaagctgggtttgactgcgaccctcgtccgcgaagatgacaaaattgtggatttaaattttctgattgggcctaagctctacgaagccaactggatggagctgcagaataatggctacatcgccaaagtccagtgtgctgaggtctggtgccctatgtctcctgaattttaccgggaatatgtggcaatcaaaaccaagaaacgaatcttgctgtacaccatgaaccccaacaaatttagagcttgccagtttctgatcaagtttcatgaaaggaggaatgacaagattattgtctttgctgacaatgtgtttgccctaaaggaatatgccattcgactgaacaaaccctatatctacggacctacgtctcagggggaaaggatgcaaattctccagaatttcaagcacaaccccaaaattaacaccatcttcatatccaaggtaggtgacacttcgtttgatctgccggaagcaaatgtcctcattcagatctcatcccatggtggctccaggcgtcaggaagcccaaaggctagggcgggtgcttcgagctaaaaaagggatggttgcagaagagtacaatgcctttttctactcactggtatcccaggacacacaggaaatggcttactcaaccaagcggcagagattcttggtagatcaaggttatagcttcaaggtgatcacgaaactcgctggcatggaggaggaagacttggcgttttcgacaaaagaagagcaacagcagctcttacagaaagtcctggcagccactgacctggatgccgaggaggaggtggtggctggggaatttggctccagatccagccaggcatctcggcgctttggcaccatgagttctatgtctggggccgacgacactgtgtacatggagtaccactcatcgcggagcaaggcgcccagcaaacatgtacacccgctcttcaagcgctttaggaaatga

SEQ ID NO: 5958 - DNA, 936 bp, Homo sapiens
  SIMILAR (728)..(829): 791254mologous to Homo sapiens Human secreted protein, SEQ ID NO: 4473,accession number G00392,Smith-Waterman Score=144.
atgaagaaagttttagcgatctggatggaagatcaaaccagccataacatttccttaagccaaagtctaattcagagcaagatcctaactctcttcaattctgtgaaggctgataggggcgaggaagctgtggaagaaaagttggaagctagcagaggttggtttatgaggtttaaggaaggaagctatctctataatgtaaaattgcaaggtgaagcagcaagtgctgatgtagaagctacagcaagttctccaggaaatctagcagagattatcgatgaagccggctacactaaaaaacctcaaattagaagaaggtattattatttaagaaatacatttcataaggctatagttgctatagatagtgattcatctgttggatctgggcaatgtaaattgaaacctggaaaggattcaccattccagacactgagttactggaccatcagagcccctgatgctctcctgtttgtggagaaagaggacactgtagaagacatccagtcctcttgctgctgccccacccaaagaggtttcttgggtgaagagactctggccaccacacagtatttaccaggacagtggcagtggagtgttcctcagccttctgcctcttctgctccattcttatacctgcaaccttctgaggttatttatcaaccagtggaaattgcacaggatggtggatgtgttcctcctccactgtctctgatggaaacttcagttccagagagtcaggcccctctgctgcaggtctgtaggagtttgctggagatccaccccagaccctgtttgcctgggtatcaccagcggaagctgcggaacagcaaagattgctgcctgctccttcttctggaagcttcgtcccagagggacacccaccagatgccaactggagctctcctgtatgaggtgtctgtcaacccctgctag

SEQ ID NO: 5959 - DNA, 882 bp, Homo sapiens
  SIMILAR (694)..(879): 661254mologous to Homo sapiens Np70 protein carboxy terminal region,accession number Y67470,Smith-Waterman Score=196.
atggcgggctgcaggtccccaaccctgccccatggggaggtggctgaggcctggctggcattgagtgcctgtggcttttccaagcacacggtgcaggctactggtggatctaccattctggattctggaaggtggtggcccttttcttacagctccactaggcagttccccagtggaaatggcgtaaactatagccactgccaaggtacagcttgggccattgcttcagagggtgcaaaatttaaattacatatgtggctttctaccttgggcctgacaggtagcgagaagaagaaggtccattctaccatcaatgaggtggtgacccgagaacacatcatcaacattcacaaaggtgcctgtggagtgaacttcaaaaagcatgtgcctctagaactcagagaaatctggaaatttgccatgaagcaggagggcaagaaggcagaagataattcttgtaaggagggcaagaaggcagaagataattcttgtaaggagggcaagaaggcagaagataatgataaacccaagaatttaggatttgggaggctggaaaagactcatcccactggaaaaatgtttattctttcagatgaagaaggaaaaaatggaatcattgagttaatggagccccttcatgaagaaatctctggaatcttggaagtgttggaagagtctttctcctgggaacaaccaccaaagcgacctccccctgcaccttcagctcccttgctaaaccctgcgattttcagtgcaccacccaccttgattcggcaacccaaggtggatgatatgagtgtggccaccattgagaagaaagccacaacaaccaccagtgccaagccacagatcactgctaattccaaggcagagcttacttga

SEQ ID NO: 5960 - DNA, 949 bp, Homo sapiens
  SIMILAR (1)..(309): 1001254mologous to Homo sapiens Human signal peptide containing protein HSPP-92 SEQ ID NO:92,accession number Y87315,Smith-Waterman Score=536.
atggccggcgctcgggccgccgccgccgctgcctcggcggggtcctcggcctcttcaggcaaccagccgcctcaggagctggggcttggggagctgctggaggagttctcccggactcagtaccgggccaaggatggcagcgggaccggcggctctaaggttgagcgcattgagaagagatgtctggagctgtttggccgagactactgtttcagcgtgattccaaacacgaatggggatatctgtggccactatccccggcacatcgtgttcctggagtatgagagttctgagaaggagaaagacacggctgcagccaagatctctgatggctcccagtactatgttctgctcatcatcactgatggggtcatctctgacatgacgcagaccaaggaggccatcgtcagcgcctcctcattgcccatgtctatcattatcgtcggtgtaggaccagccatgtttgaggcaatggaagagttggacggtgatgatgtgcgcgtgtcctctaggggacgctacgcagagcgggacatcgttcagttcgtcccattccgagactatgttgaccggtcggggaaccaggtgttgagcatggcccgactggccaaggatgtgctggccgagatcccggagcagctgctgtcctatatgcgcaccagagacatccagcctcggcccccaccccctgccaaccccagcccgatcccagctccagagcagccctgaggattccacatatccaatgcctcacagtctgcaagcctgctcacccactgcttctgctttaagccagaggcacctggaaccctggacttcactgggagggccaacttggaggatcagtgctggctgacaagccctccgcctccttgcctgcagagggcctggcactatcaccacctctctgccttcatgccaataataaagctgatctttattccaaaaa

SEQ ID NO: 5961 - DNA, 1512 bp, Homo sapiens
  SIMILAR (298)..(1050): 981254mologous to Homo sapiens cam kinase I,accession number L41816,Smith-Waterman Score=1308.
atgtgtgctgatgtctgggagtacatgtatgatcaggtgtcacgggatgtggatacaaggcgagccctggctgtggtcggggggcagtgggccatgctgggggcagtggaaggccccaggtggaagcaggcggaggacattagagacatctacgacttccgagatgttctgggcacgggggccttctcggaggtgatcctggcagaagataagaggacgcagaagctggtggccatcaaatgcattgccaaggaggccctggagggcaaggaaggcagcatggagaatgagattgctgtcctgcacaaggtgtcgggtggggagctctttgaccgtattgtggaaaaaggcttctacacggagcgggacgccagccgcctcatcttccaggtgctggatgctgtgaaatacctgcatgacctgggcattgtacaccgggatctcaagccagagaatctgctgtactacagcctggatgaagactccaaaatcatgatctccgactttggcctctccaagatggaggacccgggcagtgtgctctccaccgcctgtggaactccgggatacgtggcccctgaagtcctggcccagaagccctacagcaaggctgtggattgctggtccataggtgtcatcgcctacatcttgctctgcggttaccctcccttctatgacgagaatgatgccaaactctttgaacagattttgaaggccgagtacgagtttgactctccttactgggacgacatctctgactctgccaaagatttcatccggcacttgatggagaaggacccagagaaaagattcacctgtgagcaggccttgcagcacccatggattgcaggagatacagctctagataagaatatccaccagtcggtgagtgagcagatcaagaagaactttgccaagagcaagtggaagcaagccttcaatgccacggctgtggtgcggcacatgaggaaactgcagctgggcaccagccaggaggggcaggggcagacggcgagccatggggagctgctgacaccagtggctgggggtgaggagcgggctctgcagaagggcatgggtggtccacaaagggctgcagcctttatctctgatggctcccagtactatgttctgctcatcatcactgatggggtcatctctgacatgacgcagaccaaggaggccatcgtcagcgcctcctcattgcccatgtctatcattatcgtcggtgtaggaccagccatgtttgaggcaatggaagagttggacggtgatgatgtgcgcgtgtcctctaggggacgctacgcagagcgggacatcgttcagttcgtcccattccgagactatgttgaccggtcggggaaccaggtgttgagcatggcccgactggccaaggatgtgctggccgagatcccggagcagctgctgtcctatatgcgcaccagagacatccagcctcggcccccaccccctgccaaccccagcccgatcccagctccagagcagccctga

SEQ ID NO: 5962 - DNA, 1728 bp, Homo sapiens
  SIMILAR (628)..(936): 881254mologous to Homo sapiens HOTTL protein,accession number AF078842,Smith-Waterman Score=487.
atgggaatttctgggagatacaattccaagttgagatttggggtgcctattgtcgatgctgcagccgactctagaggatccccggctgcagccaagatctctgatggctcccagtactatgttctgctcatcatcactgatggggtcatctctgacatgacgcagaccaaggaggccatcgtcagcgcctcctcattgcccatgtctatcattatcgtcggtgtaggaccagccatgtttgaggcaatggaagagttggacggtgatgatgtgcgcgtgtcctctaggggacgctacgcagagcgggacatcgttcaggggtatgatatcagctttctgatcaccaacttccacacagagcagatgtacaaacacaagttggtggactttgtgatccacttcatggaggagattgacaaggagatcagtgagatgaagctgtcagtcaatgcccgtgcccgcattgtggctgaagagttccttaagaatgatgttcacaaagtccttgcctctatctcgtttaaaccccaagtgagcgaaggggcagaactcaggcacctcgacactcaggtccagcgctgtgaggacatcctgcagcagctgcaggccgtggtaccccagatagacatggaaggggatcgcaacatctggatcgtgaagccaggagccaagtcccgtggacgaggcatcatgtgcatggaccacctggaggagatgctgaagctggtgaacggcaaccccgtggtgatgaaggacggcaagtgggtggtgcagaagtatattgagcggcccctcctcatctttggcaccaagtttgacctcagacagtggttcctggtaactgactggaacccacttaccgtgtggttctaccgcgacaagctatatccgcttttccaagcagccattctccaactgaagaacctggacaagagtagcaaagagctcctgttacaacctgtgaccatcagcaggaatgagaaggaaaaggttctgattgagggctccatcaactctgtccgggtcagcattgctgtgaaacaggttgagcgcattgagaagagatgtctggagctgtttggccgagactactgtttcagcgtgattccaaacacgaatggggatatctgtggccactatccccggcacatcgtgttcctggagtatgagagttctgagaaggagaaagacacgtttgagagtaccgtacaggtgagcaagttgcaagacctcatccaccgcagcaagatggcccggtgcagaggacggtttgtctgcccagtaatccctgttcaagggcaaggtttcccggtcctctggcgaggatcctccaaggcgtctcacatgaaccggctcagaaacgccaaaatctacgtggagagagctgtcaagcagaagaagatctttacaatccaaggctgctacccggtgatccggtgtctcttgcgccggaggggctgggtggagaagaagatggtccatcgctcaggccccaccctgctgccaccccagaaggatctggatagctcagcgatgggtgacagtgacaccactgaggatgaggatgaagatgaggacgaggagttccagccatcacagctgttcgacttcgatgatttactgaaatttgatgacctagatggaacacatgctctgatggtgggtctatgtctcaatctccggaatttgccgtgggtttgatgaggttgatgcccactcctttcttcc

SEQ ID NO: 5963 - DNA, 2754 bp, Homo sapiens
  SIMILAR (55)..(1929): 991254mologous to Homo sapiens putative 8-hydroxyguanine DNA glycosylase,accession number AF176815,Smith-Waterman Score=3364.
atggccatgttcatattgtccgtgggtatttgtcactggttcagatgtgacagcatgggggtggactttgatgtgaagactttctgccacaacttgcgggcgactaagccaccatacgagtgcccggtggagacctgccgaaaggtctacaagagttacagtggtattgagtaccacctgtaccactatgaccacgacaacccaccacccccacaacaaactccactccgcaagcacaagaaaaaggggcgccagtcacgcccagccaacaagcagtcacccagcccctcagaggtctcacagtcaccaggccgtgaggtgatgagctatgcacaggcccagcgcatggtggaggtggacttgcatggccgcgtccaccgcatcagcatctttgacaacctggatgtggtgtcagaggatgaggaagcccccgaggaggcccctgagaatggcagcaacaaggagaacactgagacaccagctgctactcccaagtcaggcaaacataagaacaaggagaagcgcaaggactccaaccatcaccaccaccacaatgtttctgcgagcaccactcccaagctgccagaggtggtctatcgggagctggaacaggacacccctgatgccccaccccggccaacttcctattaccggtacatcgagaagtctgcagaggagctggacgaggaagtagagtatgacatggacgaggaggactacatctggctggatatcatgaatgagcgtcggaagacagagggtgtaagtcccatcccgcaggagatctttgagtacctaatggaccgactggagaaggagtcgtactttgagagtcataataaaggcgaccctaatgcgctagtggacgaggatgctgtttgctgtatctgcaatgatggtgagtgccagaacagcaatgtcatcctcttctgtgacatgtgcaacctggccgtgcaccaggagtgctacggtgtcccctatatccctgagggccagtggctgtgccgccgttgcctgcagtcaccctctcgtgctgtggattgtgccctgtgccccaacaagggcggtgccttcaagcagacagatgacgggcgctgggcccatgtggtgtgtgccttgtggatccctgaggtctgcttcgccaacacggtcttcctagagcctattgacagcattgagcacatcccaccagctcgctggaagctcacctgctacatttgcaaacaacggggctcaggggcctgcatccagtgccacaaggccaactgttacacagctttccatgtgacatgcgcccagcaggctggcctttacatgaagatggagcctgtgcgggagacaggcgccaacggcacctctttcagtgtccgcaagacagcctactgcgacatccacacgcctccaggttcagcacgccgactgcctgccctgtcccacagcgagggtgaggaggatgaagatgaggaggaggatgagggtaagggctggagctcagagaaagtcaagaaggccaaggccaagtcccggatcaaaatgaagaaggcacggaagatcctggcagagaagcgggcagcagcacctgtggtgtcagtgccctgcatcccaccacacaggcttagtaaaatcaccaaccgcctgaccatccaaaggaagagccagttcatgcagaggctgcacagctactggacactgaagcggcagtcacggaatggggtcccattgctacgtcgcctgcagacacacctgcaatctcagaggaactgtgaccaagttgggagagattctgaggataagaactgggcccttaaagaacagctcaagtcctggcagcggctccggcatgacttggagcgagctcggctgctcgtggaattgatccgcaagcgggaaaaactcaaaagggagacggacattgccaccatgcagctgtgtgcaaacaagctggacaagaaggacttctttgggaaatcagaccccttccttgtgttctacaggagcaatgaggatggcacgttcaccatctgccacaagacagaggttgtgaaaaacacgctgaatcctgtgtggcagcccttcagcatccctgtgcgggctctgtgcaatggagactatgacagaacggtgaagattgatgtgtacgactgggaccgggatggaagccacgatttcattggtgagttcaccaccagctaccgggagctgagcaaggcccagaaccagttcacagtatatgaggttcttaaccctcggaagaaatgtaagaagaagaaatatgtcaactcaggaactgtgacgctgctctccttctctgtggactctgaattcacttttgttgattacatcaagggagggacacagctgaacttcacagtagccattgacttcacggcttccaatggtgagacacggatgagtgaaaaagtcggagggaatcctctgcagcctacctccctgcactacatgagtccctaccagctcagcgcctatgccatggccctcaaggcagtgggagagatcatccaggactatgacagtgataagctcttcccagcttatggctttggggccaagctgcccccagagggacggatctcccaccagttccccctgaacaacaatgatgaggaccccaactgtgcgggcatcgagggtgtgctggagagctatttccagagcctgcgcacagtgcagctctatgggcccacctactttgctcctgtcatcaaccaagtggccagccttccaagtagctaa

SEQ ID NO: 5964 - DNA, 1062 bp, Homo sapiens
  SIMILAR (304)..(741): 501254mologous to Homo sapiens copine I,accession number U83246,Smith-Waterman Score=384.
atgggtttcagaagccccagttcctgcccactgcccacacactggctgtggaagctctggggggctgcagccaagatctctgatggctcccagtactatgttctgctcatcatcactgatggggtcatctctgacatgacgcagaccaaggaggccatcgtcagcgcctcctcattgcccatgtctatcattatcgtcggtgtaggaccagccatgtttgaggcaatggaagagttggacggtgatgatgtgcgcgtgtcctctaggggacgctgggcagagcgggagcggtcgttcaggacacagctgaacttcacagtagccattgacttcacggcttccaatggtgagacacggatgagtgaaaaagtcggagggaatcctctgcagcctacctgcctgcactacatgagtccctaccagctcagcgcctatgccatggccctcaaggcagtgggagagatcatccaggactatgacagtgataagctcttcccagcttatggctttggggccaagctgcccccagagggacggatctcccaccagttccccctgaacaacaatgatgaggaccccaactgtgcgggcatcgagggtgtgctggagagctatttccagagcctgcgcacagtgcagctctatgggcccacctactttgctcctgtcatcaaccaagtggccaggtgctggaggaacagtggcaagcaagacaaagcctctggattcggggagcttatgtctggagccctggctgtggtcggggggcagtgggccatgctgggggcagtggaaggccccaggtggaagcaggcggaggacattagagacatctacgacttccgagatgttctgggcaccgcgccgttcaagaggctggtcccaggcacctattcacagggcgcgtcggatacccaccccctcggccccccgcacacgccggtcctcgacccctttccgcaggatggtttcccggtcctctggcgaggatcctccaaggcgtctcacatgaaccggctcagaaacgccaaaatctacgtggagagagctgtcaaggtctaa

SEQ ID NO: 5965 - DNA, 405 bp, Homo sapiens
  SIMILAR (239)..(3): 971254mologous to Mus musculus zinc finger protein 106,accession number AF060246,Smith-Waterman Score=411.
ccatcatcttctctttcttgggcatcaacgttatctttgtgcaactggccagaaatgtgctttgcatatgcagaaagacccacttctgtgacaccgcacactcggcactcatgactaatgtccctgcccttgaggttctcaagttccctgtgatgcaacatgctccgcatgtgttcgtccatctccttttttgagctgtacacgatgtggcataatatgcattttcgttctcgtaccatagtgaccagatctgaagcactcaacgtcacacattcacaggcaacccctcttactccatcaggccgccgagagccaggcgagggagctccctgacgcctcagacgcccccttcagttttgggtccgggagcctgctccggacccgctccccgccgggccccgccac

SEQ ID NO: 5966 - DNA, 1201 bp, Homo sapiens
  SIMILAR (317)..(565): 1001254mologous to Homo sapiens zinc finger protein 106,accession number AF205632,Smith-Waterman Score=440.
gcaccatgggtgtgctccagagcaacttctgcttgctctgagccccctgccctgcctcccctttcaccatgtttcctctgacaagattttaagtacagcaattcaagaagatttctcctcctaaacgacatttatctgaagtctattgcctcttgattgctggaaaagaatcttaaaatcatttcaaaagtaacttataaacaaacttattaaaagtgatgaaaggagcattgaaattaattagcactaatttttcactgtgccaaagtgtgcagtgtccttcagaggaaacaataacagatctggtgagtgtgccatgccagtggggagaattgaatgtccctcatctccctctttccctagggacattagtcatgagtgccgagtgtgcggggtcacagaagtgggtctttctgcatacgcaaagcacatttctggccagctgcacaaagataacgttgatgcccaggaaagagaagatgatggaaaaggagaggaagaggaagaagattattttgacaaggaactcattcaattaataaaacaaaggaaagaacaaagtcggaccctcttccatatttcccagcccctgaactgcctcaatggcccccggtgcttaaggccgattacttctggccatgccaaagtaggatttgcagtgccaaggagggactgctcagcacagcccagactcccattccctctgccagtgcccattctcccctgcaccatctgtcccctgcatgatactttctggaccaaccctcagtaccgtctgaagctcctggaggaggacgatgaccctgatgactcggaggtgatttgcagcttcctggtggccctgatgcagaagaaccggcggaaggaccggaagctaggggccagtctcttcaccattggcttcgccatctacgaggtgtgcagtcctgattggctccagcccaggaaacatactttcccagggaggacgcttccaggggcttctagaggggccctctggcttcctcaatacccagtgacccacagagctcctggtatcaggaccacttgtgtttgtaacaagcaaaaaataccagggggggcattaaagaggcaatggagcgggcctggcaaaacaagtgcctgggggtcaggcttccgcatgcgggctgcaattgctggcattgccttccgcaggctcctcatcctcattcacatctga

SEQ ID NO: 5967 - DNA, 1794 bp, Homo sapiens
  SIMILAR (934)..(1446): 701254mologous to Homo sapiens putative p150,accession number U93563,Smith-Waterman Score=585.
atgccctggggagaccccaactaccgcagcgccaacttcaaagagcacatccagcgccggcaccggttttcttatgacacttttgtgacagcgcgtcgccaggctaaccctgcgtggaaaattcgaaggtggaaggcgaggcgccttattgagggggccggcaacggcgtcgccgacggcgagggggcggcgggggctgtgcggcccgggccggaaacgtgcacgtttattctggcctggggaggaggcagcagcaaatgggacttgttcagcacagacaccattgacaggggcctctccactcatccctgccagctggggaacttcggggctgggaagggcctttctgtggccacggtcctggctgaacgcagctcctcgccagcaatagaacaaagctggacggaggatgactttgatgagttgagaggagaaggcttcagacgatcaaacttctccgagctaaaggaggatgatcgaacccatcacaaagaagctaaaaaccttgaaaaaagattagacgaatggctaactagaataaccagtgcagagaagtccttaaatgacctgacggagctgaaaaccatggcacgagaactacatgatgcatgcacaagcttcagtagccaattcgatcaactggaaaaaagggtatcagtgattgaagatcaaatgaatgaaattaaaccaaatctacgtctgattggtgtacctgaaagtgacggggagaatgtaaccaagttggaaaacactcttcaggatattatccaggagaacttccccaacctagcaaggcagaccaacattcaaattcaggaaatacagagaacaccacaaagatactcctcaagaagagcaaccacaagacacataattgtcagactcaccaaggttgatatgaaggaaataatgttaagggcagccagagagaaagatgacatgattgcatatttagaaaaccccatcatctcagcccaaaatctccttaagctgataagcaacttcagcaaagtctcaggatacaaaatcaatgtgcaaaaatcacaagcattcttatacaccaataacagacaaacagagagccaaatcatgagtgaaatcccattcacaactgcttcaaagagaataaaatacctaggaatccaacttacaagggatgtgaaggacctcttcaaggagaactacaaaccactactcaacaaaataaaagaggacaaaaacaaatggaagaacattccatgctcatggataggaagaatcaatatcgtgaaaatgggtatactgcccaagtcaggtccctcatctgcaggtctgttggagtttgctggaggtccactccagaccttgtttgtccggatatcaccagtggaggctgcagaacagcaaatattgcagaacagcaaatattgctgcccgatccttcctctgcaagctttgtctcagaagggcacctatctgtatgaggtgtcagttggcccctactgggatgtatctcccaccaggctgccgcctcgcagtttgatctcagactgctgcactagcagtgagcaaggctccatgggtgtgggacccgctaagccaggcatgggagagaatctccttgtctgccgcttgcgaagaccttgggaaaagcccaatatttgggcagaagtgtcccatttttccagaattgagagatacaacccatccccgccagtaacagtggttcttctaggggtgaggcctactcaatgtgaagatgaagatgaagaggaagaagacctttatgatgacccacttccacttaatgaatag

SEQ ID NO: 5968 - DNA, 984 bp, Homo sapiens
  SIMILAR (359)..(982): 811254mologous to Homo sapiens p40,accession number U93567,Smith-Waterman Score=863.
atgatcaaacatgatgtgatgagtgctgtgactgaggtacccccaaaagataaggaagctcaagggaagaagaggcgaaagcctacagttgaggatgcaagcaaatacacagaaataaaccaaccatgtgcctcctttgggaatctgatttggcctatgagtatgggcctgaaaataactagatgtttaattatgcatctaaacttagtccatgaatttgcatgtgaacgcagctcctcaccagcaatggaacaaagctggatggagaatgactttgatgagttgagagaagaaggcttcagacaattggtaataacaaacttctctgagctaaaggaggatgttcgaacccattgcaaagaagctaaaaaccttgaaaaaaagattagacgaacggctaactagaataaccaatgcagagaagtccttaaaggacctgatggagctgaaaaccatggcacgagaactacgtgacgaatgcacaagcttcagtagccaattcgatcaactggaagaaagggtatcagtgatggaagatcaaatgaacgaaatgaagcgagaagagaagtttagagaaaaaagagtaaaaagaaatgaacgaagcctccaagaaatatgggactatgtgaaaagaccaaagctacatctgattggtgtacctgaaagtgacggggaaaatgaagccaagtcggaaaacactcttcaggatattatccaggagaacttccccaacctagcaaggcaggccaacattcaaattcaggaaatacagagaacgccacaaagatactcctggagaagagcaactccaagacacataattgtcagattcaccaaagttgaaatgaaggaaaaaatgttaagggcagccagagagaaagatcgggttacccacaaagggaagcccatcagactaacagcggatctctcggcagaaactctgcaagccagcagagagtgggggccaatgttcaacattcttaa

SEQ ID NO: 5969 - DNA, 2494 bp, Homo sapiens
  SIMILAR (2234)..(1809): 411254mologous to Homo sapiens dJ963K23.2 (novel protein),accession number AL031685,Smith-Waterman Score=190.
ttaccacttagattaagttatgaaatttatttatattttaccttttaaaagccagaacataacaaatctcactttctggaaagtcatcttattagaaatacaagaagtgcacttaatacaaggaagtaagtttctcggtgccaccagtgaggtggacatacactcacatcagtccctcaaacgaaggtttcgccagatttccctccagacttctgagatgatctgaattcaggaaggtctgagtgaacttcttccagaaattacagtgaacaagctgaccttaacttttgggtcctcccgagaaatactaatgaaaaaactatttttttccagtgggccctgtgtttgctggcttctcggcatctgcagctcttcaccggcaggcgcggagccccacagcagcagtgtacaagcgcgaggtagcacttgcagccccatcagagacatatgacatcaaaaaaccaacctaaacccatatgccttttggtcaatcagaggttctgctcctacagattaggctgacagctcttggacttatatttattaatatttgtgaaatatgaactccaaggttcttgagctgttcctaaagcaagtttccagcaacagcttttattaacaactgttcatcttgcgatgtgctgtgccttatgaacgatgtctcgtcagaacagaccaggggtggtactgggtttcctatagcttctctctgcatctacaaagcaggttttcaaacacattttacatgtcgaaaccagtgtcataaggaaaacatttgtgacagaaaaacaatgctcagtttaatctaagttaccaagcagaaggtaaaagaactagtatccgctgagtccccaaacctctttcttctaattcatctgaggattttttgtgcttctagaacaagaatgtaggcaggctcccaaatggagaggtaaacatgaccgcgttgtttgaaactacttcattaatttgtaaatcagaaccaaaaagctctggccctcccacttctcttagctgaccctcctccccacttacggataaacagactttaacttccctaacccagaaacacttccaccaaaaatgtatggttataccttatcctaaaaaggcaccatgcaggcatttaagactgaaccagtgaactctaaatatgtagtagtagaaaatatcactaatcaaaacttccagcatcagatggtacaaaaccccaagaggactggtgacatgtaccccgggatggcaaccccagcttctggcaaccccacagcccagcgggagcttcagctctggtcaggtgcacggctgccaaagtctgcacaccttggggacaaggaaaggagacacttgcttcattgtgctattcatgacccagaaaaggtcctggctggcttgaaggacccgagagacaaacactggatgggaggaatgagtgtgaaacaagaggtggagaagctagattatcttccacaggaggcggcagaagctccaggaagtagccgagaaccaatacgaactcgaccgtgtgacaaacaaggttaacagtaggggaaaaacaacctttgggcaaagaaccccaaagggaaagagaaagggctggaccctggggaccccacttccccctgtccagaagtgacccctgtcccccaatgcccatggcctcattttccaggtctgttgaaacaggtaaggtaacaggagtccatagatttcacggtttaatatgtaaatggaagcttctgtaacatgagacaagaatagcaagcacggactctgctcactggtcgatgatggagcgctgcaacaccctgattcatcatgtccctcttcatcaacatcataatccacaaaagtgtcataagaaaaaccggtgccggcgctggatgtgctctctgaagttggcgcttgcgggtagttggggtcatccccaggggcatcgaggcacatatcggacaaaccacagatttgggtatcccgtgctatgggaattaattttgcagtgttcccacaagtccttccctgatccaaagttccttctcagggacagttagggacaaggaaaaggtgtaacggtttgggaacattcccttggctggaagagatgcatcccttaatgggtggccttcacaactttccatgatgtaattccgggtatttggaacaagtagccacgtgggaccggatctttggacagggaagaaattcttacggcagccatggcaagaagtctctgtgcgtctcgatctgccgctcgagctccacggctcggacgccaggtgccagagcgctgcgacacaccccacagacaggcttcttcggcttcagacattcctgcaggcatgcagagcaaaacacgtgtccgcagggcacctgtaccggcttctcgtacacctctaagcacacgggacacgtgaagcgtcctagggggtcagcctccgccgccggccccgccagctgcgcagcacccccgcagtcccgctgttgcgccgccatc

SEQ ID NO: 5970 - DNA, 777 bp, Homo sapiens
  SIMILAR (4)..(216): 421254mologous to Mus musculus Pro-Pol-dUTPase polyprotein,accession number Y12713,Smith-Waterman Score=115.
atggcctttgaacaagctaaacaagcagtgcaactggccctggatctatggcccatacgggatgggccagtagaactgcaagtaactgtcctagatcaatatgctaattggagccttgggcagaaacaagatgggaagagggtacttttcgggatttggacccagaaaccaccagagggaggaaaagcttatacctctttcaagaagcaactactatttaatcagcaggaagatcaacaggcaaaaatttccaccataactgcgatcttgaatgtgggtaaatggattacaacatgttcaagccttgcaatgagaggcattatagtgtatggtggtataactgatagggattaccagggagagttaaaggtcattttatacaataacactccagattcttttgctataaaaccacagatgcttgttgctcaattgttagtggtaccttgtgaacaattaacccctgaggaaatctttgtccaacagagtctacatacagaactgggggattcagatcccctggtacagggaataacctatctactaatggtcagcacctgtgtctttgtgtctgaggccaagaataaattcatcaactttttagccaccgctgcaacagaagccaaccacaatcaatgttggctatacgtcgagttgcaggaggatgccaaaaatggctaccttggagaatcatccctgacaacatttctgaatggctatattgttaccaatgggccacaacaacaacacttgcaatccaacctgggcttcctttga

SEQ ID NO: 5971 - DNA, 5713 bp, Homo sapiens
  SIMILAR (264)..(3311): 1001254mologous to Homo sapiens expressed ubiquitously; product similar to D.melanogaster mam protein,accession number D83785,Smith-Waterman Score=5318.
cggccgcggcggtagcgcggaaaacaatggggccggggcggtggggagaggccgaggcttgaggtaggcagcaagcgccggctgggggtcgggccgagcggggcaggaggaaaacccgccgccgcgcgcgagcccgctccgctgccctcgggggcatggcgcggccgtgaggcggagaggggtagccgcggggagcgaagcccgcagtgccagccggccccgagaggcccggccccgggcccggcccgtgcagcccgcggcccatggtgctgcccacctgccccatggcggagttcgcgctgccgcggcacagcgcggtcatggagcgccttcgccggcgcatcgagctgtgccggcgccaccacagcacctgcgaggcccgctacgaggccgtgtcgcccgagcgcctggagctggagcgccaacacaccttcgccctgcaccagcgctgcatccaggccaaggccaagcgcgccgggaagcacaggcagccgcccgccgccacggccccggcgcccgccgccccggccccgcgcctggacgccgctgacggccccgagcacggccgcccggccacgcatcttcatgatacagttaagaggaatcttgacagcgccacttcccctcagaatggcgatcaacagaatggctacggggacctctttcctgggcataagaagactcgccgggaggcccctctgggagttgccatctcttccaatggactgcctccagcctcccccctcggtcagtctgacaagccttctggagccgacgccctgcagtccagtgggaagcactctctggggctagactctctcaacaaaaagcgtctggctgactccagccttcacttgaatggaggcagtaaccccagtgagtcatttcctctgagcctgaataaagaactgaagcaggagcctgtcgaagacctgccttgcatgatcactgggactgtcggctccatatcgcaaagcaacctcatgccagacctcaaccttaacgagcaggagtggaaggagctcatcgaggagctgaacaggtcggtgcccgatgaagacatgaaggacctgtttaatgaggacttcgaggagaagaaggacccagagtcttctggctctgccacacaaacccccttggcacaggacattaatattaagacggaattctctccagcagcctttgagcaagaacagttaggctctccacaagtgagggccgggtctgcagggcagacctttctggggccttcctctgcccctgtgagtacagattcccccagcctagggggctcccaaaccttattccacacctctggtcagccccgggcggacaatcccagtccaaacctgatgccggcatcagcccaggcccagaacgcacaaagagcccttgcaggtgtggtattgcccagtcagggcccaggaggggcctcagagctgtcctctgcccaccagctccagcagatcgctgccaagcagaagcgcgagcagatgctccagaacccacagcaggccaccccggcaccagccccgggccagatgtccacatggcagcagacggggccctcccacagttccttagatgtcccttaccccatggagaagcctgccagcccttccagctacaagcaagacttcactaactccaaactgctcatgatgcctagtgtgaataagagttcccctcggcccggaggcccctacctccagcccagccatgtgaacctgctgagtcaccagccaccgagtaacttgaatcagaactccgcgaataaccaggggtctgtgctggactacggcaatacaaaacccctttctcattacaaagcggactgtgggcaaggcagcccggggtctggccagagcaagccagccctgatggcttatcttccccagcagctgtcccatataagtcacgagcagaactccctgtttctgatgaagccaaagccaggaaatatgcctttccgatcactggttccacctggccaggagcagaacccttccagtgtccctgtgcaagcccaggctaccagtgttgggacccagccgcctgccgtgtccgtggccagctcccacaacagctccccctatctcagcagccagcaacaggccgctgtaatgaagcagcatcagttgcttttggaccaacagaaacaaagggagcagcagcaaaagcatttacagcaacagcagttccttcagaggcaacagcaccttctcgcggaacaggagaagcaacagtttcagcgccatctgacccgcccaccaccccagtaccaagacccgacacaaggcagcttcccacagcaggttggacagttcacagggtcctctgctgccgtgcccggcatgaacaccttgggtccatccaactccagctgtcctcgagtgttccctcaggctgggaatctgatgccaatgggccctggacatgcttcagtttcctctctccccacaaactcaggccaacaggaccggggtgtggctcagttccctggctcccaaaacatgcctcagagcagcctctatggcatggcttctggcataacccagatagttgcccagcccccgccacaggccaccaatggacatgcccacattccacggcagaccaacgtgggccagaacacctccgtctcagctgcctatgggcagaactctctgggaagctctggcctctcccagcagcacaataaggggaccctgaaccctggtttaacaaagccaccggtcccaagggtgtcaccagccatgggaggccagaattcctcctggcagcatcagggaatgccgaacctcagtggccagaccccagggaacagcaacgtgagtcccttcactgcagcctccagtttccacatgcagcagcaggcccacctgaaaatgtctagcccgcaattctcccaggcagtgcccaacaggcccatggctcccatgagctcagcagctgccgtggggtccttgctacccccagtgagtgcacagcagaggaccagcgcccctgccccagcaccacccccaacagcccctcagcagggcttgcctggcctgagcccagcagggcctgagctgggggccttcagccagagccctgcctcacagatgggcggtcgggcggggctgcactgcacccaggcctaccctgtgcggaccgcgggccaggagctgccttttgcctatagcgggcagccaggtggcagtgggctctctagtgtggctggacacaccgatctgatcgactccctgctgaagaacaggacttcagaggagtggatgagtgatttggacgacctgttagggtctcagtaatggaaggatttgtagtgtttttagtgttcattcatcctatatttttattctcagattcaaagaaagagcaactactttggaccaaaagcccatggcctggggagctgggcaggtagagcccaagctccaggtgaggcctggccctgggcagggtctgtggctgcgcccctcaggccagcagttgaggtccatcgggctggccccagcccatctgctggcatcagtacctggtgttgggacagcaggatagggttctaaaggtggttttctatccaaacgaccaaaaaaccaacagtaacaccagtgaaaccccacactgtcgggcttataaaaatctgtgccatcatggtgattttatccaagactgctccacttaccccagtgctggggacaagtttctgttgaaactttagatagcagaattatttgcaatttgtagcatagaaaagatttttaaatttttttacaaaaggtttttaaacagattagggtaggtgatggtttaaatcaattaagtggcattggaaacctagggtttccttttgattaagagccttttttgtttctgctctttgtcagctttcaggggagaaggaggccactggaaaattatttccctaagtgcaggctgttgactgcgtatgccaaaaagggacaggaggcatgggatagcaggtctggtgacacagctagggtcttcctagcagctcctcctcctccctcccaaggcccccaggaatcccttcctcccatgtcctggcagcaggaccccaggctacatatggaaggtagagatgtgggggtcctgtatcctggagtattatgtctccccaccttctgcagttttctctgaacatgtatgttgcccatggtgggagcgtggtcactgtgcagttgtgcacagatgtctttcctttaccgttggcctttctgtctgcctctccttcctctctgcagcccaaatggaaaacaattatttactccattggagggaaaggaagagtcttagaattcctaagggaaccttagcataaaggttttggggaaggaggccgtaggccggcccggaggaagcaattccacttggtttgacaacttctgccactcccatgtcagatgacttgcacttcttaaagagattgctttataacactaagacatcctttctaaagattcaagtggacttgactaagctgagggtccacgaaatagaatatgacatgtgagctgtttttggaaaacgaagatggagagagcacttccccgtaacgaaagcaaagtggtaagcacagggtgagacccttttacacagaatggtggagagaaaagagaatgctgaaaagtggctcagatgcagagtgttctgtggagaaactgcagccccacttctgtttccctggagtctcccaatggatcattcaggagtgtcctatgtgagaattgagccaaggaaaatactcatgcaaccagcctgagtcgcggtgaggggatgagaggttgtacacacattggtagttattttgcaccagcagtgcctttctcactgggggtacttggaccctcagatcttcttttctaatagccatttgccaccccaagtggtatgtcggccatttctccttaaaacaccttccctacctttcccatgtactcagtttagctctcaaagaaggggtgaatcataaagccagtgaaaatttcaccctctgagggagttccccaatctgaaggggaagagggtgacctcagcggcttttctcccaaaaatcggctgaaggctggttgtggatccttgttcctctcctgaccccatctggctgctgccccgtctcccacccctgtccccggggctcgctggccctgcactccgccttagtcctggggccggcgacacagtgggggctcctcacttgctgcagtgtcatagcaataaaatgtgattcttggggtccccccagggagctgcccatggctttatttatgaacctggttttcgggagtcaggggaggagatgactttgcttctgtgcacagccccgtcttccaggagccacaactcagaagaaaagggtgctcagacttttgttatacacatttgctttgtgtaaataaatgtttacaattttatatgaaagatggaataagcgctagagcttccaactgtatattttttacttttatagattttaaaactatgatcctttatatgtgtgttttgggggagctatgataagttttatggcaaacggttggtattgttaactttttattgtcatcaaaagttcataaaagtcctattaatccccatattcttctactgcccttaactctggtatacaccaaaaagaaatctttactttccttgttttatcattataaaaataaagtattttgctagt

SEQ ID NO: 5972 - DNA, 1065 bp, Homo sapiens
  SIMILAR (592)..(882): 601254mologous to Mus musculus BUB2-like protein 1,accession number U88873,Smith-Waterman Score=317.
atggcggcctgcatgtaccgccaaacaagaagcatactagccgaaactatactacgtccgcaatttgctggcacacatactactataatagcccaccaggccaatgcagatcggtgcacatgcaccccaagtagcaccattcaagcatctatcgatcgaccaactagaacaatttggccctcagagagccagcctcctggatgccccccagacacagtgggtgccatggagccagtgcctctccctcactctgctgtcctggagcctggctccctgtgcctctctgggatggcgctccgggacagggaaacagggaagcaggccgggagagcgctcgaggctaggcctatcggccacatcgcaaaccgcacgggcgagcggggattgccgacctcgattagacgctgcgccccgagcggggcgccggagccggtgagaaggtggccagaccgaaagcggcgaaagccacaacaaccagagagagaactgacaagaaatacaggaaatataagtcacgagcagaactccctgtttctgatgaagccaaagccaggaaatatgcctttccgatcactggttaccacctggccaggagccctggtggaccaaggcatcttcgaagagctcacgagagacttcctgccgcagctctcggagaagatgcaggacctgggggtgatctccagcatctcgctgtcctggttcctgaccctcttcctcagcgtcatgcccttcgagagcgccgtggtcatcgtcgactgctttttctatgagggcatcaaggtgatcctgcaggtggccctggccgtcctggacgccaacatggagcagctgctgggctgcagcgacgagggcgaggccatgaccatgctgggcaggtactactgccgctatgtcctcagcgattacggctgtcatggttacgggggcttgcatgcagaacgactgaatgctggcggagtctccgagctaccgacgtcactcttcgcagccaaggatgtttttaaggatcccattttaaaccggcgtttcgaacgcgcggggaatccgcgggccacaaactga

SEQ ID NO: 5973 - DNA, 566 bp, Homo sapiens
  SIMILAR (3)..(566): 871254mologous to Mus musculus mCBP,accession number X75947,Smith-Waterman Score=796.
ctgccagtagacccccggtcaccctgaggctggtggtccctgctagtcagtgtggctctctcattggaaaaggtggatgcaagatcaaggaaatacgagagagtacaggggctcaggtccaggtggcaggggatatgctacccaactcaactgagcgggccatcactattgctggcattccacaatccatcattgagtgtgtcaaacagatctgcgtggtcatgttggagtcccccccgaagggcgtgaccatcccgtaccggcccaagccgtccagctctccggtcatctttgcaggtggtcaggcctataccattcaaggacagtatgccattccacagccagatttgaccaagctgcaccagttgggcaatgcaacagtgttcattttcccatgacgcatgggcaacaccggatttcagtgggcattggaatccaggttttccagaggtggaaaggctattggggcaggtttggatgcatctgctcagactacttctcatgaactcaccattccaaacgatttgattggctgcataatcgggcgtcaaggcgccaaaatcaat

SEQ ID NO: 5974 - DNA, 713 bp, Homo sapiens
  SIMILAR (272)..(529): 591254mologous to Sus scrofa heterogeneous nuclear ribonucleoprotein,accession number X94253,Smith-Waterman Score=181.
aactctccggtcatcttggcaggtggtcaggacaggtacagcacaggctgcgacagtgcgaggctttcccccacacccaccccgtcccatgtgcctcaaccctgaccctggagggaccacctctagaggcctataccattcaaggacagtatgccattccacagccagatttgaccaagctgcaccagttgggcaatgcaacagtctcattttcccatgcacgcgatggcatacactcggattacagcgcaggttgtggatgcatctgcttcagactacttctcatggaactcaccatttccaaacggattttgattgggctggcataatcggggcgttcaagggcgccaaaaatcaatggaggatcccgtcagatgtctggggcgcagattcaaaattgcgaacccagtgggaaggatctactgattagggcaggtttaccatcactggatctgctgccagcattagcctggctcaatatctaatcaatgtcaggctttcctcggagacgggtggcatggggagcagctagaacaatgcagattcatccataatccctttctgctgttcaccaccacccatgatccatctgtgtagtttctgaacagtcagcgattccaggttttaaataggtttgtaaattttcagtttctacacactttatcatccactcgtgattttttaattaaagcgttttaattcctttaaaaaaa

SEQ ID NO: 5975 - DNA, 1542 bp, Homo sapiens
  SIMILAR (360)..(1052): 441254mologous to Mus musculus nuclear poly(C)-binding protein, splicevariant E,accession number X97982,Smith-Waterman Score=329.
cctccacccccccttcctcctccgcccgcccgcggggcccccctcgccttcccgcccgcccctattgttccgcccccggcctcccgcccttccccttcccgcccgctccccttttcccctcagtcgcctcgcgcctgcagtttttggctttcaccctcaaccatgtgaccaaagacttgaccactcaaagtccagctccccagaacactgctcgacatggacaccggtgtgattgaaggtggattaaatgtcactctcaccatccggctacttatgcatggaaaggaagttggcagtatcatccggaaagaaaggagaatcagttaagaagatgcgcgaggagagtggtgcacgtattcaacatctcagaagggaattgtcctgagagaattattcactttggctgggacccactaattgccatctttcaaagcctttgctatgatccattgacaaactgggaaggagggacataagcagctctatggaccaatagcacagctgcccagttaggacccccggtcaccctgaagcttgggggcccctgctagtccagtgtggctctctcattggaaaaggtggatgcaagatcaaggaaatacgagagagtacaggggctcaggtccaggtggcaggggatatgctacccaacttcaactgaggcgggccatcactatttgctgggcattccacaatccatcatttgagtgtgttcaaacagatcttgcgtgggtcatgttgggagactctcttccccagttcccccccgaagggcgtgaccatcccggtaccggcccaaagccgtccagctctccggttcatctttggcaggtggtccaggacaggtaccagcacaggcagcgacagtgcgagctttccccacaccaccccgtccatgtggctcaaccctgacctgggagggaccacctctagaggcctataccattcaaggacagtatgccattccacagccagattttgaccaagctggcaccagttgggcaatgcaacagtctcattttcccatgacgcatggcaacaccggattcagtgggcattgaatccagcttttccagaggtgaaaggctattggggcaggtttgggatgcatctgctcagactacttctcatgaactcaccatttccaaacggttttgattgggctggcataatcggggcgttcaagggcgccaaaatcaatggagatccgtcagatgtctggggcgcagatcaaaattgcgaacccagtggaaaggatctactgataggcaggttaccatcactggatctgctgccagcattagcctggctcaatatctaatcaatgtcaggctttcctcggagacggggtggcatggggaacaactagaacaatgcagattcatccataatccctttctgctgttcaccaccacccatgatccatctgtgtagtttctgaacagtcagcgattccaggttttaaatagtttgtaaattttcagtttctacacactttatcatccactcgtgattttttaattaaagcgttttaattccttt

SEQ ID NO: 5976 - DNA, 693 bp, Homo sapiens
  SIMILAR (133)..(321): 921254mologous to Mus musculus Fish protein,accession number AJ007012,Smith-Waterman Score=309.
atggaagatgttactggaaagcggtcacaattcagaccccaagagagggttcttggatcttatgcaagaaaaaatttggggaaaggtgactgtttctctcttgtttccttgaccgtggacggggtggtggcaggcaagatcctcttccgcagaagccacatccgggacgtagctgtgaagagactgaagcccatcgatgaatactgccgggcacttgtccggctgcccccccacatctcacagtgtgacgaagtcttccggttcttcgaggctcgacccgaggatgtcaaccctccaaaagagtcccagcaggccagccgtgggccgccacctccatcctccaccaagcaacctctcctgagcttctacaccaagtgtcacagcgtccatgaccacatgctcaagagatgcactgtggtttccgatggtgatggagcatcccctctagagcacctgcagctgtcaagcttcctgggctgcctcctggtggttctgccgctggtgtggctgctcagtggtgtcctcctgcgctcctggcttgagcacctgtgtgggacctgcctggcctccttaagctcaatgactgtctctggtaccctgatctggctcttctggaacaagggacacatgagcctggcctcctccctgcaggccttcctgataacctttgttggcgccgacctcaggccttga

SEQ ID NO: 5977 - DNA, 402 bp, Homo sapiens
  SIMILAR (265)..(393): 761254mologous to pestivirus type 1 nonstructural protein P125-2,accession number U89438,Smith-Waterman Score=169.
atggatggccaggcgcgatggctcacacctgtaatcccagcactttgggaggccgaggtatttattgagcatatgttgtatgccctcaacattttaagaactgtacttggacgtgcacgcaccctgtccctcaaccaccgctgccgcctccttcttctgtcactcctggtgctgcactgtgttcgttcagtgagaagctggtacctcttttgtgaagcggcagctgagaagactctggcatttgccatggccgaggaaaagcccaaggcattgtcaatggggcagatcagattccgatttgacagtcagccaatcaatgaaacagacacacctgtacaggtggaaatggaggatatagatataattgatgtgttccaccagcagataggaggtgtctactga

SEQ ID NO: 5978 - DNA, 644 bp, Homo sapiens
  SIMILAR (111)..(395): 1001254mologous to Homo sapiens SMT3B protein,accession number X99585,Smith-Waterman Score=497.
  misc_feature (1)...(644): n = a,t,c or g
gaattcccgcctccttcttctgccgctcctggtgctgcttgtgtgctcgtttggtgcgttcctggtacctcttttgtgaagcggcagctgaggagactccggggctcgccatggccgacgaaaagcccaaggaaggagtcaagactgagaacaacgatcatattaatttgaaggtggcggggcaggatggttctgtggtgcagtttaagattaagaggcatacaccacttagtaaactaatgaaagcctattgtgaacgacagggattgtcaatgaggcagatcagattccgatttgacgggcaaccaatcaatgaaacagacacacctgcacagttggaaatggaggatgaagatacaattgatgtgttccaacagcagacgggaggtgtctactgaaaagggaacctgcttctttactccagaactctgttctttaaagaccaagattacattctcaattagaaaactgcaatttggttccaccacatcctgactactaccgtatagttttctctattctttcatttcccccttccccattcctttattgtacataaagtaactggtatatgtgcacaagcatattgcannnnnnnnnnnnnnnaactaaacagccaatggtatgttttgattgacatcaaa

SEQ ID NO: 5979 - DNA, 249 bp, Homo sapiens
  SIMILAR (91)..(246): 1001254mologous to Homo sapiens HSPC240,accession number AF151074,Smith-Waterman Score=275.
atggtttgggccaacgcaggtgccaccacggcgacttgttttcctcccttgcgggtggaggcctccgctcactgcaaggctgccccacaggtctccttccgctaccactgccagctgtactccgagtggagaaagaccaaccagaaagttcgcctgaagatccgggaggcggacagccccgagggcccccagcattctccactggcagctggactcctgaagaaggtggcagaggagacaccagtatga

SEQ ID NO: 5980 - DNA, 477 bp, Homo sapiens
  SIMILAR (321)..(476): 1001254mologous to Homo sapiens elongation factor-1- beta,accession number X60489,Smith-Waterman Score=267.
  misc_feature (1)...(477): n = a,t,c or g
agggggggattgccactgcccgcctgcangaattcggcacgagttaagacatgcctattttattaatttacttccaaacgcaacgaaaggtccatggacaatttgtgggccatttaattcagggcccccaattcgtacgtggagaagtgggaatgcaaaagtactttgacctttaaccttcggtccggcgcggtggagggaaacgcctccgtctctatataaggaattttccggtctcttcgggtcctttttcctctcttcagcgtggggcgcccacaatttgcgcgctctctttctgctgctccccagctctcggatacagcctgccaggagtgaagaaagctttgggcaaatatggtcctgccgatgtggaagacactacaggaagtggagctacagatagtaaagatgatgatgacattgacctctttggatctgatgatgaggaggaaagtgaagaagcaaagaggctaaggg

SEQ ID NO: 5981 - DNA, 451 bp, Homo sapiens
  SIMILAR (169)..(429): 931254mologous to Homo sapiens elongation factor-1- beta,accession number X60489,Smith-Waterman Score=425.
actcggcagttcccattatcttcgggagctgtggaggtaggaatttaagacaggcccattttattaatttattttcaaatgcaacaaaaggtccaaggacaatctgtgggccacttaattcagggccctcaattcgtacatggagaactctcagatacagccaaagccatgggttttggagacctgaaaagccccgccggcctccaggtgctcaatgattacctgacagacaagagctacatcaaggggtatgtgccatcacaagcagatgtggcagtatttgaagcagtgccccgcccactgcctgccgacttgtgtcatgctctatgttggtataatcacatcaagtcttacgaaaaggaaaaggccagcctgccaggagtgaagaaagctttgggcaagtatggtcctgcagatgtggaagacactctcgtgccgaattcctgcagcg

SEQ ID NO: 5982 - DNA, 1308 bp, Homo sapiens
  SIMILAR (1198)..(1154): 561254mologous to Ovis aries small proline-rich protein with paired repeat,accession number L77967,Smith-Waterman Score=54.
atggaacatctgctaaccctggccacatgttccttgatgggaagcagctatagagagggtctaactccagttctcagcttattaaccgaatgttcccgagcccatcgaaacatccgaaaatttctcaaagatcaggagtggggcacggggcacagatgcacatctacggattccgggggtgtgacttgcacgcttgagaggaggaccggaggtcaagctgctgggccaggaatcagaggagtgggcgctacagtgggggtagtgggatgcaggatgcatggatggaaaaggctgggggcacaaacacgcatgcccaagccggaaacgttttcgggggagagcaatgcgcatccccggaatgaggggggggagaaggttctgaagggaccaaaaggacattggggtaaacaaaatgaagctgggcaaaaccacgcaactaagggaaggggaaaaacgggaaaaaagaagaaaggggttggaatttctccaggggacccaaaagaaaaattaaggaaggtccaaaccggccctaaagaagaatcccttcgtgtgatgtatgcgctcgctgtagaaaatatcctcaacacttttacgcacacgcaccacgcattagatagatatagtcttaggagtgcgcttccttttctggcttataatcccatggagaacttacgctttctgggaccttcactggagcacacgtcccctctggaatttgtctgggctgacagctcaactgaagtaaaggtacagcaacccttgatctccttggtttgcttttcctggggtggaaccatgttccgccaccaggatgactgttgtcccggtattctcagcagtgtcacatccaaggtacagctgctatcccatgaggaagggcagaatggaaggagggcatcaatattctctcctcctgaaatgataccaccttcaaaggctgagagagaaaagaagtccctaaggtttaagggcggaggaagagaaagacagcaagcaggcttggttgtgatagtgaaaatcgaaatgagccacataaggtgtctccctccagctttgccttctgccatgagtaaaagcttcctgaggcttccccggaaagatgctgccttgcttcctgtacagcctgtagaactttcagttcctgctgttacggctttgtctgatgatgatgatgatgatgataacgatgatggttatgatgatagcaagccttttttgtgcaggcttagaaaaactccaggccgttttgtacccagtagaaaaaaactcccttttcacacctcttctaaccacagtcaagactggtga

SEQ ID NO: 5983 - DNA, 583 bp, Homo sapiens
  SIMILAR (82)..(270): 791254mologous to Homo sapiens elongation factor-1- beta,accession number X60489,Smith-Waterman Score=268.
atgggtttcagagatctgaaaagcccggctagcctccaggtgctcaacgattacctggtggacaagagctacatcgagggtatgtgccatcacaagcacatcaagtcttatgaaaaggaaaaggccagcctgccaggagtgaagaaagctgtgggcaggtatggtcctgctaaggtggaagacactacaggaagtggagctacaaatagtaaagatgatgatgaaattgatctccttggatctgatgaggaggaaagtgaagaagcaaagagttcagttcctgctgttacggctttgtctgatgatgatgatgatgatgataacgatgatggttatgatgatagcaagccatttttgtgcaagcttagaaaaactccaggccgttttgtaccagttagaaaaaaactccctttccacacctctcctaaacacagtcaagactgggtcaagatccccagtatcactgtcttccgcctccacatcctgtcccactggaaggtcttcaggggcaatggcatgcatggagctgtcatctcctgtgatagcaatgccttctggaataccccctgaaggacctgcctga

SEQ ID NO: 5984 - DNA, 1106 bp, Homo sapiens
  SIMILAR (472)..(603): 721254mologous to Homo sapiens elongation factor-1- beta,accession number X60489,Smith-Waterman Score=171.
atagaccgccttaggaattcgcgcccatggcgcttctagggctggttcccgtcatcttcgggagccgtggaggtacgaacttaagacatgcctattttattaatttacttccaaacgcaacgaaaggtccatggacaatttgtgggccatttaattcagggcccccaattcgtacgtggagaagtgggaatgcaaaagtactttgacctttaaccttcggtccggcgcggtggagggaaacgcctccgtctctatataaggaattttccggtctcttcgggtcctttttcctctcttcagcgtggggcgcccacaatttgcgcgctctctttctgctgctccccagctctcggatacagccgacaccatgggtgttcggagacctgaaaagccctgccggcctccaggtgctcaacgattacctggcggacaagagctacatcgaggggtatgtgccatcacaagcagcatgtggcagtatttgaagccgtgtccagcccaccgcctgccgacttgtgtcatgccctacgttggtataatcacatcaagtcttacgaaaaaggaaaaggccagcctgccaggagtgaagaaagctttgggcaaatatggtcctgccgatgtggaagacactacaggaagtggagctacagatagtaaagatgatgatgacattgacctctttggatctgatgatgaggagggaaagtgaaaagccaaagaggctaaagggaagaacgtcttgcacaatatgaatcaaagaaagccaaaaaacctggaacttgttgccaagtcttccatcttactgctcgtgaaacccttgggactgatgagacagatatggcgaaattagaggagtgcgtcagaagcattcaagcagacggcttagtctggggctcatctaaactaagttccagtgggatacggaattaagaaacttcaaatacagtgtgtagttgaagatgataaagttggaacagatatgctggaggagcagatcactgcttttgaggactatgtgcagtccatggatgtggctgctttcaacaagatctaaaatccatcctggatcatggcatttaaataaaagattgaaagattaaaaaaaa

SEQ ID NO: 5985 - DNA, 211 bp, Homo sapiens
  SIMILAR (22)..(210): 1001254mologous to Homo sapiens dJ977B1.1 (novel protein tyrosine kinase with Src homology domain 2 domains),accession number AL050318,Smith-Waterman Score=337.
atgatcctgcagcagtccaaggatggagactggtggacggtgctgtctgaagtctcaggcagagagtataacatccccagcgtccacgtggccaaagtctcccatgggtggctgtatgagggcctgagcagggagaaagcagaggaactgctgttgttacctgggaaccctggaggggccttcctcatccgggagagccagaccaggagag

SEQ ID NO: 5986 - DNA, 241 bp, Homo sapiens
  SIMILAR (218)..(135): 461254mologous to Myxine glutinosa 40S ribosomal protein S19,accession number AF153049,Smith-Waterman Score=65.
ccagtgttggaggttgggtcaagtaggaggtttttgggtcatggtggcaggtccctcatgaatggctgggttctgtccttgtggtaatgagtgagttcttattccattagctcatgtgagagctggttttaaaaagagtctagtgtctttctcacctttctcttgctccctttttggccatgtgatatgcctgctcctcctcttcgccttccaccatgattgtaagcttctttttcttttc

SEQ ID NO: 5987 - DNA, 591 bp, Homo sapiens
  SIMILAR (301)..(579): 881254mologous to Homo sapiens S-adenosylmethionine decarboxylase proenzyme (EC 4.1.1.50) old gene name 'AMD',accession number M21154,Smith-Waterman Score=418.
atggtggaaggcgaagaggaggagcaggcatatcacatggccaaaaagggagcaagagaaaggtttcccaatgcctatatcaggttgtcaagagttgctagagagaagccaggtgtggtggctcatgcttgtaataccaacactgggaggccaagtagttctacgttgtctatacttgttgctacgtctactactaatagtcccgtggtaataatgttgttacccgttggatttagtcgttttgattattgtgagtactacgatgtgctgcgagctgctggtgcaacccaaggacatagaaaggtaatcagtcagccagatcaaaccctggaaaatttgatgagtgggcttgacccagcagttatggaccagttctacatgaaagatggcgttactgcaaaggatgtcatttgtgagagtggaattcacaacctgataccaggttctgtcattaatgccacaatgttcaatccttatgggtattcgatgaatggaatgaaatcagatggaacttattggactattcacatcactccagaaccagaatctttttatgttagctttgaaacaaacttaagccacctcctatga

SEQ ID NO: 5988 - DNA, 1886 bp, Homo sapiens
  SIMILAR (826)..(912): 891254mologous to Homo sapiens S-adenosylmethionine decarboxylase proenzyme (EC 4.1.1.50) old gene name 'AMD',accession number M21154,Smith-Waterman Score=125.
  misc_feature (1)...(1886): n = a,t,c or g
gcttacacagtatggccggcgacattagctagcgctcgctctactctctctaacgggaaagcagcggaatacaagagactgaactgtatctgcctctatttccaaaagactcacgttcaactttcgctcacacaaagccgggaaaattttattagtcctttttttaaaaaaagttaatataaaattatagcaaaaaaaaaaaggaacctgaactttagtaacacagctggaacaatcgcagcggcggcggcagcggcgggagaagaggtttaatttagttgattttctgtggttgttggttgttcgctagtctcacggtgatggaagctgcacattttttcgaagggaccgagaagctgctggaggtttggttctcccggcagcagcccgacgcaaaccaaggatctggggatcttcgcactatcccaagatctgagtgggacatacttttgaaggatgtgcaatgttcaatcataagtgtgacaaaaactgacaagcaggaagcttatgtactcagtgagagtagcatgtttgtctccaagagacgtttcattttgaagacatgtggtaccaccctcttgctgaaagcactggttcccctgttgaagcttgctagggattacagtgggtttgactcaattcaaagcttcttttattctcgtaagaatttcatgaagccttctcaccaagggtacccacaccggaatttccaggaagaaatagagtttcttaatgcaattttcccaaatggagcaggatattgtatgggacgtatgaattctgactgttggtacttatatactctggatttcccagaggagnggggtaatcagtcagccagatcaaaccttggaaattctgatgagtgagcttgacccagcagttatggaccagttctaacatgaagatggtggttactgcaaaggatgtcactcgtgagagtggaattcgtgacctgataccaggttctgtcattgatgccacaatgttccaatccttgtgggtattcggatgaatggaatgaaatcgggatggaacttattggacttattcacatcactccagaaccagaattttcttatgttagctttgaaacaaacttaagtcagacctcctatgatgacctgatcaggaaagttgtagaagtcttcaagccaggaaaatttgtgaccaccttgtttgttaatcagagttctaaatgtcgcacaaggcttggtttgccccaaaaagattgagggttttaagcgctttggattgccaagagggttggttcaaggattccaatttttttttttaccagttttgctaagaagcagcaacaacagcagagttgattaagaaaaatgaagaaaaaacgcaaaaagagaacacatgtagaaggtggtggatgctttctagatgtcgatgctgggggcagtgctttccataaccaccactgtgtagttgcagaaagccctagatgtaatgatagtgtaatcattttgaattgtatgcattattatatcaaggagttagatatcttgcatgaatgctctcttctgtgtttaggtattctctgccactcttgctgtgaaattgaagtggatgtagaaaaaaccttttactatatgaaactttacaacacttgtgaaagcaactcaatttggtttatgcacagtgtaatatttctccaagtatcatccaaaattccccacagacaaggctttcgtcctcattaggtgttggcctcagcctaaccctctaggactgttctattaaattgctgccagaattttacatccagttacctccactttctagaacatattctttactaatgttattgaaaccaatttctacttcatactgatgtttttggaaacagcaattaaagtttttcttccatg

SEQ ID NO: 5989 - DNA, 690 bp, Homo sapiens
  SIMILAR (1)..(678): 571254mologous to Homo sapiens unknown protein,accession number M22333,Smith-Waterman Score=665.
ctaggaaatgagatagacagcaacacaataatagcaggggacttcagtactccactgacagcactagacaggtcatcaagacagaaactcaacaaagaaacaatggatttaaactatactttggaacaaatggacttagcagatatatacagaacatttcatccaacaactgcagaatatacattctattcaacagcgcatggaactttctccaagatagaccatacgataggccataaaacaagcctcaataaatttaagaaaactgaaattacatcaagcactctctcagatcacagtggaataaaactggaaattgactccaaaaggaaccttcaaaaccatgcaaatacgtggaaattaaataacctgctgaatgagcattgggtcaaaaacaaaaccaagatggaaattaaaacattcttcgaactgaatgacaatgatgccacaacctatcaaaacctctgggatacagcaaaggtggtgctaacaggaaagttcatagccctaaatgcctacatcaaaaggtctgaaagagcacagacagacaatctgaggtcatacctcaaggaactagacaaacaagaacaaaccaaacctaaacccagcggaagaaagaaaacagccgagatcagcacagaactaaatgaaattgaaataacaacaacaacaacaaaatacataagataa

SEQ ID NO: 5990 - DNA, 897 bp, Homo sapiens
  SIMILAR (499)..(894): 801254mologous to Homo sapiens putative p150,accession number U93570,Smith-Waterman Score=558.
atggttgaatctatggatgcagagcctacagatacaagacacgcagcccaaactctctgcttccaaagcctagtggatccacccaatggacctcacctcccgcagtcccagcacacgctgcttaatctgagaggagcctgctccctgcgcggcagcgtgcatgttgacctgggggctttctcgcactgttcccaccacctgagatacctgctcccttctaccccgaacaatgagacaacgcttagaacattcgaccaccagatagacataggagcatttctcagaaggctagacagcagtttcaccgtggagcggggcaaatctgatcagatcaccaggaaaagtcgcacagcacctcattcccagaacagagcacacctgaagcggaggggcctcaaggaaatatcagcctccatggggcctcaaggaaatatcagcctccattcagcccgagctgccttccagctgtgggccacccggcacctcagacagagggagacaccctttaattcaaaatggattaaagacttaaatgttagacctaaaaccataaaaaccctagaagaaaacctagacaataccattcaggacacaggcatgggcaaggacttcatgactacaacaccaaaagcaatggcaacaaaagccaaaatagacaaatgggatctaactaaaccaaagagcttctgcacagcaaaagaaactaccatctgtgagaaaatttttgcaatctacccatctgacaaagggctaatatccagaatctacaaagaacttaaacaaatttacaagaataaagcaaacaaccccatcaaaaagtgggcaaaggatatgaacagacacttctcaaaagaagacatttatgcagccaacagatggatgaaaaaatgctcatga

SEQ ID NO: 5991 - DNA, 1458 bp, Homo sapiens
  SIMILAR (1302)..(1454): 431254mologous to Homo sapiens putative p150,accession number U93574,Smith-Waterman Score=65.
atgattatctccatagatgcagaaaaggcctttgacaaaattcagcagcccttcatactgaaaactctcaataaactaggtattgatgggatgtatctcaaaataataagtgctatttatgacaaacccacagccaatatcatactgaatgggcaaaaactggaaacattccctttgaaaaccagcacaggacaaggatgccctctctcaccactcctattcaacatagtgttggaagttctggccggggcaatcaggcaagagaaagaaataaagagtattcaatcaggaaaagaggaagtcaaattgtccctgtttgcagatgacatgactgtatacttagaaaaccccatcgtctcagcctcaaatctccttaagctgataagcaacttcagcaaagtctcaggatacataatcaatgtgcaaaaatcacaagcattcctatacaccaattacagacaaacagagagccaaatcatgagtgaactcccattcacaattgcttcaaagagaataaaatacctaggaatccaacttacaagggatgtgaaggacctcttcaaggagaactacaaaccactgctcaaggaaataaaagaggacacaaacaaatggaagaacattccatgctcatggataggaagaatcaatatcgtgaaaatggccatactgcccaaggtaatttatagattcaatgccatccccatcaagctaccaatgacttccttcacagaattggaaaaaactactttaaagttcatatggaaccaagaaagagacagcattgccaagtcaatcctaagcaaaaagaacaaagctggaggcatcatgctacctgacttccaactatactacaacgttatagtaaccaaaatagcatggtactggtaccagtacagatatacagaccaatggaacagaacagagacctcagaaataacaccacacatctacaaccatctgatctttgacaaacctgacaaaaacaagaaatggggaaaggattccctatttaacaaatggtgctgggaaaactggctagatatatgtagaaagctgaaactggatcctttccttacaccttatacaaaaattaattcaagatggattaaagacttaaatgttagacctaaaaccataaaatccctagaagaaaacctaggcaataccattcaggacataggcatgggcaaggacttcatgactaaaacaccaaaagcaatggcaacaaaagccaaaatagacaaatggcatctaattaaactaaagagcttctgcacagcaaaagaaactaccatcagagtgaacaggcaacctgttgggagaaaattcaggcaacctgaatgggagaaaatttttgcaacctactcatctgacaaagggctaatatgcagaatctacaacaaactcaaacaaatttacatgaaaaaacaaacaaccccatcaaaaagtgggtga

SEQ ID NO: 5992 - DNA, 1158 bp, Homo sapiens
  SIMILAR (55)..(363): 821254mologous to Homo sapiens Human PRO1487 (UNQ756) amino acid sequence SEQ ID NO:260,accession number Y99411,Smith-Waterman Score=463.
atgactgcagatgctgtgctcatcaaaaatggtagtaaagatgctgactgggaatatgaagaaggtgataaattagaagagtttcttagatcgctaaacagcagtaagcctctctacctgggacagactggcctggggaatattgaagagcttggaaagctgggactggagcctggggaaaacttctgtatgggaggacctggcatgatctttagccgagaagttctcaggaggatggtgccacatattggtgaatgccttagagaaatgtacacgactcatgaggatgtggaagtaggaagatgcgttcgccgttttggtgggactcagtgtgtctggtcttacgagggaaggtgttcattcagagtggttcctgacagcgcaatagaattttcaatggactttgaaaaaattctgatgctggaccccacccttcatccgttatgtcaaaatctcttacagaggcttaacaccatgtggaagccaccaaacgtggggcttgtaccctccaaagcaacagcccaagctgtacgttggtcccttttagccatggctagagctggagcagccacaatgccaggagccctgtcccaaggctgcatagaagttagtaggctgctgaagaaattaccagatgatgaaggtatcaccatggacacagtaggctttgctcctttgtgcctgtggcagagactgaccttggctaaccatcagagatattttgcagatgggccccagccagtgtgtaaccacatgcagcctgccccgcaccactttgccagcatgcgttcatctgcagcatcgcccaccagtttgccagcatttgcagaccctgctgctgtacccccactggagcatgtgtatgtgtggaccctgctgttatgccagcgctggtgcacatacatgtacatggactcaactgccaccactctgacaaagcactgttgctgcccaccccccataccccccattggagtgttgttgccagcagactggggacacattggcccctccagtgatagcaggtcagagaacaaagccatggggtctagtcccagcacctagggttagagcatgcagaccaagagtgctaaactgagccttggccccctgaaatcattgagaaatgaagccagttgatggaacccaacttatacc

SEQ ID NO: 5993 - DNA, 1221 bp, Homo sapiens
  SIMILAR (424)..(1215): 851254mologous to Homo sapiens putative p150,accession number U93572,Smith-Waterman Score=1145.
atggacgactccaagatcttttcgggtaaaaagtatgctctgaagagagcagtagatctcccagcacagcactcgagctctgctaagggacagactgcctcctcaagtggatccctgattcccatgcctcctactgggagacacctcccagcaggggtcaacagacaccccatacaggagaactctggctggcatctggcgggtgaccctctggggcaaagcttccagaggaaggaacaggcagcaatctttgctgttctgcagcctttgctggcgatacccataaagcaaacaggtttgggagtggacctccagcaaactccagcagacctgcagcagagaggcctgactgttagaaggaaaactaacaaaccgaaaggaatagcatcaatatcaacaaaaagcacatccacaccaaaaccccatccaaaggtcaccaacatcaaagagggaagaaccaatgacaaaaaccacatgattatctcaacagatgcagaaaaggccttcaacaaaattcaacaccccttcatgctaaaaactctcaacaaactaggtattgatggaacatatctcaaaataataagagctatttataacaaatccatagctaatatactgaatgggcaaaagctggaagcatttcctttgaaaatgagcacaagacacggatgccttctctcaccactcctattcaacatggtgttggaagttctggccagggcaatcaagcaagagaaagaaataaagagtattcgaataggaagagaagaagtcaaattgtctctgtttgcagatgacatgattgtatatttagaaaaccccatcgtctcagcccaaaatctccttaagctgataagcaacttcagcaaagtctcaggatacaaaatcaatgtgcaaaaatcacaaacattcctatacaccaataatagacaaacagagagccaaatcataagtgaactcctattcacaattgctacaaaaagaataaaatacctaggaatacaacttacaagggatgtgaaggacctcttcaaggagaactacaaaccactgctcaaggaaatcagagaggacacaaacaaatggaaaaacatttcatgctcatggataggaagaatcaatattgtgaaaatggccatactgcccaaagtaatttatagattcaatgctgtccctattaagctaccattgacttacttcacagaattagaaaaattctga

SEQ ID NO: 5994 - DNA, 3509 bp, Homo sapiens
  SIMILAR (307)..(1056): 851254mologous to Homo sapiens diacylglycerol kinase iota,accession number AF061936,Smith-Waterman Score=1068.
gggaccatcctggctaacacgcggtaaaacatcatctctactaaaaatacaaaaaaattagccaggcgtggtagcaggcacctgttgtcccagctactcgggaggctgaggcaggagaatggcgtgaacccaggaggcggagctggcagtgagctgagatcacaccactgcaatccagcctgggcgacaaagcaagactctgtctcaaaaaaaaaaaatcaattcaggccaagtgtggtggtgcacacctgtagtcccagctactgggaaagctgaagaagtgggaggatagcttgggcccaggagatggatgctgcgggaaggggctgccatttgctgcccctgccagcggcgcgcggacctgcccgcgctcctgcagccgccgccgccgccgccgccagcccgcccggcccctgcagcggcgccgcctgcgctccctccgcggccgccggagcgggcgccatgaaccccagctcctcggcgggagaggagaaaggggcgacgggcggcagcagcagcagcggaagcggcgccgggagctgctgcctgggcgccgagggcggcgcggacccgcggggcgcagggtcagccgcggcggcgggggccgctgccctggacgagcccgcggccgccggccagaaggagaaggacgaagcgctggaggagaagctgaggaacttaactttccggaagcaggtctcgtacaggaaagcaatctcccgggcaggcctccagcatctggctcctgcacatcccctcagccttcctgtggcaaatggtccagccaaggagcccagagcgactttggactggagtgagaatgccgtgaatggagaacacctgtggctggagaccaacgtctcggggagacctctgctaccttggagaggagaactgccaagtcagatttgcaaaatcagctctcaggaggaagtgtgcagtctgtaaaattgtagttccacaaccgcctgcattgaggagctagaaaagattaatttcagatgtaaaccaacatttcgagaagggaggctcaagggtcaacaagagaaaattttgtacgtcatcactgggtgcacaggcgtcggcaggaggggaaatgtaagcagtgtggtaagggcttccagcaaaagttctccttccacagtaaagagattgtggctatcagctgttcctggtgcaagcaggcgtttcacaataaggtgacctgcttcatgctgcatcacattgaagaaccctgctccctgggggctcatgctgctgttattgtcccgcccacttggatcattaaggtgaagaaacctcagaactccctgaaggcttcaaatcggaagaagaagagaacaagctttaaaagaaaagccagtaaaagagggatggaacaggaaaacaaaggtcgtccttttgtgataaaacccatctcttctcctctcatgaaacccttgcttgtatttgtgaatcccaagagtggaggcaaccagggaaccaaagtcctgcagatgttcatgtggtacctgaatccacggcaagtctttgatctttctcaggaagggccaaaagatgcgcttgaattgtataggaaagtaccaaatctgcgaattctggcctgtggtggggatggaacggtgggctggatcctttccatcctggatgaactgcagctgagccctcagcctcctgtgggggtccttcctctggggactgggaatgacctggctcgaactctcaactggggagggggctacactgatgaacctgtttctaagatcctgtgtcaagtggaagatgggacagttgtacagctagatcgctggaacctccatgtggaaagaaaccccgacttgcctccagaagaacttgaagatggcgtatgtaagctccctctgaatgttttcaataactacttcagccttggatttgatgcccatgtcacactggagttccatgaatccagagaagcaaatccagagaaattcaacagtcgttttcgaaataaaatgttctatgcaggggcagctttttctgacttcctacagagaagttctagagatctatccaaacatgttaaagttgtttgtgatggaacagatctcaccccaaagattcaggaactgaagttccagtgtatagtatttttaaatatacccagatattgtgctggcacaatgccctggggaaacccaggtgatcaccatgatttcgaacctcagcgtcatgatgatggttatattgaagtcattggatttaccatggcctctttggcagccctgcaagttgggggccatggagagaggctacaccagtgtcgagaagtcatgcttctaacttacaaatccatccccatgcaagtggatggggagccctgtaggttggccccagctatgattcggatctccctgaggaatcaggccaacatggtacagaagagcaagaggagaacatccatgcctttactcaatgatccccagtctgtcccagatcgtctgaggatccgggtgaacaaaatcagtttacaagactatgaaggattccactatgacaaggagaaactccgagaagcttctatttcagactggttaagaaccattgctggggaactagtgcagtcatttggagcgatacctctgggtattctagttgtgcgtggagactgtgatttggagacttgccgtatgtacatagaccgcctacaggaggacctacagtcagtttcttctggctcccagagagttcattaccaggaccatgaaacctccttccccagggctctctcagcacagaggctctctcctcggtggtgcttcctagatgacagatctcaggaacatttgcactttgtgatggagatttcccaagatgagatttttattctggacccagatatggtggtgtcacagccggcggggacacctccgggcatgcctgacctggtggtggaacaagcctcggggatctcagactggtggaatcctgccctgcggaaacgcatgctgagtgacagtgggctggggatgatagctccctattatgaggactcagatctgaaagatctcagccactcccgcgtgctacagtcaccagtctcttcagaagatcatgcaattttgcaggcagtaatagctggtgatcttatgaagctaatagaaagctataaaaatggaggcagtctgctaattcagggaccagaccactgttcactccttcactacgcagctaaaaccggcaacggggagattgtgaaatatatccttgaccacggaccttccgagttattggatatggcagacagtgaaacgggtgagactgcactgcacaaggctgcctgccagcggaaccgggctgtgtgccagcttctggtggatgcaggagcatctctgagaaagacggactccaagggtaagacacctcaagaaagagcacagcaggctggggacccagacttggctgcttacctagaaagccgtcagaactataaggtcattggccatgaggacctggaaactgctgtttga

SEQ ID NO: 5995 - DNA, 1146 bp, Homo sapiens
  SIMILAR (170)..(54): 351254mologous to Homo sapiens Human ST-2 partial sequence,accession number W58701,Smith-Waterman Score=72.
atgacgccagatggaaacttggatcaacaggaaggagtgaatagcactggaaagggagacagctggctggccttcagcgacccccaacgccttgcggggctcctaccgcccccaccgccacagtcgcggccggccccaggaactctgtctactaaatcacttctcatccaggaactctatatgccgctcttgggcaattcccacaaagcactacaattcctcctacttccaaatgtttgtaaattttcctttttccagaatgccaagttccattcttcttctcctggtaaaattcagtcagtcacgtcacgcattgccaactgcatgccacaggctccctgttgtggactggccacccacagtggagtgatggatattcaccatttgctgccccagctgcctctccagccttccctgccctcttttctgctctgtgaggctgagctatttggactgcatcagtggctcccatgtcttctggcttccaatcagacttctccagatagacccaccagcagaagatctagaggtcaaggtgaagtgggcagtcgctgtatttatgtccctggcttgctctctgccagtgacagcctgcagcagctgccccctctgacactggatgatgcctgtcagccaagccagttggggaagaatgagcaccaggcagcagcttgtgaaaatgctggttcccatgcatctgtgtgtgtgggtgagaagatgaggcaatcagagcccgacatgcattactggggactttctggccatctgcgtattcagaacagaacaaaacacgctgttcgaagagcatcaagtgagttttcctgcggtactcgagaggcaattccaaccataatagagcatgagactgtcagtgactttcgtaacagactaagaaatccctggaactccatagaacttaatgcagagcgtagtgtcaagcacgaagctagactaggacaggagttattggcaaggagggaggcttttcaggcatccttaaatcacagcctgaagaggaaatccgagagtgataaaagcatctgcaagcagaataaaggaatctcagtcagtggatttcttctacaagtttcatggcagcggtactgcagtgttttaggttctttgttggtggctgataatgtgtaa

SEQ ID NO: 5996 - DNA, 1156 bp, Homo sapiens
  SIMILAR (58)..(324): 511254mologous to Homo sapiens diacylglycerol kinase iota,accession number AF061936,Smith-Waterman Score=188.
atgatgagagtgtattatgtatcaaggaaccgaaagagttggtttgatattcacgatgttccaaacaaccctgtagtctgcagcagcagggccttctttgaggagaatgccgtgaatggagaacacctgtggctggagaccaacgtctcgggagacctctgctaccttggagaggagaactgccaagtcagatttgcaaacagaacaaaacacgctgttcgaagagcatcaagtgagttttcctgcggtactcgagaggcaattccaaccataatagagcatgagactgtcagtgactttcgtaacagactaagaaatccctggaactccatagaacttaatgcagagcgtagtgtcaagcacgaagctagactaggacaggagttattggcaaggagggaggcttttcaggcatccttaaatcacagcctgaagaggaaatccgagagtgataaaagcatctgcaagcagaataaaggaatctcagtcagtggatttcttctacaagtttcatggcagcggtactgcagtgttttagtgcctgcaagggagcgagccacgctggaagccggctctcactctgctggggcagtgctcctcctgttgctgctcaaatgtgtgggtggggctggaagtgacatcccggtggtggtgtgcctccagaatcagtggattcggcaaagtccatttatttgtcatttaggggatgggaaaggctccaatatcataagccataacggactgcactttcccggtctgccccggcacccagagggccccgtgggcgaaaaaaaactgggtttaaggaaaaacaatttgactgctaggagaatgccaatttcagggctttccgagaaactgggggaacacaggctacagagaagagcattgttcctggaagcaacccccagcttcacgtccgtagttactgaccatcaaagggatattttgaaaggagttgatggctgccaaggtaaatgatgagctgaatgaatgcaacttaattgctgcagaatgccactggaagtcaccacgggggtgcctcctctacttggaatgcttgaaaaaaagatgtaaaattacccattcacccctggtcacagacagagaattggggaagatgaaataccttaaaaaactcttaaaagtcctttag

SEQ ID NO: 5997 - DNA, 1250 bp, Homo sapiens
  SIMILAR (3)..(1043): 1001254mologous to Homo sapiens 28-JAN-1994 Human TATA- binding protein associated factor hTAFII250 gene,accession number T42215_cd1,Smith-Waterman Score=1801.
ggccatttcatcacccagttaataagaaatttgttccagattattacaaagtgattgtcaatccaatggatttagagaccatacgtaagaacatctccaagcacaagtatcagagtcgggagagctttctggatgatgtaaaccttattctggccaacagtgttaagtataatggacctgagagtcagtatactaagactgcccaggagattgtgaacgtctgttaccagacattgactgagtatgatgaacatttgactcaacttgagaaggatatttgtactgctaaagaagcagctttggaggaagcagaattagaaagcctggacccaatgaccccagggccctacacgcctcagcctcctgatttgtatgataccaacacatccctcagtatgtctcgagatgcctctgtatttcaagatgagagcaatatgtctgtcttggatatccccagtgccactccagaaaagcaggtaacacaggaaggtgaagatggagatggtgatcttgcagatgaagaggaaggaactgtacaacagcctcaagccagtgtcctgtatgaggatttgcttatgtctgaaggagaagatgatgaggaagatgctgggagtgatgaagaaggagacaatcctttctctgctatccagctgagtgaaagtggaagtgactctgatgtgggatctggtggaataagacccaaacaaccccgcatgcttcaggagaacacaaggatggacatggaaaatgaagaaagcatgatgtcctatgagggagacggtggggaggcttcccatggtttggaggatagcaacatcagttatgggagctatgaggagcctgatcccaagtcgaacacccaagacacaagcttcagcagcatcggtgggtatgaggtatcagaggaggaagaagatgaggaggaggaagagcagcgctctgggccgagcgtactaagccaggtccacctgtcagaggacgaggaggacagtgaggatttccactccattgctggggacagtgacttggactctgatgaatgaggcttcctttgggcctccttggtcagtatctgatcctgaaatcatgaaattaactaacaccttagcctttttaaaagtagtaagtaaatgataataaatcacctctcctaatcttcctggggcaatgtcaccctttgatttaaaacaaagcaaccccctttcccctaccactacggaaaagagcaagctcatttttccgtgtcctcc

SEQ ID NO: 5998 - DNA, 403 bp, Homo sapiens
  SIMILAR (53)..(184): 971254mologous to Mesocricetus auratus CCG1,accession number D26114,Smith-Waterman Score=216.
ggaaaagttggctaatcatacaccttgggggagcggccaaactgtgatggatgccagtgtcctgtatgaggatttgcttatatctgaaggagaagatgatgaggaagatgctgggagtgacgaagaaggagacaatcctttctctgctatccagctgagtgaaagtggaagtgactctgatgttaccgttgccattgctaaggtgggaattaaagtaacaaagtcgaataaatggggttccagtggcgggtacacccagcagcccttacgtaagaagcggaagatcgtatcctccaggaagaggcggagtcgaggtgagggagtgaaatgcttaattcaggaatggattttggagtttctgggtgctgaagaaatagggcctttccgcctgcgggcccagtga

SEQ ID NO: 5999 - DNA, 5775 bp, Homo sapiens
  SIMILAR (1)..(5688): 921254mologous to Homo sapiens 28-JAN-1994 Human TATA-binding protein associated factor hTAFII250 gene,accession number T42215_cd1,Smith-Waterman Score=9038.
atgggacccggctgcgatttgctgctgcggacagcagctaccatcactgctgccgccatcatgtcagacacggacagcgacgaagattccgctggaggcggcccattttctttagcgggtttccttttcggcaacatcaatggagccgggcagctggagggggaaagcgtcttggatgatgaatgtaagaagcacttggcaggcttgggggctttggggctgggcagcctgatcactgaactcacggcaaatgaagaattgaccgggactgacggtgccttggtaaatgatgaagggtgggttaggagtacagaagatgctgtggactattcagacatcaatgaggtggcagaagatgaaagccgaagataccagcagacgatggggagcttgcagcccctttgccactcagattatgatgaagatgactatgatgctgattgtgaagacattgattgcaagttgatgcctcctccacctccacccccgggaccaatgaagaaggataaggaccaggattctattactggtgtgtctgaaaatggagaaggcatcatcttgccctccatcattgccccttcctctttggcctcagagaaagtggacttcagtagttcctctgactcagaatctgagatgggacctcaggaagcaacacaggcagaatctgaagatggaaagctgacccttccattggctgggattatgcagcatgatgccaccaagctgttgccaagtgtcacagaactttttccagaatttcgacctggaaaggtgttacgttttctacgtctttttggaccagggaagaatgtcccatctgtttggcggagtgctcggagaaagaggaagaagaagcaccgtgagctgatacaggaagagcagatccaggaggtggagtgctcagtagaatcagaagtcagccagaagtctttgtggaactacgactacgctccaccaccacctccagagcagtgtctctctgatgatgaaatcacgatgatggctcctgtggagtccaaattttcccaatcaactggagatatagataaagtgacagataccaaaccaagagtggctgagtggcgttatgggcctgcccgactgtggtatgatatgctgggtgtccctgaagatggcagtgggtttgactatggcttcaaactgagaaagacagaacatgaacctgtgataaaatctagaatgatagaggaatttaggaaacttgaggaaaacaatggcactgatcttctggctgatgaaaacttcctgatggtgacacagctgcattgggaggatgatatcatctgggatggggaggatgtcaaacacaaagggacaaaacctcagcgtgcaagcctggcaggctggcttccttctagcatgactaggaatgcgatggcttacaatgttcagcaaggttttgcagccactcttgatgatgacaaaccttggtactccatttttcccattgacaatgaggatctggtatatggacgctgggaggacaatatcatttgggatgctcaggccatgccccggctgttggaacctcctgttttgacacttgatcccaatgatgagaacctcattttggaaattcctgatgagaaggaagaggccacctctaactccccctccaaggagagtaagaaggaatcatctctgaagaagagtcgaattctcttagggaaaacaggagtcatcaaggaggaaccacagcagaacatgtctcagccagaagtgaaagatccatggaatctctccaatgatgagtattattatcccaagcaacagggtcttcgaggcacctttggagggaatattatccagcattcaattcctgctgtggaattacggcagcccttctttcccacccacatggggcccatcaaactccggcagttccatcgcccacctctgaaaaagtactcatttggtgcactttctcagccaggtccccactcagtccaacctttgctaaagcacatcaaaaaaaaggccaagatgagagaacaagagaggcaagcttcaggtggtggagagatgttttttatgcgcacacctcaggacctcacaggcaaagatggtgatcttattcttgcagaatatagtgaggaaaatggacccttaatgatgcaggttggcatggcaaccaagataaagaactattataaacggaaacctggaaaagatcctggagcaccagattgtaaatatggggaaactgtttactgccatacatctcctttcctgggttctctccatcctggccaattgctgcaagcatttgagaacaacctttttcgtgctccaatttatcttcataagatgccagaaactgatttcttgatcattcggacaagacagggttactatattcgggaattagtggatatttttgtggttggccagcagtgtcccttgtttgaagttcctgggcctaactccaaaagggccaatacgcatattcgagactttctacaggtttttatttaccgccttttctggaaaagtaaagatcggccacggaggatacgaatggaagatataaaaaaagcctttccttcccattcagaaagcagcatccggaagaggctaaagctctgcgctgacttcaaacgcacagggatggactcaaactggtgggtgcttaagtctgattttcgtttaccaacggaagaagagatcagagctatggtgtcaccagagcagtgctgtgcttattatagcatgatagctgcagagcaacgactgaaggatgctggctatggtgagaaatccttttttgctccagaagaagaaaatgaggaagatttccagatgaagattgatgatgaagttcgcactgccccttggaacaccacaagggccttcattgctgccatgaagggcaagtgtctgctagaggtgactggggtggcagatcccacggggtgtggtgaaggattctcctatgtgaagattccaaacaaaccaacacagcagaaggatgataaagaaccgcagccagtgaagaagacagtgacaggaacagatgcagaccttcgtcgcctttccctgaaaaatgccaagcaacttctacgtaaatttggtgtgcctgaggaagagattaaaaagttgtcccgctgggaagtgattgatgtggtgcgcacaatgtcaacagaacaggctcgttctggagaggggcccatgagtaaatttgcccgtggatcaaggttttctgtggctgagcatcaagagcgttacaaagaggaatgtcagcgcatctttgacctacagaacaaggttctgtcatcaactgaagtcttatcaactgacacagacagcagctcagctgaagatagtgactttgaagaaatgggaaagaacattgagaacatgttgcagaacaagaaaaccagctctcagctttcacgtgaacgggaggaacaggagcggaaggaactacagcgaatgctactggcagcaggctcagcagcatccggaaacaatcacagagatgatgacacagcttccgtgactagccttaactcttctgccactggacgctgtctcaagatttatcgcacgtttcgagatgaagaggggaaagagtatgttcgctgtgagacagtccgaaaaccagctgtcattgatgcctatgtgcgcatacggactacaaaagatgaggaattcattcgaaaatttgccctttttgatgaacaacatcgggaagagatgcgaaaagaacggcggaggattcaagagcaactgaggcggcttaagaggaaccaggaaaaggagaagcttaagggtcctcctgagaagaagcccaagaaaatgaaggagcgtcctgacctaaaactgaaatgtggggcatgtggtgccattggacacatgaggactaacaaattctgccccctctattatcaaacaaatgcgccaccttccaaccctgttgccatgacagaagaacaggaggaggagttggaaaagacagtcattcataatgataatgaagaacttatcaaggttgaagggaccaaaattgtcttggggaaacagctaattgagagtgcggatgaggttcgcagaaaatctctggttctcaagtttcctaaacagcagcttcctccaaagaagaaacggcgagttggaaccactgttcactgtgactatttgaatagacctcataagtccatccaccggcgccgcacagaccctatggtgacgctgtcgtccatcttggagtctatcatcaatgacatgagagatcttccaaatacataccctttccacactccagtcaatgcaaaggttgtaaaggactactacaaaatcatcactcggccaatggacctacaaacactccgcgaaaacgtgcgtaaacgcctctacccatctcgggaagagttcagagagcatctggagctaattgtgaaaaatagtgcaacctacaatgggccaaaacactcattgactcagatctctcaatccatgctggatctctgtgatgaaaaactcaaagagaaagaagacaaattagctcgcttagagaaagctatcaaccccttgctggatgatgatgaccaagtggcgttttctttcattctggacaacattgtcacccagaaaatgatggcagttccagattcttggccatttcatcacccagttaataagaaatttgttccagattattacaaagtgattgtcaatccaatggatttagagaccatacgtaagaacatctccaagcacaagtatcagagtcgggagagctttctggatgatgtaaaccttattctggccaacagtgttaagtataatggacctgagagtcagtatactaagactgcccaggagattgtgaacgtctgttaccagacattgactgagtatgatgaacatttgactcaacttgagaaggatatttgtactgctaaagaagcagctttggaggaagcagaattagaaagcctggacccaatgaccccagggccctacacgcctcagcctcctgatttgtatgataccaacacatccctcagtatgtctcgagatgcctctgtatttcaagatgagagcaatatgtctgtcttggatattcccagtgccactccagaaaagcagatgcgccagggccgaggtaggctgggcgaggaagactctgatgtagatattgaagggtatgatgatgaggaggaggatgggaaacctaagactccagccccagaaggtgaagatggagatggtgatcttgcagatgaagaggaaggaactgtacaacagcctcaagccagtgtcctgtatgaggatttgcttatgtctgaaggagaagatgatgaggaagatgctgggagtgatgaagaaggagacaatcctttctctgctatccagctgagtgaaagtggaagtgactctgatgtgggatctggtggaataagacccaaacaaccccgcatgcttcaggagaacacaaggatggacatggaaaatgaagaaagcatgatgtcctatgagggagacggtggggaggcttcccatggtttggaggatagcaacatcagttatgggagctatgaggagcctgatcccaagtcgaacacccaagacacaagcttcagcagcatcggtgggtatgaggtatcagaggaggaagaagatgaggaggaggaagagcagcgctctgggccgagcgtactaagccaggtccacctgtcagaggacgaggaggacagtgaggatttccactccattgctggggacagtgacttggactctgatgaatga

SEQ ID NO: 6000 - DNA, 5947 bp, Homo sapiens
  SIMILAR (70)..(5226): 971254mologous to Mesocricetus auratus CCG1,accession number D26114,Smith-Waterman Score=8819.
aagggagctcagtaagtcacttctgggcgactgttgttttatttccggtctatgggacccggctgcgatttgctgctgcggacagcagctaccatcactgctgccgccatcatgtcagacacggacagcgacgaagattccgctggaggcggcccattttctttagcgggtttccttttcggcaacatcaatggagccgggcagctggagggggaaagcgtcttggatgatgaatgtaagaagcacttggcaggcttgggggctttggggctgggcagcctgatcactgaactcacggcaaatgaagaattgaccgggactgacggtgccttggtaaatgatgaagggtgggttaggagtacagaagatgctgtggactattcagacatcaatgaggtggcagaagatgaaagccgaagataccagcagacgatggggagcttgcagcccctttgccactcagattatgatgaagatgactatgatgctgattgtgaagacattgattgcaagttgatgcctcctccacctccacccccgggaccaatgaagaaggataaggaccaggattctattactggtgagaaagtggacttcagtagttcctctgactcagaatctgagatgggacctcaggaagcaacacaggcagaatctgaagatggaaagctgacccttccattggctgggattatgcagcatgatgccaccaagctgttgccaagtgtcacagaactttttccagaatttcgacctggaaaggtgttacgttttctacgtctttttggaccagggaagaatgtcccatctgtttggcggagtgctcggagaaagaggaagaagaagcaccgtgagctgatacaggaagagcagatccaggaggtggagtgctcagtagaatcagaagtcagccagaagtctttgtggaactacgactacgctccaccaccacctccagagcagtgtctctctgatgatgaaatcacgatgatggctcctgtggagtccaaattttcccaatcaactggagatatagataaagtgacagataccaaaccaagagtggctgagtggcgttatgggcctgcccgactgtggtatgatatgctgggtgtccctgaagatggcagtgggtttgactatggcttcaaactgagaaagacagaacatgaacctgtgataaaatctagaatgatagaggaatttaggaaacttgaggaaaacaatggcactgatcttctggctgatgaaaacttcctgatggtgacacagctgcattgggaggatgatatcatctgggatggggaggatgtcaaacacaaagggacaaaacctcagcgtgcaagcctggcaggctggcttccttctagcatgactaggaatgcgatggcttacaatgttcagcaaggttttgcagccactcttgatgatgacaaaccttggtactccatttttcccattgacaatgaggatctggtatatggacgctgggaggacaatatcatttgggatgctcaggccatgccccggctgttggaacctcctgttttgacacttgatcccaatgatgagaacctcattttggaaattcctgatgagaaggaagaggccacctctaactccccctccaaggagagtaagaaggaatcatctctgaagaagagtcgaattctcttagggaaaacaggagtcatcaaggaggaaccacagcagaacatgtctcagccagaagtgaaagatccatggaatctctccaatgatgagtattattatcccaagcaacagggtcttcgaggcacctttggagggaatattatccagcattcaattcctgctgtggaattacggcagcccttctttcccacccacatggggcccatcaaactccggcagttccatcgcccacctctgaaaaagtactcatttggtgcactttctcagccaggtccccactcagtccaacctttgctaaagcacatcaaaaaaaaggccaagatgagagaacaagagaggcaagcttcaggtggtggagagatgttttttatgcgcacacctcaggacctcacaggcaaagatggtgatcttattcttgcagaatatagtgaggaaaatggacccttaatgatgcaggttggcatggcaaccaagataaagaactattataaacggaaacctggaaaagatcctggagcaccagattgtaaatatggggaaactgtttactgccatacatctcctttcctgggttctctccatcctggccaattgctgcaagcatttgagaacaacctttttcgtgctccaatttatcttcataagatgccagaaactgatttcttgatcattcggacaagacagggttactatattcgggaattagtggatatttttgtggttggccagcagtgtcccttgtttgaagttcctgggcctaactccaaaagggccaatacgcatattcgagactttctacaggtttttatttaccgccttttctggaaaagtaaagatcggccacggaggatacgaatggaagatataaaaaaagcctttccttcccattcagaaagcagcatccggaagaggctaaagctctgcgctgacttcaaacgcacagggatggactcaaactggtgggtgcttaagtctgattttcgtttaccaacggaagaagagatcagagctatggtgtcaccagagcagtgctgtgcttattatagcatgatagctgcagagcaacgactgaaggatgctggctatggtgagaaatccttttttgctccagaagaagaaaatgaggaagatttccagatgaagattgatgatgaagttcgcactgccccttggaacaccacaagggccttcattgctgccatgaagggcaagtgtctgctagaggtgactggggtggcagatcccacggggtgtggtgaaggattctcctatgtgaagattccaaacaaaccaacacagcagaaggatgataaagaaccgcagccagtgaagaagacagtgacaggaacagatgcagaccttcgtcgcctttccctgaaaaatgccaagcaacttctacgtaaatttggtgtgcctgaggaagagattaaaaagttgtcccgctgggaagtgattgatgtggtgcgcacaatgtcaacagaacaggctcgttctggagaggggcccatgagtaaatttgcccgtggatcaaggttttctgtggctgagcatcaagagcgttacaaagaggaatgtcagcgcatctttgacctacagaacaaggttctgtcatcaactgaagtcttatcaactgacacagacagcagctcagctgaagatagtgactttgaagaaatgggaaagaacattgagaacatgttgcagaacaagaaaaccagctctcagctttcacgtgaacgggaggaacaggagcggaaggaactacagcgaatgctactggcagcaggctcagcagcatccggaaacaatcacagagatgatgacacagcttccgtgactagccttaactcttctgccactggacgctgtctcaagatttatcgcacgtttcgagatgaagaggggaaagagtatgttcgctgtgagacagtccgaaaaccagctgtcattgatgcctatgtgcgcatacggactacaaaagatgaggaattcattcgaaaatttgccctttttgatgaacaacatcgggaagagatgcgaaaagaacggcggaggattcaagagcaactgaggcggcttaagaggaaccaggaaaaggagaagcttaagggtcctcctgagaagaagcccaagaaaatgaaggagcgtcctgacctaaaactgaaatgtggggcatgtggtgccattggacacatgaggactaacaaattctgccccctctattatcaaacaaatgcgccaccttccaaccctgttgccatgacagaagaacaggaggaggagttggaaaagacagtcattcataatgataatgaagaacttatcaaggttgaagggaccaaaattgtcttggggaaacagctaattgagagtgcggatgaggttcgcagaaaatctctggttctcaagtttcctaaacagcagcttcctccaaagaagaaacggcgagttggaaccactgttcactgtgactatttgaatagacctcataagtccatccaccggcgccgcacagaccctatggtgacgctgtcgtccatcttggagtctatcatcaatgacatgagagatcttccaaatacataccctttccacactccagtcaatgcaaaggttgtaaaggactactacaaaatcatcactcggccaatggacctacaaacactccgcgaaaacgtgcgtaaacgcctctacccatctcgggaagagttcagagagcatctggagctaattgtgaaaaatagtgcaacctacaatgggccaaaacactcattgactcagatctctcaatccatgctggatctctgtgatgaaaaactcaaagagaaagaagacaaattagctcgcttagagaaagctatcaaccccttgctggatgatgatgaccaagtggcgttttctttcattctggacaacattgtcacccagaaaatgatggcagttccagattcttggccatttcatcacccagttaataagaaatttgttccagattattacaaagtgattgtcaatccaatggatttagagaccatacgtaagaacatctccaagcacaagtatcagagtcgggagagctttctggatgatgtaaaccttattctggccaacagtgttaagtataatggacctgagagtcagtatactaagactgcccaggagattgtgaacgtctgttaccagacattgactgagtatgatgaacatttgactcaacttgagaaggatatttgtactgctaaagaagcagctttggaggaagcagaattagaaagcctggacccaatgaccccagggccctacacgcctcagcctcctgatttgtatgataccaacacatccctcagtatgtctcgagatgcctctgtatttcaagatgagagcaatatgtctgtcttggatattcccagtgccactccagaaaagcaggtaacacaggaaggtgaagatggagatggtgatcttgcagatgaagaggaaggaactgtacaacagcctcaagccagtgtcctgtatgaggatttgcttatgtctgaaggagaagatgatgagggaagatgctggggagtgatgaagaaggagacaatcctttcttctgctattcccagctgagtgaaagtgggaagtgactcttgatgttgggttcttggtggattaaggacccaaacaaccccgcatgcttcaggagaacacaaggatggacatggaaaatgaagaaagcatgatgtcctatgagggagacggtggggaggcttcccatggtttggaggatagcaacatcagttatgggagctatgaggagcctgatcccaagtcgaacacccaagacacaagcttcagcagcatcggtgggtatgaggtatcagaggaggaagaagatgaggaggaggaagagcagcgctctgggccgagcgtactaagccaggtccacctgtcagaggacgaggaggacagtgaggatttccactccattgctggggacagtgacttggactctgatgaatgaggcttcctttgggcctccttggtcagccttccctgttctccagcctaggtggttcacctttccccaatttgttcatatttgtacagtatctgatcctgaaatcatgaaattaactaacaccttagcctttttaaaagtagtaagtaaatgataataaatcacctctcctaatcttcctggggcaatgtcaccctttgatttaaaacaaagcaaccccctttcccctaccactacggaaaagagcaagctcatttttccgtgtcctcc

SEQ ID NO: 6001 - DNA, 357 bp, Homo sapiens
  SIMILAR (7)..(138): 971254mologous to Mesocricetus auratus CCG1,accession number D26114,Smith-Waterman Score=216.
atggatgccagtgtcctgtatgaggatttgcttatatctgaaggagaagatgatgaggaagatgctgggagtgacgaagaaggagacaatcctttctctgctatccagctgagtgaaagtggaagtgactctgatgttaccgttgccattgctaaggtgggaattaaagtaacaaagtcgaataaatggggttccagtggcgggtacacccagcagcccttacgtaagaagcggaagatcgtatcctccaggaagaggcggagtcgaggtgagggagtgaaatgcttaattcaggaatggattttggagtttctgggtgctgaagaaatagggcctttccgcctgcgggcccagtga

SEQ ID NO: 6002 - DNA, 669 bp, Homo sapiens
  SIMILAR (1)..(414): 921254mologous to Homo sapiens putative p150,accession number U93564,Smith-Waterman Score=669.
atgggcaaggacttcatttctaaaacaccaaaagcaatggcaacaaaagccaaaattgacaaatgggatctaattaaactaaagagcttctgcacagcaaaagaaactaccatcagagtgaacgggcaacctacagaatgggagaaaatttttgcagtctactcatctgacaaagggctaatatccagaatctacaaagaactcaaacaaactcacaagaaaaaaacaaacaaccccatcaaaaagtgggcgaaggatatgaacagacacttctcacaagaagacatttatgcatccaaaagacacatgaaaaaatgctcatcatcactggccatcagagaaatgcaaatcaaaaccacaatgagataccatctcacaccagtcagaatggcaatcattaaaaagtctggaaacagaaatattctgccgtgggtgaaagttcccgaagacctgaaagatccagaggtgttccaggtccagacgcggctgctggaagccatgttcgaatccctttactgtttcactacatgctgccttttggggctttcactcacgtcagccagcacctgtgtctcttggttggctgaacagcagtggcctgctttgcctgtgagcacagagagcttggaaatatttacaatgaaaagaaagcagcatgtaggagcataa

SEQ ID NO: 6003 - DNA, 456 bp, Homo sapiens
  SIMILAR (367)..(251): 351254mologous to Nicotiana tabacum Pistil extensin like protein, partial CDS only,accession number Z14014,Smith-Waterman Score=53.
atggactcagggtcctggcccgggccgggggcggggcctggccgggggcggggccaccaggcctggtttgcgctggagagtggtcttggttgtgagggtcataagatgggaactctcccggcacgtagacatatcccgccgtgggtgaaagttcccgaagacctgaaagatccagaggtgttccaggtccagacgcggctgctgaaagccattttcggcccggacggatctcgaatcccttacatcgagcaggtgagcaaggccatgctcgagctgaaggctctggagtcttcagacctcaccgaggtcgtggtttacggctcctatttgtacaagctccggaccaagtggatgctccagtccatggctgagtggcaccgccagcgccaggagcgagggatgctcaaacttgccgaagccatgaatgccctcgaactaggcccttggatgaagtga

SEQ ID NO: 6004 - DNA, 1098 bp, Homo sapiens
  SIMILAR (13)..(294): 881254mologous to Homo sapiens DEAD-box protein,accession number AJ278110,Smith-Waterman Score=453.
atggaaaatctaaaacgtgctgtgaaaacaaagaagagaaatgttgcagatttaccaccaattaagaaaaacttttataaagagtccactgccacaagtgccatgtcaaaagtagaagcagatagttggaggaaagaaaattttaatataacgtgggatgacttgaaggatggggagaaacgacctatccccaatcctacctgcacatttgatgacgcctttcaatgttatcctgaggttatggaaaacattaaaaaggcaggttttcaaaagccaacacctattcagccagagcacgagcaggcggttgcacggttcttcatggcctctggcactccgtttaagctgggtctagtctccaacatttcagcctcccagcacagcaccggtgttcatttctcggattcttacatccatgtggctcctaaccagaccggaagctcccggagcccgcctgtctacagagaccgacggccggcattctgggcccccattcccaaaggggtcttgggaaggcccagatccaagggcacccctggtgacgcccaaggtgctggcagcgagcaagagaggagaaagaggagagggctggaggagagggcgaagcggcccccgcgagcctgtgttccgcgtacccagtctctgggcctctcacctcgctcctggcgctgcggtgcactcagccatggactggagcatccacttggtccggagcttgtacaaataggagccgtaaaccacgcctcggtgaggtctgaagactccagaccttcagctcgagcatggccttgctcacctgctcgatgtaagggattcgagatccgtccgggcctgttggggaaaagagatgagatccccgggccggctgagactcccgagccgggcagcccgccagtactgggcacactcaccgaaaatgtttcagcagccgcgtctggacctggaacacctctggatctttcaggtcttcgggaactttcacccacggcgggatatgtctacgtgccgggagagttcccatcttatgaccctcacaaccaagaccactctccagcgcaaaccaggcctaatcacgccggcgaggctcaggggcgataa

SEQ ID NO: 6005 - DNA, 619 bp, Homo sapiens
  SIMILAR (240)..(617): 981254mologous to Homo sapiens GM-CSF receptor beta chain,accession number M59941,Smith-Waterman Score=672.
tttcgtgtgggaggctcactctgcctagaggcttcagattaagactggtctctcccaccacacagaggcctggaggaggcagaggccaggagggagaggtcccaagagcctgtgaaatgggtctggcctggctcccagctgggcaggaacacaggacttcaggacactaaggaccctgtcatgcccatggccagcacccaccagtgctggtgcctgcctgtccagagctgaccagggagatggtgctggcccaggggctgctctccatggccctgctggccctgtgctgggagcgcagcctggcaggggcagaagaaaccatcccgctgcagaccctgcgctgctacaacgactacaccagccacatcacctgcaggtgggcagacacccaggatgcccagcggctcgtcaacgtgaccctcattcgccgggtgaatgaggacctcctggagccagtgtcctgtgacctcagtgatgacatgccctggacagcctgcccccatccccgctgcgtgcccaggagatgtgtcattccctgccagagttttgtcgtcactgacggtgactacttctcattccaaccagacaggcctctgggcacccggctcaccgtcactct

SEQ ID NO: 6006 - DNA, 624 bp, Homo sapiens
  SIMILAR (1)..(207): 841254mologous to Homo sapiens bK833B7.2 (colony stimulating factor 2 receptor, beta, low-affinity (granulocyte- macrophage)),accession number AL008637,Smith-Waterman Score=291.
atggtgctggcctgggagctgctcctcatggccctgctggccctgtgctggggacttagcctggcaggggcagaagaaaccgtcctgctgcagaccctgcgctgctacagtgactataccagccacatcacctgcgggtgggcagacacccaggatgcccagcggctcgtcaacgtgaccctcattcgccgggtgaatgagtctgtgacgttgggtgcaggggccacggtctgttcacaaccgaggaccctcaggaatcctttcaaagcattcatcaaaatctgcaacgcctttgctcatgactgtttcccactcactagcagtgagatccaatcccgatccaagacccggagcttcttcagtgagcggagatgtgtcattccctaccagagttttgtcatcagtgacattgactacttctcattccagccagacgggcctctgggcacctggctcactgtcactctgacccagcatgacccagagagttgctacctgcgtcactgggtagatgaagttacccctgctcaggacacccagcatgacccatggcccaaatcaccgcatttcaatgctttgggcacactgaccctgcacccgggctgcccagcttctattgattga

SEQ ID NO: 6007 - DNA, 222 bp, Homo sapiens
  SIMILAR (22)..(216): 1001254mologous to Homo sapiens Npw38-binding protein NpwBP,accession number AB029309,Smith-Waterman Score=356.
atgttcccttcccacttttcagcccagcgaggtcatgatgatgatgtttctagcaccagtgaagatgatggctatcctgaggacatggatcaagataagcatgatgacagtactgatgacagtgacaccgacaaatcagatggagaaagtgacggggatgaatttgtgcaccgtgataatggtgagagagacaacaatgaagaaaagaagtcaggttcctga

SEQ ID NO: 6008 - DNA, 956 bp, Homo sapiens
  SIMILAR (1)..(129): 831254mologous to Escherichia coli (p)ppGpp 3'- pyrophosphohydrolase,accession number L10328,Smith-Waterman Score= 194.
atgcacagcctgtacaagccgcgtccgggccgcgtgaaagactatatcgccattccaaaagcgaacggctatcagtctttgcacacctcgatgatcggcccgcacgcctgcgctgctgctctgatgatccccagcgtgagcccaccgccagccagccctctccccacgctgaacagtgaagattcatcaaatgagaaactaaggttcggagagattgataaactttcccgaggttacacagtcattaggttgaggagctgccatttacatctgcagacagctaaggaagtgaacagcagcggccttgttgctggaggcatcgtggcagtgtcatcatcagccattgtccccagtaacccagaagtcactgtggccttgccggttacaacactacacaacactgtgactagctcagtctctactctcaaggcagaattgccacctacaggaaccagcaacgcaacccgtgtggaaaatgttcattcccctctgcccatttcaccatctccctccgaacagtccagtctcagtactgatgacacaaacatggcagacactttcaccgagattatgaccatgatgtcgccttcacagttcttgagttcatctcctttgagaatgacaaataatgaagacagtctgagtcccaccagcagcactctgtcaaacctggaactggatgcagccgaaaaggatcgcaagcttcaggagaaagagaagcaaatcgaagagctgcagaggaaactggaacaagagcagaagctcgtggaagtgctgaaaatgcaacttgaggttgaaaaacgagggcagcagcagcgggcccctggaagcccagcccagtgccccaggtcattctgtcaagtcagatcagaagcacggcagccttggctcctccatcaaagatgaggcctcactccctgactgctccagctccaggcagcccatcccagtagcca

SEQ ID NO: 6009 - DNA, 858 bp, Homo sapiens
  SIMILAR (172)..(855): 931254mologous to Homo sapiens putative p150,accession number U93564,Smith-Waterman Score=1083.
atgtccaaccggcctaataacaatccaggggggtcactgcgacgttcacagaggaacactgccggggcccaaccacaagacgactcaataggaggaagatgtgaagcggtaaacaatattgggccacagattgggagtagagtgggggaaggaagacaggaagacagcagtgagcacataaacagaaccaaagacaaaaaccacatgtttatctcaatagatgcagaaaaggcctctgatgaaattcaacagcccttcatgctaaaaactctcaataaattaggtattgatgggacatatctcaaaataataacagctatttatgacaaacccacagccaatatcatactgaatgggcaaaaactggaagcattccctttggaaactggcacaagacagggatgccctctctcaccactcctattcaacatggtgttggaagttctggccagggcaatcaggcaggggaaagaaataaagtgtattcaattagggaaagaggaagtcaaattgtccctgtttgcagacgacatgattgtatatctagaaaaccccattgtctcagcccaaaatctccttaagctgataagcaacttcagcaaagtctcaggatacaaaatcaatgtgcaaaaatcacaagcattcttatacactaataacagacaaacagagagccaaaccatgggtgaacgcccattcacaattgcttcaaagagaataaaatacctaggaatccaacttacaagggatgtgaaggacctcttcaaggagaactacaaaccactgctcaatgaaataaaagaggataccaacaaatggaagaacattccatgctcatgggtaggaagaatatcgtga

SEQ ID NO: 6010 - DNA, 477 bp, Homo sapiens
  SIMILAR (132)..(1): 791254mologous to Homo sapiens Human secreted protein, SEQ ID NO: 4623,accession number G00542,Smith-Waterman Score=165.
atggatcaaggacacaaatctaaaacctgcgactataaaaattctaaaagacgacatcggaaatacccttctagacaatggcttaggcaaagacttcatgaccaagaacccaaaagcaaatgcaacaaaaacaaaagtcgccaaggaaaacaatgcagtgaaacactgggtggaacacacattactcacatacagaagagacagagcaagatcagcttccctagtggacttcagtctcccatgaccagagggtccctcttggcagctgacacagggcagcccggcgttaagcggaacttctctctccagctgtgtctcttagcaactaagcccccggctcctccagaagcccctcttcgcacatgcgcaaactgcggacgggaaactgggctccctagccctggcgtttttggtgttgctgtcccagccagaatcgcgtctggccggtgggaagccgggaactccagccccctgtag

SEQ ID NO: 6011 - DNA, 1662 bp, Homo sapiens
  SIMILAR (632)..(817): 911254mologous to Homo sapiens HERC2,accession number AF071172,Smith-Waterman Score=285.
cccttactgattgtttaaaggatgttgatttgatcccaccttttaatcggatgctgctggaagtcacctttggcaagctgtatgcttggactgttcagaacattctaaatgttctgatggatgccagtgccaaatttaaagagcttggtatccagccggttcccctgcagaccatcaccagtgagaacccattgggaccgagcctggggagcatcccgcaagcccgcttcctcctgatgatgctcagcatgctcaccctgcagcacagcgcaaacaacctcgacctcctgctcaattccggcacgctggccctcactcagacggcactgcgcctgattgttcttccagatgtagagttattgatttgagatcatcttctgtgaatgcagacttctatagtataattgcccgtcttagccctgcttttggcgcagcacagaagttttggccccagttgtgacaatgttgaggaagatatgaatgcttctgctcaaggtgcttctgccacagttttggaagcaacaaggaaggaaacggctcctgtgcatctccctgtttcagggccagaactggctgccacgatgaagattggaacgagggtcatgagaggtgtggactggaaatggggcgatcagaagctgaacaaactgaaaggaacattcaccccactacaatgatgtttaccagcactattaacttactgcagactctttgtctgcctgccagagttcatgctgagatcatgcagagcgaagccaccaagactttatgcggactgctgcaaatattagtggaaagcggaacgacggacaagacacgcatggaatgagagattgagggcccagggagtcagcgctgggggccgcacgcttgtcgtgtccgggtgtgcatgtggggtgggtgtggatgtgtgtggattcatttcctgtggctgctgtaacaaagtactacaaacttggggcttacgcagtagaaattctcatgattctggtggttggaagactgagatcaagggtggttccttctggggctgtgagggagaagctgcttcagggctctgccccagcttctggagtttgctggcctctttagcgttcctcggcttgtagaggggtcaccctgatctctgccatcatcttcacatggcattctccctgtgtgtgagtcacctccaaatctccccttttcataaggacatcattcaacctcatcaaactgattacatctgcagcggccctatttccaaacaaggtcacctgccgaggtatggtaggggttagggcttcaacatacaaattttgcaattctgaattcgaattcaacccataacactggcttcaaacaacaaatttgttctctcagagttctggagaccagaagtcccaaatcaggtgcgggcagggcatgctccctccacaggctctaggggaaggtccttccttaccttatccagcttctgggagctccaggcttccctggtgtggggacgcattgtgccagtctcagaggcctgcatcttcacatggcccctgcccctgtgttctgcatgtctttttctgtctctgaaaggactctttcattgagcttctttgactctaatccaacatgatgtcacctaaattcttaccttaaggacgtctacagggacccccgcccgaattc

SEQ ID NO: 6012 - DNA, 6306 bp, Homo sapiens
  SIMILAR (193)..(2931): 891254mologous to Mus musculus rjs,accession number AF061529,Smith-Waterman Score=4324.
  misc_feature (1)...(6306): n = a,t,c or g
gcgggatcgcgggcgccggctgagccagcggctcttgggaggctgcgtccgcgcgccggcggggcgaggcggccgggccctgcgcgtcaggcctgagacctgggaggaagctggagaaaagatgccctctgaatctttgtgtttggctgcccaggctcgcctcgactccaaatggttgaaaacagatatacagagtcattttttacaggtcagaactgtagaaataatgagaaagtgacacttgtacgcatagctgatttggagaaccataataacgatggaggcttctggactgtgattgacgggaaagtgtatgatataaaggacttccagacacagtcgttaacagaaaatagtattcttgctcagtttgcaggggaagacccagtggtagctttggaagctgctttgcagtttgaagacacccgggaatccatgcacgcattttgtgttggccagtatttggagcctgaccaagaaggcgtcaccataccagatctggggagtctctcctcacctctgatagacacagagaggaatctgggcctgcttctcggattacacgcttcctatttagcaatgagcacaccgctgtctcctgtcgagattgaatgtgccaaatgggttcagtcatccatcttctctggagggctgcagaccagccagatccactacaggtacaacgaggagaaagacgaggaccactgcagctccccaggggggacacctgccagcaaatctcgactctgctcccacagacgggccctgggggaccattcccaggcatttctgcaagccattgcagacaacaacattcaggatcacaacgtgaaggactttttgtgtcaaatagaaaggtactgtaggcagtgccatttgaccacaccgatcatgtttccccccgagcatcccgtggaagaggtcggtcgcttgctgttatgttgcctcttaaaacaggaagatttaggtcatgtggcattatctttagttcatgcaggtgcacttgatattgagcaagtaaagcacagaacgttgcctaagtcagtggtggatgtttgtagagttgtctaccaagcaaaatgttcgctcattaagactcatcaagaacagggccgttcttacaaggaggtctgcgctcctgtcatcaaacgtttgagattcctcttgaatgaattgagacctgctgtttgtaatgacctctctataatgtctaagtttaaattgttaagttctttgccccattggaggaggatagctcagaagataattcgagaaccaaggaaaaagagagttcctaagaagccagaatctacggatgatgaagaaaaaattggaaacgaagagagtgatttagaagaagcttgcattttgcctcatagtccaataaatgtggacaagagacccattgcaattaaatcacccaaggacaaatggcagccgctgttgagtactgttacaggtgttcacaaatacaagtggttgaagcagaatgtgcagggtctttatccgcagtctccactcctcagtacaattgctgaatttgcccttaaagaagagccagtggatgtggaaaagagaaagtgcctactaaaacagttggagagagcagaggttcgcctggaagggatagatacaattttaaaattgtatctggtgagcaagaatttcttacttccatctgtgccgtatgcgatgttttgtggatggcaaagacttattcctgagggaatcgatataggggaacctcttactgattgtttaaaggatgttgatttgatcccgccttttaatcggatgctgctggaagtcacctttggcaagctgtacgcttgggctgttcagaacattcgaaatgttttggtggatgccagtgccaaatttaaagagcttggtatccagccggttcccctgcaaaccatcaccaatgagaacccatcgggaccgagcttggggaccatcccgcaagcccacttcctcctggtgatgctcagcatgctcaccctgcagcacagcgcaaacaaccttgacctcctgctcaattccggcacgctggccctcgctcagacggcactgcgcctgattggccccagttgtgacagcgttgaggaagatatgaatgcttctgctcaaggtgcttctgccacagttttggaagaaacaaggaaggaaacggctcctgtgcagctccctgtttcagggccagaactggctgccatgatgaagattggaacaagggtcatgagaggtgtggactggaaatggggcgatcaggataggcctcctccaggcctaggccgagtgattggtgagctgggagaggacgggtggataagagtccagtgggacacaggcagcaccaactcctacaggatggggaaagaaggaaattacgacctcaagctggcagagctgccagcccctgcacagccctcagcagaggattcggacacagaggacgactctgaagccgaacaaactgaaaggaacattcaccccactgcaatgatgtttaccagcactattaacttactgcagactctttgtctgtctgctggagttcatgctcacatcatgcagagtgaagccaccaagactttatgcggactgctgcaaatgctggtgtacagggagcaacaccggagctggtgcacgctggggtttgtgcagagactcgctctcacgctgcaggtgtgcggcaccctcagctccctgcagtggatcacgctgctcatggaggtcgtggatgggcacgcacccttcactgccacctcgctgcagaggcagatcttagctgtgcatttgttgcaagcagtccttccgtcatgggacaagaccgaaagggcgagggacatgaaatgcctcatggagaagctgtttgacttcttggggagcttgctcactatgtgctcctctgacgtgccgttactcagaggtgggtggccgtctcccttccctgtaccctggtgaagagcggtgcagtgccgtcactcagaggtgggtggccgtctcccttccctgtgtcctggtgaagagccgtgtagtgccatcactcagaggtgggtggccgtctcccttccctgtaccctggtgaagagcggtgcagtgccgtcactcagaggtgggtggccgtctcccttccctgtgtcctggtgaagagccgtgtagtggccccactcagaggtgggtggccgtctcccttccctgtgtcctggtgaagagcggcgcagtgtcgtcactcagagatgagtgaccatctcccttccctgtgaccctggtgaagagtggtgcagcagcttctcccctggtttcctcctcagagtccacgctgaggcggcgcagggtgtgcccgcaggcctcgctgactgccacccacagcagcacactggcggaggaggtggtggcactgctgcacacgctgcactccctgactcagtggaatgggctcatcaacaagtacatcaactccccatgccgctccatcacccacagctttgcgggaaggccttccaaaggggcccagttagaggactacttccctgattccgagaaccctgaagtggggggcctcatggcggtcctggctgtggttggaggcatcgatggtcgcctgtgcctgggcggccaagttgtgcacgatgactttggagaagtcaccatgactcgcatcaccctgaagggcaaaatcaccgtgcagttctctgacatgcggacgtgtcacgtttgcccattgaatcagctgaaaccactccctgccgtggcctttaatgtgaacaacctgcccttcacagagcccatgctgtctgtctgggctcagttggtgaacctcgctggaagcaagttagaaaagcacaaaataaagaaatcgactaaacaggcctttgcaggacaagtggacctggacctgctgcggtggcagcagttggagctatncatcctgaaagcaggtcggggggtggtcttcccaccaggataaactgcgncagatcctgtctcagccagctgttcaggagactggaactgttcacacagatgatggagcagtggtatcacctgaccttggggacatgtctcctgaagggccgcagccccccatgatcctcttgcagcagctgctggcctcggccacccagccgtctcctgtgaaggccatatttgataaacaggaacttgagactgctgcactggccgttgtggagtccactcacccttcgagcccaggatttgaagactgcagctccagtgaggccaccacgcctgtcaacgtgcagcacatccgccctgccagagtgaagaggcgcaagcagtcgcccgttcccgctctgccgatcgtggtgcagctcatggagatgggatttcccagaaggaacatcgagtttgccctgaagtctctcactggtgcttccgggaatgcgtccggcttgcctggtgtggaagccttggtcgggtggctgctggaccactccgacatacaggtcacggagctctcagatgcagacacggtgtccgacgagtattctgacgaggaggtggtggaggacatggatgatgccgcctactccatgtctactggtgctgttgtgacggagagccagacgtacaaaaaccgagctggtttcttgggtaatgatgattatgctgtatatgtgagagagaatattcaggtgggaatgatggttagatgctgccgaacatacgaagaagtgtgcgaaggtgatgtgatgttggcaaagtcatcaagctggacagagatggattgcatgatctcaatgtgcagtgtgactggcagcagaaagggggcatctactggtttaggtacattcatgtggaacttataggctatcctccaccaagaagttcttctcacatcaagattggtgataaagtgcgggtcaaagcctctgtcactacaccaaaatacaaatggggatctgtgactcatcagagtgtgggggttgtgaaaggtgtgatggatgtcagatgtttcctatcaatggatccagattcaaatgcagaaactgtgatgactttgatttttgtgaaacgtgtttcaagaccaaaaaacacaataccaggcatacatttggcagaataaatgaaccaggcttcagcagaagaaacacttcctataaatctcgcccaaacaggaaagcaaacctgaaaatacactatcctccagctatcagaattatattgagatctactcacatttatgatgatgttcagagattctcattgggaaggaaaaggcacacgctgcggcggtcttgcatgactctgttgttgtggaaattcaatttgttcattgtgttttgggctctctgggtggtcagggctgggctctgggtccttggcaattcctcaggttcccagcactccaaagccaagctcacctcctcatcacacaccctgcaggagaagcattagggtgtccgactacgtgggtttcatagctgtggaaaagccaaaggggagactcctgaagaaaggcggtgaagactgtgaagagcgggtcaggaagatgagcacagcactgctactcctgtgggcacagggacagcatgtctccagccagcgccaccttgtttaatacatgggaactcactgaaattcattctgtattttgcccgcaaagttttaaagatttcatccacagtcaggaattaaacttataccaatgagagcctcacacattcaaggatgtactaagcactacaggcctcacagaaacagagatcccatcttggagttttcagtaccacatgggagataaagggttttgaacatgaaatgacaaaaacaacagcaagaagaaaattcttgtcctttttcattactantagactcaaataaatgtcttggctcttacattacattcattcttcaaccattgtggtctggcttccacttccttcacttcaccaacatggctctgccaaaggaagcccgtggatctctaggccatcactttaattggatctctctacaacatttatcctggttggttaagccctcccttacaacattcttctctctttgttttaatagctccatctctcctgcttctttaacttgataatgcatacttgatttttctatttgttatttcataaaccaattaatacacagataaaatggctgtatatcaaaccatgtttgtatagaaaaaatggattttggatgcctctcatatgtaattagttctattaaacatattaattgtattgtttaatttgtcaggtttttgacagaattttgtttacaagtaataaaaattttatctccaattttccaaaaaaaaaaaaaaaa

SEQ ID NO: 6013 - DNA, 2610 bp, Homo sapiens; identical to SEQ ID NO: 4352
  SIMILAR (1303)..(1854): 891254mologous to Mus musculus Herc2,accession number AF071173,Smith-Waterman Score=870.

SEQ ID NO: 6014 - DNA, 7297 bp, Homo sapiens
  SIMILAR (1630)..(3426): 951254mologous to Mus musculus rjs,accession number AF061529,Smith-Waterman Score=2962.
atggttaaagatggagaaattgtatacactggaacagaatcaacccagaacggagagctccctcctagaaaagatgatagtgtcgaaccaagtggaacaaagaaagaagatctgaatgacaaagagaaaaaagatgaagaagaaactcctgcacctatatatagggccaagtcaattctggacagctgggtatggggcaagcaaccagatgtgaatgaactgaaggagtgtctttctgtgctggttaaagagcagcaggccctggccgtccagtcagccaccaccaccctctcagccctgcgactcaagcagaggctggtgatcttggagcgctatttcattgccttgaatagaaccgtttttcaggagaatgtcaaagttaagtggaaaagcagcggtatttctctgcctcctgtggacaaaaaaagttcccggcctgcgggcaaaggtgtggaggggctcgccagagtgggatcccgagcggcgctgtcttttgcctttgccttcctgcgcagggcctggcgatcaggcgaggatgcggacctctgcagtgagctgttgcaggagtccctggacgccctgcgagcacttcccgaggcctcgctctttgacgagagcaccgtgtcctctgtgtggctggaggtggtggagagagcgaccaggttcctcaggtccgtcgtgacgggggatgttcacggaacgccagccaccaaagggccaggaagcatccccctgcaggaccagcacttggccctggccatcctgctggagctggctgtgcagagaggcacgctgagccaaatgttgtctgccatcctgttgttgcttcagctgtgggacagcggggcacaggagactgacaatgagcgttccgcccagggcaccagcgccccacttttgcccttgctgcaaaggttccagagcatcatttgcaggaaggatgcaccccactccgagggcgacatgcaccttttgtctggccctctgagccccaatgagagtttcctgaggtacctcacccttccacaagacaacgagcttgccattgatctgcgacaaacggcggttgttgtcatggcccatttagaccgtctggctacgccctgtatgcctccgctgtgtagctctccgacatctcataagggatcattgcaagaggtcataggttgggggttaataggatggaaatactatgccaatgtgattggtccaatccagtgcgaaggcctggccaacctgggagtcacacagattgcctgtgcagagaagcgtttcctgattctgtcacgcaatggccgcgtgtacacacaggcctataatagtgacacgctggccccacagctggtccaaggccttgcctccagaaacattgtaaaaattgctgcccattctgatggtcaccactacctagccttggctgctactggagaggtgtactcctggggctgtggggacggcggacggctgggccatggggacactgtgtatgtatcgcttattcctggtggagttgagggcatcattgccgacagcatccgctgggaagatcccaaactgggagaaaagcagagtaatgcgtatcgtgtggtacatgtatgccaagctcagaacagcccaaccctgacagtgttgcctttggaggagcctaaggtgatctccgccttctctggaaagcaggccgggaagcacgtggtgcacatcgcttgcgggagcacttacagtgcggccatcactgccgagggggagctgtacacctggggccgcgggaactacggccggctgggccatggctccagtgaggacgaggccattccgatgctggtagccgggcttaaaggactgaaggtcatcgatgtggcgtgtgggagtggggatgctcaaaccctggctgtcactgagaacgggcaagtgtggtcttggggagatggtgactatgggaaattgggcagaggtggtagtgatggctgcaaaaccccaaagctgattgaaaagcttcaagacttggatgtggtcaaagtccgctgtggaagtcagttttccattgctttgacgaaagatggccaagtttattcatggggaaaaggtgacaaccagagacttggacatggaacagaggaacatgttcgttatccaaaactcttagaaggcttgcaagggaagaaggtgattgatgtggctgcaggctccacccactgcctggctctgactgaggacagcgaggtccacagctgggggagcaacgaccagtgccagcactttgacaccttgcgcgtgaccaagccagaacctgcagcattgccaggactggacaccaaacacatagtgggaattgcctgtgggcctgcccagagctttgcttggtcatcatgttctgagtggtccattggcctccgtgtcccttttgtggtggacatctgctcaatgacttttgagcagctggatctcctgcttcggcaggtgagtgaggggatggatggctccgcggactggcccccgccccaggagaaagagtgtgtggccgtggcaacgctgaatcttctacgacttcagttgcatgctgccattagtcaccaggttgacccggaattccttggtttaggtctgggcagcatcctcctgaacagcctgaagcagacggtggtgaccctggccagcagtgcgggcgtgctgagcaccgtgcagtcggccgcccaggccgtgctgcagagtggctggtccgtgctgctgcccaccgcggaggagcgggcccgggcactctctgctctcctgccctgcgcagtttcaggcaatgaagtgaacataagtccaggtcgtcgattcatgattgatcttctggtgggcagcttgatggctgatggagggttggagtcagccttacacgcagccattactgcagagatccaggatattgaagccaaaaaagaagcacagaaggaaaaagaaattgatgaacaggaagcgaatgcctcaacatttcatagaagcaggactccactggataaagaccttattaatacggggatctgtgagtcttctggcaaacagtgtttgcctctggttcagctcatacaacagcttcttagaaacattgcttctcagactgtagccagattgaaagatgttgcccgtcggatttcatcatgtctggactttgagcaacacagtcgtgaaagatctgcttcattggatttgttactgcgttttcaacgtttgcttattagtaaactttatccaggagaaagtattggtcagacctcagatatttctagtccagagctaatgggtgttggttccttgctgaagaagtacacagccctcctgtgcacgcacattggagatatactgcctgtggccgccagcattgcttctaccagctggcggcacttcgcggaggtggcttacattgtggaaggggactttactggtcagaactgtagaaataatgaggaagtgacacttatacgcaaagctgatttggagaaccataataaagatggaggcttctggactgtgattgacgggaaggtgtatgatataaaggacttccagacacagtcgttaacaggaaatagtattcttgctcagtttgcaggggaagacccagtggtagctttggaagctgctttgcagtttgaagacacccgggaatccatgcacgcgttttgtgttggccagtatttggagcctgaccaagaaatcgtcaccataccagatctggggagtctctcttcacctctgatagacacagagaggaatctgggcctgcttctcggattacacgcttcgtatttggcaatgagcacaccgctgtctcctgtcgagattgaatgtgccaaatggcttcagtcatccatcttctctggaggcctgcagaccagccagatccactacagctacaacgaggagaaagacgaggaccactgcagctccccagggggcacacctgccagcaaatctcgactctgctcccacagacgggccctgggggaccattcccaggcatttctgcaagccattgcagacaacaacattcaggatcacaacgtgaagactcatcaagaacagggccgttcttacaaggaggtctgcgctcctgtcatcgaacgtttgagattcctctttaatgaattgagacctgctgtttgtaatgacctctctataatgtctaagtttaaattgttaagttctttgccccgttggaggaggatagctcaaaagataattcgagaacgaaggaaaaagagagttcctaagaagccagaatctacggatgatgaagaaaaaattggaaacgaagagagtgatttagaagaagcttgcattttgcctcatagtccaataaatgtggacaagagacccattgcaattaaatcacccaaggacaaatggcagccgctgttgagtactgttacaggtgttcacaaatacaagtggttgaagcagaatgtgcagggtctttatccgcagtctccactcctcagtacaattgctgaatttgcccttaaagaagagccagtggatgtggaaaaaatgagaaagtgcctactaaaacaggatgttgatttgatcccgccttttaatcggatgctgctggaagtcacctttggcaagctgtacgcttgggctgtacagaacattcgaaatgttttgatggatgccagtgccaaatttaaagagcttggtatccagccggttcccctgcaaaccatcaccaatgagaacccgtcaggaccgagcctggggaccatcccgcaagcccgcttcctcctggtgatgctcagcatgctcaccctgcagcacggcgcaaacaacctcgaccttctgctcaattccggcatgctggccctcacgcagacggcactgcgcctgattggccccagttgtgacaacgttgaggaagatatgaatgcttctgctcaaggtgcttctgccacagttttggaagaaacaaggaaggaaacggctcctgtgcagctccctgtttcagggccagaactggctgccatgatgaagattggaacaagggtcatgagaggtgtggactggaaatggggcgatcaggatgggcctcctccaggcctaggccgcgtgattggtgagctgggagaggacggatggataagagtccagtgggacacaggcagcaccaactcctacaggatggggaaagaaggaaaatacgacctcaagctggcagagctgccggctgctgcacagccctcagcagaggattcggacacagaggatgactctgcttctccaaacaggctggtgtacagggagcaacaccggagctggtgcacgctggggtttgtgcggagcatcgctctcacgccgcaggtatgcggcgccctcagctccccgcagtggatcacgctgctcatgaaggtcgtggaagggcacgcacccttcactgccacctcgctgcagaggcagatcttagctgtgcatttgttgcaagcagtccttccatcatgggacaagaccgaaagggcgagggacatgaaatgcctcgtggagaagctgtttgacttcttgggaagcttgctcactacctgctcctctgacgtgccattactcagagagtccacgctgaggcggcgcagggtgcgcccgcaggcctcgctgactgccacccacagcagcacactggcggaggaggtggtggcactgctgcgcacgctgcactccctgactcagtggaatgggctcatcaacaagtacatcaactcccagctccgctccatcacccacagctttgtgggaaggccttccgaaggggcccagttagaggactacttccccgactccgagaaccctgaagtggggggcctcatggcagtcctggctgtgattggaggcatcgatggtcgcctgcgcctgggcggtcaagttatgcacgatgagtttggagaaggcactgtgactcgcatcaccccaaagggcaaaatcaccgtgcagttctctgacatgcggacgtgtcgcgtttgcccattgaatcagctgaaaccactccctgccgtggcctttaatgtgaacaacctgcccttcacagagcccatgctgtctgtctgggctcagttggtgaacctcgctggaagcaagttagaaaagcacaaaataaagaaatcgactaaacaggcctttgcaggacaagtggacctggacctgctgcggtgccagcagttgaagctatacatcctgaaagcaggtcgggcgctgctctcccaccaggataaactgcggcagatcctgtctcagccagctgttcaggagactggaactgttcacacagggccgcagccccccatgatcctcttgcagcagctgctggcctcggccacccagccgtctcctgtgaaggccatatttgataaacaggaacttgaggctgctgcactggccgtttgccagtgcttggctgtggagtccactcacccttcgagcccaggatttgaagactgcagctccagtgaggccaccacgcctgtcgccgtgcagcacatccgccctgccagagtgaagaggcgcaagcagtcgcccgttcccgctctgccgatcgtggtgcagctcatggagatgggattttccagaaggaacatcgagtttgccctgaagtctctcactggtgcttccgggaatgcatccagcttgcctggtgtggaagccttggtcgggtggctgctggaccactccgacatacaggtcacggagctctcagatgcagacacggtgtccgacgagtattctgacgaggaggtggtggaggacgtggatgatgccgcctactccatgtctactggtgctgttgtgacggagagccagacgtacaaaaaacgagctgatttcttgagtaatgatgattatgctgtatatgtgagagagaatattcagcaaatatttgagtatgtcctatatgccaaacatcagtggacagaggcccctgccctcagggagcctgccttctggtgctggaagacatacctgaccagtgagctcatggtgggaatgatggttagatgctgccgagcgtatgaagaagtgtgcgaaggtgatgttggcaaagtcatcaagctggacagagatggattgcatgatctcaatgtgcagtgtgactggcagcagaaagggggcacctactgggttaggtacattcatgtggaacttataggctatcctccaccaagttcttcttctcacatcaagattggtgataaagtgcgggtcaaagcctctgtcaccacaccaaaatacaaatggggatctgtgactcatcagagtgtgggggttgtgaaag

SEQ ID NO: 6015 - DNA, 478 bp, Homo sapiens
  SIMILAR (41)..(250): 281254mologous to Homo sapiens Human secreted protein, SEQ ID NO: 6656,accession number G02575,Smith-Waterman Score=66.
gagctccgggcctgtttgcctgctgaagtagagtcttagggtgaccccagggggacgtaatgtttccgagaagaaggacagaaagaagactgggagacaccggaactcgaaagaaaatcgcatacagaaaggctgtacctggaggaaggaagtgcggagccagcctgagttgggagaagagctccagagagtgtgaatgacagaggtggtgccatccagcgcgctcagcgaggtcagcctgcgcctcctctgccacgatgacatagacactgtgaagcacctgtgtggcgactggttccccatcgagtacccagactcatggtatcgtgatatcacatccaacaagaagttcttttcccttgctgcaacctacagaggtgccattgtgggaatgatagtagctgaaattaagaacaggaccaaaatacataaagaggatggagatattctagcatccaacttctctgttgacacacaa

SEQ ID NO: 6016 - DNA, 437 bp, Homo sapiens
  SIMILAR (132)..(371): 681254mologous to Homo sapiens HERC2,accession number AF071172,Smith-Waterman Score=250.
ttcctaagaagccagaatctacggctgatgaagaaaaaattggaaacgaagagagtgatttagaagaagcctgcattttgcctcatagtccaataaatgtggacaagagacccattgcaattaaatcacccaagaccatcaccagtgagaacccattgggaccgagcctggggagcatcccgcaagcccgcttcctcctgatgatgctcagcatgctcaccctgcagcacagcgcaaacaacctcgacctcctgctcaattccggcacgctggccctcactcagacggcactgcgcctgattgttcctaagaagccagaatctacggctgatgaagaaaaaattggaaacgaagagagtgatttagaagaagcctgcattttgcctcatagtccaataaatgtggacaagagacccattgcaattaaatcacccaag

SEQ ID NO: 6017 - DNA, 1158 bp, Homo sapiens
  SIMILAR (115)..(345): 751254mologous to Mus musculus rjs,accession number AF061529,Smith-Waterman Score=266.
  misc_feature (1)...(1158): n = a,t,c or g
atgacagagctgcccactctgtggaaaccactgaaaaatagtccgatgtttagagtaattgcccgtgctttctgtgttacttttattcttgtatccacgcaccaagaaatgttaaccatcaccagtgagaacccattgggaccgagcctggggagcatcccgcaagcccgcttcctcctgatgatgctcagcatgctcaccttgcagcacagcgcaaacaacctcgacctcctgctcaattccggcacgctggccctcactcagacggcactgcgcctgattggtagnacgccagtagagctgccagccgagcttgctgctcccgccttcagagccgcggcggcggggacaaaaatcctcggcggcgagggcaaaaagtcgcggtggcaaaaagcggcggcgaccggggcaaaaagtcgcggtagcaaaaagccgcggcggcggggacaaaaagccgctgcggcgggggcaaaaggcggcggcaacagcggcaaaaagccgcgggcgcaaaaagcggcggcaacagcggcgtcggcaaaaagccgcggcgaggaaaaagtcgctgcggcgggggggcaaaaagctgtgacagcggggggcaaaaagccgcggcgggtaaaacgccgtggcggaagcaataaagtgctgactaactccacattacttgaagagttcagagtcagggaccgcagaggaaaggtaaagacaggtggcaggttgggtgtgctcaggcgggggctctcactggaggaggaggcaatggaccgagaccgcagggcaattccaccaggcctcggctcactcgctcagatgcaggctcagcaccaaccacatgagactcactggtggtgcagctgccccgacctggccaccacattctcaaagaggggcaggtgcacacgtgagaggaaaatgcagaaagtcagttccagacagatcgccggatcccacagccactccatgcacctgcatcggaaggtgcctgggagcttatttaaatggcaagttccgaggacagagtgccagctgcagtccacacctctcatgaccctcgttccaatcttcatcgtggcagccagttctggccctgaaacagggagatgcacaggagccgtttccttccttgttgcttccaaaactgtggcagaaacaccttga

SEQ ID NO: 6018 - DNA, 14567 bp, Homo sapiens
  SIMILAR (62)..(5413): 981254mologous to Homo sapiens HERC2,accession number AF071172,Smith-Waterman Score=9126.
gaggcgaggcggccgggccctgcgcgtcaggcctgagacctgggaggaagctggagaaaagatgccctctgaatctttctgtttggctgcccaggctcgcctcgactccaaatggttgaaaacagatatacagcttgcattcacaagagatgggctctgtggtctgtggaatgaaatggttaaagatggagaaattgtatacactggaacagaatcaacccagaacggagagctccctcctagaaaagatgatagtgtcgaaccaagtggaacaaagaaagaagatctgaatgacaaagagaaaaaagatgaagaagaaactcctgcacctatatatagggccaagtcaattctggacagctgggtatggggcaagcaaccagatgtgaatgaactgaaggagtgtctttctgtgctggttaaagagcagcaggccctggccgtccagtcagccaccaccaccctctcagccctgcgactcaagcagaggctggtgatcttggagcgctatttcattgccttgaatagaaccgtttttcaggagaatgtcaaagttaagtggaaaagcagcggtatttctctgcctcctgtggacaaaaaaagttcccggcctgcgggcaaaggtgtggaggggctcgccagagtgggatcccgagcggcgctgtcttttgcctttgccttcctgcgcagggcctggcgatcaggcgaggatgcggacctctgcagtgagctgttgcaggagtccctggacgccctgcgagcacttcccgaggcctcgctctttgacgagagcaccgtgtcctctgtgtggctggaggtggtggagagagcgaccaggttcctcaggtccgtcgtgacgggggatgttcacggaacgccagccaccaaagggccaggaagcatccccctgcaggaccagcacttggccctggccatcctgctggagctggctgtgcagagaggcacgctgagccaaatgttgtctgccatcctgttgttgcttcagctgtgggacagcggggcacaggagactgacaatgagcgttccgcccagggcaccagcgccccacttttgcccttgctgcaaaggttccagagcatcatttgcaggaaggatgcaccccactccgagggcgacatgcaccttttgtctggccctctgagccccaatgagagtttcctgaggtacctcacccttccacaagacaacgagcttgccattgatctgcgacaaacggcggttgttgtcatggcccatttagaccgtctggctacgccctgtatgcctccgctgtgtagctctccgacatctcataagggatcattgcaagaggtcataggttgggggttaataggatggaaatactatgccaatgtgattggtccaatccagtgcgaaggcctggccaacctgggagtcacacagattgcctgtgcagagaagcgtttcctgattctgtcacgcaatggccgcgtgtacacacaggcctataatagtgacacgctggccccacagctggtccaaggccttgcctccagaaacattgtaaaaattgctgcccattctgatggtcaccactacctagccttggctgctactggagaggtgtactcctggggctgtggggacggcggacggctgggccatggggacactgtgcctttggaggagcctaaggtgatctccgccttctctggaaagcaggccgggaagcacgtggtgcacatcgcttgcgggagcacttacagtgcggccatcactgccgagggggagctgtacacctggggccgcgggaactacggccggctgggccatggctccagtgaggacgaggccattccgatgctggtagccgggcttaaaggactgaaggtcatcgatgtggcgtgtgggagtggggatgctcaaaccctggctgtcactgagaacgggcaagtgtggtcttggggagatggtgactatgggaaattgggcagaggtggtagtgatggctgcaaaaccccaaagctgattgaaaagcttcaagacttggatgtggtcaaagtccgctgtggaagtcagttttccattgctttgacgaaagatggccaagtttattcatggggaaaaggtgacaaccagagacttggacatggaacagaggaacatgttcgttatccaaaactcttagaaggcttgcaagggaagaaggtgattgatgtggctgcaggctccacccactgcctggctctgactgaggacagcgaggtccacagctgggggagcaacgaccagtgccagcactttgacaccttgcgcgtgaccaagccagaacctgcagcattgccaggactggacaccaaacacatagtgggaattgcctgtgggcctgcccagagctttgcttggtcatcatgttctgagtggtccattggcctccgtgtcccttttgtggtggacatctgctcaatgacttttgagcagctagatctcctgcttcggcaggtgagtgaggggatggatggctccgcggactggcccccgccccaggagaaagagtgtgtggccgtggcaacgctgaatcttctacgacttcagttgcatgctgccattagtcaccaggttgacccggaattccttggtttaggtctgggcagcatcctcctgaacagcctgaagcagacggtggtgaccctggccagcagtgcgggcgtgctgagcaccgtgcagtcggccgcccaggccgtgctgcagagtggctggtccgtgctgctgcccaccgcggaggagcgggcccgggcactctctgctctcctgccctgcgcagtttcaggcaatgaagtgaacataagtccaggtcgtcgattcatgattgatcttctggtgggcagcttgatggctgatggagggttggagtcagccttacacgcagccattactgcagagatccaggatattgaagccaaaaaagaagcacagaaggaaaaagaaattgatgaacaggaagcgaatgcctcaacatttcatagaagcaggactccactggataaagaccttattaatacggggatctgtgagtcttctggcaaacagtgtttgcctctggttcagctcatacaacagcttcttagaaacatcgcttctcagactgtagccagattgaaagatgttgcccgtcggatttcatcatgtctggactttgagcaacacagtcgtgaaagatctgcttcattggattggttactgcgtttccaacgtttgcttattagtaaactttatccaggagaaagtattggtcagacctcagatatttctagtccagagctaatgggtgttggttccttgctgaagaagtacacagccctcctgtgcacgcacattggagatatactgcctgtggccgccagcattgcttctaccagctggcggcacttcgcggaggtggcttacattgtggaaggggactttactggtgttctccttccagaactagtagtttctatagtgcttctgctcagtaaaaatgctgatctcatgcaagaggctggagctgtacctctgctgggtggcctgttggaacatctggatcggttcaaccatctggcaccaggaaaggaacgggatgatcatgaagagttagcctggcctggcataatggagtcattttttacaggtcagaactgtagaaataatgaggaagtgacacttatacgcaaagctgatttggagaaccataataaagatggaggcttctggactgtgattgacgggaaggtgtatgatataaaggacttccagacacagtcgttaacaggaaatagtattcttgctcagtttgcaggggaagacccagtggtagctttggaagctgctttgcagtttgaagacacccgggaatccatgcacgcgttttgtgttggccagtatttggagcctgaccaagaaatcgtcaccataccagatctggggagtctctcttcacctctgatagacacagagaggaatctgggcctgcttctcggattacacgcttcgtatttggcaatgagcacaccgctgtctcctgtcgagattgaatgtgccaaatggcttcagtcatccatcttctctggaggcctgcagaccagccagatccactacaggtacaacgaggagaaagacgaggaccactgcagctccccagggggcacacctgccagcaaatctcgactctgctcccacagacgggccctgggggaccattcccaggcatttctgcaagccattgcagacaacaacattcaggatcacaacgtgaaggactttttgtgtcaaatagaaaggtactgtaggcagtgccatttgaccacaccgatcatgtttccccccgagcatcccgtggaagaggtcggtcgcttgttgttatgttgcctcttaaaacatgaagatttaggtcatgtggcattatctttagttcatgcaggtgcacttggtattgagcaagtaaagcacagaacgttgcctaagtcagtggtggatgtttgtagagttgtctaccaagcaaaatgttcgctcattaagactcatcaagaacagggccgttcttacaaggaggtctgcgctcctgtcatcgaacgtttgagattcctctttaatgaattgagacctgctgtttgtaatgacctctctataatgtctaagtttaaattgttaagttctttgccccgttggaggaggatagctcaaaagataattcgagaacgaaggaaaaagagagttcctaagaagccagaatctatggatgatgaagaaaaaattggaaacgaagagagtgatttagaagaagcttgcattttgcctcatagtccaataaatgtggacaagagacccattgcaattaaatcacccaaggacaaatggcagccgctgttgagtactgttacaggtgttcacaaatacaagtggttgaagcagaatgtgcagggtctttatccgcagtctccactcctcagtacaattgctgaatttgcccttaaagaagagccagtggatgtggaaaaaatgagaaagtgcctactaaaacagttggagagagcagaggttcgcctggaagggatagatacaattttaaaactggcgagcaagaatttcttacttccatctgtgcagtatgcgatgttttgtggatggcaaagacttattcctgagggaatcgatataggggaacctcttactgattgtttaaaggatgttgatttgatcccgccttttaatcggatgctgctggaagtcacctttggcaagctgtacgcttgggctgtacagaacattcgaaatgttttgatggatgccagtgccacatttaaagagcttggtatccaagccggttcccctgcaaaccatcaccaatgagaacccgtcaggaccgagcctggggaccatcccgcaagcccgcttcctcctggtgatgctcagcatgctcaccctgcagcacggcgcaaacaacctcgaccttctgctcaattccggcatgctggccctcacgcagacggcactgcgcctgattggccccagttgtgacaacgttgaggaagatatgaatgcttctgctcaaggtgcttctgccacagttttggaagaaacaaggaaggaaacggctcctgtgcagctccctgtttcagggccagaactggctgccatgatgaagattggaacaagggtcatgagaggtgtggactggaaatggggcgatcaggatgggcctcctccaggcctaggccgcgtgattggtgagctgggagaggacggatggataagagtccagtgggacacaggcagcaccaactcctacaggatggggaaagaaggaaaatacgacctcaagctggcagagctgccggctgctgcacagccctcagcagaggattcggacacagaggatgactctgaagccgaacaaactgaaaggaacattcaccccactgcaatgatgtttaccagcactattaacttactgcagactctttgtctgtctgctggagttcatgctgagatcatgcagagcgaagccaccaagactttatgcggactgctgcgaatgttagtggaaagcggaacgacggacaagacatcttctccaaacaggctggtgtacagggagcaacaccggagctggtgcacgctggggtttgtgcggagcatcgctctcacgccgcaggtatgcggcgccctcagctccccgcagtggatcacgctgctcatgaaggtcgtggaagggcacgcacccttcactgccacctcgctgcagaggcagatcttagctgtgcatttgttgcaagcagtccttccatcatgggacaagaccgaaagggcgagggacatgaaatgcctcgtggagaagctgtttgacttcttgggaagcttgctcactacctgctcctctgacgtgccattactcagagagtccacgctgaggcggcgcagggtgcgcccgcaggcctcgctgactgccacccacagcagcacactggcggaggaggtggtggcactgctgcgcacgctgcactccctgactcagtggaatgggctcatcaacaagtacatcaactcccagctccgctccatcacccacagctttgtgggaaggccttccgaaggggcccagttagaggactacttccccgactccgagaaccctgaagtggggggcctcatggcagtcctggctgtgattggaggcatcgatggtcgcctgcgcctgggcggtcaagttatgcacgatgagtttggagaaggcactgtgactcgcatcaccccaaagggcaaaatcaccgtgcagttctctgacatgcggacgtgtcgcgtttgcccattgaatcagctgaaaccactccctgccgtggcctttaatgtgaacaacctgcccttcacagagcccatgctgtctgtctgggctcagttggtgaacctcgctggaagcaagttagaaaagcacaaaataaagaaatcgactaaacaggcctttgcaggacaagtggacctggacctgctgcggtgccagcagttgaagctatacatcctgaaagcaggtcgggcgctgctctcccaccaggataaactgcggcagatcctgtctcagccagctgttcaggagactggaactgttcacacagatgatggagcagtggtatcacctgaccttggggacatgtctcctgaagggccgcagccccccatgatcctcttgcagcagctgctggcctcggccacccagccgtctcctgtgaaggccatatttgataaacaggaacttgaggctgctgcactggccgtttgccagtgcttggctgtggagtccactcacccttcgagcccaggatttgaagactgcagctccagtgaggccaccacgcctgtcgccgtgcagcacatccaccctgccagagtgaagaggcgcaagcagtcgcccgttcccgctctgccgatcgtggtgcagctcatggagatgggattttccagaaggaacatcgagtttgccctgaagtctctcactggtgcttccgggaatgcatccagcttgcctggtgtggaagccttggtcgggtggctgctggaccactccgacatacaggtcacggagctctcagatgcagacacggtgtccgacgagtattctgacgaggaggtggtggaggacgtggatgatgccgcctactccatgtctactggtgctgttgtgacggagagccagacgtacaaaaaacgagctgatttcttgagtaatgatgattatgctgtatatgtgagagagaatattcaggtgggaatgatggttagatgctgccgagcgtatgaagaagtgtgcgaaggtgatgttggcaaagtcatcaagctggacagagatggattgcatgatctcaatgtgcagtgtgactggcagcagaaagggggcacctactgggttaggtacattcatgtggaacttataggctatcctccaccaagttcttcttctcacatcaagattggtgataaagtgcgggtcaaagcctctgtcaccacaccaaaatacaaatggggatctgtgactcatcagagtgtgggggttgtgaaagctttcagtgccaatggaaaagatatcattgtcgactttccccagcagtctcactggactgggttgctatcagaaatggagttggtacccagtattcatcctggggttacgtgtgatggatgtcagatgtttcctatcaatggatccagattcaaatgcagaaactgtgatgactttgatttttgtgaaacgtgtttcaagaccaaaaaacacaataccaggcatacatttggcagaataaatgaaccaggtcagtctgcggtattttgtggccgttctggaaaacagctgaagcgttgccacagcagccagccaggcatgctgctggacagctggtcccgcatggtgaagagcctgaatgtgtcgtcctccgtgaaccaggcatcccgtctcattgacggcagcgagccctgctggcagtcatcggggtcgcaaggaaagcactggattcgtttggagattttcccagatgttcttgttcatagattaaaaatgatcgtagatcctgctgacagtagctacatgccgtccctggttgtagtgtcaggtggaaattccctgaataaccttattgaactaaagacaatcaatattaacccttctgacaccacagtgccccttctgaatgactacacagagtatcacaggtatattgaaattgctataaagcagtgcaggagctcaggaatcgattgtaaaatccatggtctcatcctgctgggacggatccgtgcagaagaggaagatttggctgcagttcctttcttagcttcggataatgaagaggaggaggatgagaaaggcaacagcggaagcctcattagaaagaaggctgctgggctggaatcagcagctacgataagaaccaaggtgtttgtgtggggcctgaatgacaaggaccagctgggcgggctgaaaggctccaagataaaggttccttcgttctctgagacactgtcagctttgaatgtggtacaggtggctggtggatctaaaagtttgtttgcagtgactgtggaagggaaggtgtatgcctgtggagaagccacgaatggccggctggggctgggcatttccagcgggacggtgcccatcccacggcagatcacagctctcagcagctacgtggtcaagaaggtggctgttcactcaggtggccggcacgcgacggctttaactgtcgatggaaaagtgttttcgtggggcgaaggtgacgatggaaaacttggacacttcagcagaatgaactgtgacaaaccaaggctgatcgaggccctgaaaaccaagcgtatccgggatatcgcctgtgggagctcgcacagcgcagccctcacatccagcggagaactgtacacctggggcctcggcgagtacggccggctgggacatggggataatacgacacagctaaagcccaaaatggtgaaagtccttctcggtcacagagtaatccaggttgcatgtgggagtagagacgcgcagaccctggctctgaccgatgaaggtttggtattttcctggggtgatggtgactttggaaaactgggccggggcggaagtgaaggctgtaacattccccagaacattgagagactaaatggacagggggtgtgccagattgagtgtggagctcagttctccctggcgctcaccaagtctggagtggtgtggacatggggaaagggggattacttcagattgggccacggctctgacgtgcacgtgcggaaaccacaggtggtggaagggctgagagggaagaagatcgtgcatgtggctgtcggggccctgcactgcctggcggtcacggactcggggcaggtgtatgcttggggtgacaacgaccacggccagcagggcaatggcacgaccacggttaacaggaagcccacactcgtgcaaggcttagaaggccagaagatcacacgcgtggcttgtgggtcgtcccacagtgtggcgtggacaactgtggatgtggccacgccctctgtccacgagcccgtcctcttccagactgcaagagacccgttaggtgcttcctacttaggcgtgccctcagatgctgattcttctgctgccagtaataaaataagtggtgcaagtaattctaagccaaatcgcccttctcttgccaagattctcttgtcattggatggaaatctggccaaacagcaggccttatcgcatattcttacagcattgcaaatcatgtatgccagagatgctgttgtcggggccctgatgccggccgccatgatcgccccggtggagtgcccctcgttctcctcggcggccccttccgacgcatctgcgatggctagtcccatgaatggagaagaatgcatgctggctgttgatatcgaagacagactgagtccaaatccatggcaagaaaagagagagattgtttcctctgaggacgcagtgaccccctctgcagtgactccgtcggccccctcagcctccgctcggccttttatcccagtgacggatgacctgggagctgcaagcatcattgcagaaaccatgaccaaaaccaaagaggatgttgaaagccaaaataaagcagcaggtccggagcctcaggccttggatgagttcaccagtctgctgattgcggatgacactcgtgtggtggtagacctgctcaagctgtcagtgtgcagccgggccggggacaggggcagggatgtgctctccgcggtgctttccggcatggggaccgcctacccacaggtggcagatatgctgttggagctctgtgtcaccgagttggaggatgtggccacagactcgcagagcggccgcctctcttctcagcctgtggtggtggagagtagccacccttacaccgacgacacctccaccagtggcacagtgaagataccaggtgcagaaggactcagggtagaatttgaccggcagtgctccacagagaggcgccacgaccctctcacagtcatggacggcgtcaacaggatcgtctccgtgcggtcaggccgagagtggtccgactggtccagcgagctgcgcatcccaggggatgagttaaagtggaagttcatcagcgatgggtctgtgaatggctggggctggcgcttcaccgtctatcccatcatgccagctgctggccctaaagaactcctctctgaccgctgcgtcctctcctgtccatccatggacttggtgacgtgtctgttagacttccgactcaaccttgcctctaacagaagcatcgtccctcgccttgcggcctcgctggcagcttgtgcacagctgagtgccctagctgccagtcacagaatgtgggcccttcagagactgaggaagctgcttacaactgaatttgggcagtcaattaacataaataggctgcttggagaaaatgatggggaaacaagagctttgagttttacaggtagtgctcttgctgctttggtgaaaggtcttccagaagctttgcaaaggcagtttgaatatgaagatcctattgtgaggggtggcaaacagctgctccacagcccattctttaaggtactagtagctcttgcttgtgacctggagctggacactctgccttgctgtgccgagacgcacaagtgggcctggttccggaggtactgcatggcctcccgtgttgctgtggcccttgacaaaagaacaccgttgccccgtctgtttcttgatgaggtggctaagaaaattcgtgaattaatggcagacagcgaaaacatggatgttctgcatgagagccatgacatttttaaaagagagcaagacgaacaacttgtgcagtggatgaacaggcgaccagatgactggactctctctgctggtggcagtggaacaatttatggatggggacataatcacaggggccagctcgggggcattgaaggcgcaaaagtcaaagttcccactccctgtgaagcccttgcaactctcagacccgtgcagttaatcggaggggaacagaccctctttgctgtgacggctgatgggaagctgtatgccactgggtatggtgcaggtggcagactaggcattggagggacagagtcggtgtccaccccaacattgcttgaatccattcagcatgtgtttattaagaaagtagctgtgaactctggaggaaagcactgccttgccctgtcttcagaaggagaagtttactcttggggtgaggcagaagatgggaagttggggcatggcaacagaagtccgtgtgaccgccctcgtgtcatcgagtctctgagaggaattgaagtggtcgatgttgctgctggcggagcccacagcgcctgtgtcacagcagccggggacctctacacatggggcaaaggccgctacggccggctggggcacagcgacagtgaggaccagctgaagccgaagctggtggaggcgctgcagggccaccgtgtggttgacatcgcctgtggcagtggagatgcccagaccctctgcctcacagatgacgacactgtctggtcctggggggacggggactacggcaagctcggccggggaggcagcgatggctgtaaagtgcctatgaagattgattctcttactggtcttggagtagttaaagtggaatgcggatcccagttttctgttgcccttaccaaatctggagctgtttatacctggggcaaaggcgattatcacaggttgggccatggatcagatgaccatgttcgaaggcctcggcaggtccaagggttgcaggggaagaaagtcatcgccatcgccactggctccctgcactgtgtgtgctgcacagaggatggtgaggtttatacatggggcgacaatgatgagggacaactgggagacggaaccaccaatgccatccagaggcctcggttggtagctgcccttcagggtaagaaggtcaaccgtgtggcctgtggctcagcacataccctcgcctggtcgaccagcaagcccgccagtgctggcaaactccctgcacaggtccccatggagtacaatcacctgcaggagatccccatcattgcgctgaggaaccgtctgctgctgctgcaccacctctccgagctcttctgcccctgcatccccatgttcgacctggaaggctcgctcgacgaaactggactcgggccttctgttgggttcgacactctccgaggaattctgatatcccagggaaaggaggcggctttccggaaagtagtacaagcaactatggtacgcgatcgtcagcatggccccgtcgtggagctgaaccgcatccaggtcaaacgatcaaggagcaaaggcgggctggccggccccgacggcaccaagtctgtctttgggcagatgtgtgctaagatgagctcgtttggtcccgacagcctcctccttcctcaccgtgtctggaaagtcaagtttgtgggtgaatctgtggatgactgtgggggcggctacagcgagtccatagctgagatctgtgaggagctgcagaacggactcacgcccctgctgatcgtgacacccaacgggagggatgagtctggggccaaccgagactgctacctgctcagcccggccgccagagcacccgtgcacagcagcatgttccgcttcctgggtgtgttgctgggcattgccatccgaaccgggagtcccctgagcctcaaccttgccgagcctgtctggaagcagctggctgggatgagcctcaccatcgcggacctcagtgaggttgataaggattttattcctggactcatgtacatccgagacaatgaagccacctcagaggagtttgaagccatgagcctgcccttcacagtgccaagtgccagtggccaggacattcagttgagctccaagcacacacacatcaccctggacaaccgcgcggagtacgtgcggctggcgataaactatagactccatgaatttgatgagcaggtggctgctgttcgggaaggaatggcccgcgttgtgcctgttcccctcctctctctgttcaccggctacgaactggagacgatggtgtgtggcagccctgacatcccgctgcaccttctcaagtcggtggccacctataaaggcatcgagccttccgcatcgctgatccagtggttctgggaggtgatggagtccttctccaacacagagcgctctcttttccttcgcttcgtctggggccggacgaggctgcccaggaccatcgccgacttccggggccgagacttcgtcatccaggtgttggataaatacaaccctccagaccacttcctccctgagtcctacacctgtttcttcttgctgaagctgcccaggtattcctgcaagcaggtgctggaggagaagctcaagtacgccatccacttctgcaagtccatagacacagatgactacgctcgcatcgcacttacaggagagccagccgccgacgacagcagcgacgattcagataacgaggatgtcgactcctttgcttcggactctacacaagattatttaacaggacactaa

SEQ ID NO: 6019 - DNA, 687 bp, Homo sapiens
  SIMILAR (167)..(391): 221254mologous to Arabidopsis thaliana putative protein,accession number AL391147,Smith-Waterman Score=54.
  misc_feature (1)...(687): n = a,t,c or g
ctgcggcccctgccggttacataactcgttgcgggctccgcgcggtcccacttcccggctcccttcgcctccaggatgcgctgagccctacaacacccccagcggccgccggctcccccacgaggtgtgaatgacagaggtggtgccatccagcgcgctcagcgaggtcagcctgcgcctcctctgccacgatgacatagacactgtgaagcacctgtgtggcgactggttccccatcgagtacccagactcatggtatcgtgatatcacatccaactagaagttcttttcccttgctgcaacctacagaggtgccattgtgggaatgatagtagctgaaattaagaacaggaccaaaatacataaagaggatgggagatattctagcagtccaacttctctgttgacacacaagtcgcgtacatcctaagtctggggcgtcgtgaaagagttcagggaaggcacggcataggttccctctttactttgaaagtttaaagggtcacatattcaaccaccgcccaggaccactgcaaagccatttacctgcatgtcctcaccaccaacaacacagcaataaacttctatgaaaacagagacttcaagcagcaccactatctcccctattactactccattcgagngtcctcanagatggcttcacctatgtcctctacatcaatggcg

SEQ ID NO: 6020 - DNA, 6330 bp, Homo sapiens
  SIMILAR (517)..(3303): 851254mologous to Mus musculus rjs,accession number AF061529,Smith-Waterman Score=4074.
gaattcggcacgagcctcgggccgcgagaggcgccgggatcgcgggcgccggctgagccagcggctcttgggaggctgcgtccgcgcgccggcggggcgaggcggccgggccctgcgcgtcaggcctgagacctgggaggaagctggagaaaagatgccctctgaatctttgtgtttggctgcccaggctcgcctcgactccaaatggttgaaaacagatatacagcttgcattcacagagaatgggctctgtggtctgtggaatgaaatggttaaagatggagaaattgtatacactggaacagaatcaacccagaacggatagctccctcctggaaaagcttttgtctggtcctctgagccccagtgagagtttcctgaggtacctcacccttccacaagacaacaggcttgccattgatctgcaacaaacgggggttgttgtcatggcccatttagaccgtctggctacaccctgtagatgcctcctctgtgtagctctccgacgtctcataagagtcattttttacaggtcagaactgtagaaataatgagaaagtgacatttgtacgcatagctgatttggagaaccataataacgatggaggcttctggactgtgattgacgggaaagtgtatgatataaaggacttccagacacagtcgttaacagaaaatagtattcttgctcagtttgcaggggaagacccagtggtagctttggaagctgctttgcagtttgaagacacccgggaatccatgcacgcattttgtgttggccagtatttggagcctgaccaagaaggcgtcaccataccagatctggggagtctctcctcacctctgatagacacagagaggaatctgggcctgcttctcggattacacgcttcctatttagcaatgagcacaccgctgtctcctgtcgagattgaatgtgccaaatggcttcagtcatccatcttctctggaggcctgcagaccagccagatccactacagctactacgaggagaaagacgaagaccactgcagctccccagggggcacacctgccagcaaatctcgactctgctcccacagacgggccctgggggaccattcccaggcatttctgcaagccattgcagacaacaacattcaggatcacaacgtgaaggactttttgtgtcaaatagaaaggtactgtaggcagtgccatttgaccacaccgatcatgtttccccccgagcatcccgtggaagaggtcggtcgcttgctgttatgttgcctcttaaaacatgaagatttaggtcatgtggcattatctttagttcatgcaggtgcacttgatattgagcaagtaaagcacagaacgttgcctaagtcagtggtggatgtttgtagagttgtctaccaagcaaaatgttcgctcattaagactcatcaagaacagggccgttcttacaaggaggtctgcgctcctgtcatcaaacgtttgagattcctctttaatgaattgagacctgctgtttgtaatgacctctctataatgtctaagtttaaattgttaagttctttgccccattggaggaggatagctcagaagataattcgagaaccaaggaaaaagagagttcctaagaagccagaatctacggatgatgaagaaaaaattggaaacgaagagagtgatttagaagaagcttgcattttgcctcatagtccaataaatgtggacaagagacccattgcaattaaatcacccaaggacaaatggcagccgctgttgagtactgttacagatgttcacaaatacaagtggttgaagcagaatgtgcagggtctttatccgcagtctccactcctcagtacaattgctgaatttgcccttaaagaagagccagtggatgtggaaaagagaaagtgcctactaaaacagttggagagagcagaggttcgcctggaagggatagatacaattttaaaattgtatctggtgagcaagaatttcttacttccatctgtgccgtatgcgatgttttgtggatggcaaagacttattcctgagggaatcgatataggggaacctcttactgattgtttaaaggatgttgatttgatcccgccttttaatcggatgctgctggaagtcacctttggcaagctgtacgcttgggctgttcagaacattcgaaatgttttggtggatgccagtgccaaatttaaagagcttggtatccagccggttcccctgcaaaccatcaccaatgagaacccatcgggaccgagcctggggaccatcccgcaagcccacttcctcctggtgatgctcagcatgctcaccctgcagcacagcgcaaacaaccttgacctcctgctcaattccggcacgctggccctcgctcagacggcactgcgcctgattggccccagttgtgacagcgttgaggaagatatgaatgcttctgcccaaggtgcttctgccacagttttggaagaaacaaggaaggaaacggctcctgtgcagctccctgtttcagggccagaactggctgccatgatgaagattggaacaagggtcatgagaggtgtggactggaaatggggcgatcaggatgggcctcctccaggcctaggccaagtgattggtgagctgggagaggacgggtggataagagtccagtggggcacgggcagcaccaactcctacaggatggggaaagaaggaaaatacgacctcaagctggcagagctgccggccgcctgcacagccctcagcagaggatttggacacagaggacgactctgaagccgaacaaactgaaaggaacattcaccccactgcaatgatgtttaccagcaactattaccttactgcagactctttgtctgtctgctggagttcatgctgagatcatgcagagtgaagccaccaagactttatgcggactgctgcgaatgttagtggaaagcggaattgacggacaagacatcttctccaaacaggctggtgtacagggagcaacaccggagctggtgcacgctggggtttgtgcagagcatcgctctcacgctgcaggtgtgcggcgccctcagctccccgcagtggatcacgctgctcatgaaggttgtggaagggcacgcacccttcactgccacctcgctgcagaggcagatcttagctgtgcatttgttgcaagcagtccttccgtcatgggacaagaccgaaagggtgagggacatgaaatgcctcatggagaagctgtttgacttcttggggagcttgctcactatgtgctcctctgacgtgccgttactcagaggtgggtggccgtctcccttccctgtaccctggtgaagagcggtgcagtgccgtcactcagaggtgggtggccgtctcccttccctgtgtcctggtgaagagcggtgcagtgccgtcactcagaggtgggtggccgtctcccttccctgtaccctggtgaagagcggtgcagtgccgtcactcagaggtgggtggccgtctcccttccctgtgtcctggtgaagagccgtgtagtgccgtcactcagaggtgagtggccgtctcccttccctgtgccctggtgaagagtggtgcagcagcttctcccctggtttcctcctcagagtccacgctgaggcggcgcagggtgtgcccgcaggcctcgctgactgccacccacagcagcacactggcggaggaggtggtggcactgctgcacacgctgcactccctgactcggtggaatgggttcatcaacaagtacatcaactcccagctccgctccatcacccacagctttgcgggaaggccttccaaaggggcccagttagatgactacttccctgattccgagaaccctgaagtggggggcctcatggcggtcctggctgtggttggaggcatcgatggtcgcctgtgcctgggcggccaagttgtgcacgatgactttggagaagtcaccatgactcgcatcaccctgaagggcaaaatcaccgtgcagttctctgacatgcggacgtgtcgcgtttgcccattgaatcagctgaaaccactccctgccgtggcctttaatgtgaacaacctgcccttcacagagcccatgctgtctgtctgggctcagttggtgaacctcgctggaagcaagttagaaaagcacaaaataaagaaatcgactaaacaggcctttgcaggacaagtggacctggacctgctgcggcgccagcagttgaagctatacatcctgaaagcaggtcgggcgctgttctcccaccaggataaactgcggcagatcctgtctcagccagctgttcaggagactggaactgttcacacagatgatggagcagtggtatcacctgaccttggggacatgtctcctgaagggccgcagccccccatgatcctcttgcagcagctgctggcctcggccacccagccgtctcctgtgaaggccatatttgataaacaggaacttgagactgctgcactggccgttgtggagtccactcacccttcgagcccaggatttgaagactgcagctccagtgaggccaccacgcctgtcaacgtgcagcacatccgccctgccagagtgaagaggcgcaagcagtcacccgttcccgctctgccgatcgtggtgcagctcatggagatgggatttcccagaaggaacatcgagtttgccctgaagtctctcactggtgcttccgggaatgcgtccggcttgcctggtgtggaagccttggtcgggtggctgctggaccactccgacatacaggtcacggagctctcagatgcagacacggtgtccgacgagtattctgacgaggaggtggtggaggacatggatgatgccgcctactccatgtctactggtgctgttgtgacggagagccagacgtacaaaaaccgagctggtttcttgggtaatgatgattatgctgtatatgtgagagagaatattcaggtgggaatgatggttagatgctgccgaacatacgaagaagtgtgcgaaggtgatgtgatgttggcaaagtcatcaagctggacagagatggattgcatgatctcaatgtgcagtgtgactggcagcagaaagggggcatctactggtttaggtacattcatgtggaacttataggctatcctccaccaagaagttcttctcacatcaagattggtgataaagtgcgggtcaaagcctctgtcaccacaccaaaatacaaatggggatctgtgactcatcagagtgtgggggttgtgaaaggtgtgatggatgtcagatgtttcctatcaatggatccagattcaaatgcagaaactgtgatgactttgatttttgtgaaacgtgtttcaagaccaaaaaacacaataccaggcatacatttggcagaataaatgaaccaggcttcagcagaagaaacacttcctataaatctcgcccaaacaggaaaggagaagcattagggtgtccgactacgtgggtttcatagctgtggaaaagccaaaggggagactcctgaagaaaggcggtgaagactgtgaagagcgggtcaggaagatgagcacagcactgctactcctgtgggcacagggacagcatgtctccagccagcgccaccttgtttaatacatgggaactcactgaaattcattctgtattttgcccgcaaagttttaaagctttcatccacagtcaggaattaaacttataccaatgagagcctcacacattcaaggatgtactaagcactacaggcctcacagaaacagagatcccatcttggagttttcagtaccacatgggagataaagggttttgaacatgaaatgacaaaaacaacagcaagaagaaaattcttgtcctttttcattactatcagactcaaataaatgtcttggctcttacattacattcattcttcaaccattgtggtctggcttccacttccttcacttcaccaacatggctctgccaaaggaagcccgtgatctctaggccatcactttaattgatctttctacaacatttatcctggttgttaagccctccttacaacattcttctctctttgtttttatagctccatctctcctgcttctttaacttgataatgcatacttgatttttctatttgttatttcataaaccaattaatacacagataaaatgactgtatatcaaaccatgtttgtatagaaaaaatggattttggatgcctctcatatgtaattagttctattaaacatattaattgtattgtttaatttgtcaggtttttgacagaattttgtttacaagtaataaaaattttatctccaattttc

SEQ ID NO: 6021 - DNA, 1854 bp, Homo sapiens
  SIMILAR (121)..(438): 311254mologous to Homo sapiens HERC2,accession number AF071172,Smith-Waterman Score=56.
atgacagagctgcccactctgtggaaaccactgaaaaatagtcagatgtttagagtaattgcccgtgctttctgtgttacttttattcttgtatccacgcacaagaaatgtcagtgggtgtcaatgcttattagtcagatgtttaaagtaatagcccgtgctttctgcgttatgtttattcttgtatccatcacaagaaacaccatcaccagtgagaacccattgggaccgagcctggggagcatcccgcaagcccgcttcctcctgatgatgctcagcatgctcaccctgcagcacagcgcaaacaacctcgacctcctgctcaattccggcacgctggccctcactcagacggcactgcgcctgattggccccagttgtgacaatgttgaggaagatatgaatgcttctgctcaaggtgtttctgccacagttttggaagcaacaaggaaggaaacggctcctgtgcatctccctgtttcagggccagaactggctgccacgatgaagattggaacgagggtcatgagaggtgtggactggaaatggggcgatcaggatgggcctcctccaggcctaggccgagtgattggtgagctgggagaggacgggtggataagagtccagtggggcacgggcagcaccaactcctacaggatggggaaagaaggaaaatacgacctcaagctggcagagctgccggccgctgcacagccctcagcagaggattcggacacagaggacgactctgcttctccaaacaggctggtgtacagggagcaacaccggagctggtgcatgctggggtttgtgcggagcatcgctctcacgccgcaggtgtgcggcgccctcagctccccgcagtggatcacgctgctcatgaaggtcatgaaagggcacgcacccttccctgccgcctcgctgcagaggcagatcttagctgtgcatttgttgcaagcagtccttcggtcatgggacaagaccaaaagggcgagggacatgaaatgcctggtggagaagctgtttgacttcttggggagcttgctcactacctgctcctctgacgtgccattactcagagagtccatgccgaggtggcgcagggtgcgcccgcaggccttgctgactgccacccatagcagcacactggtggaggtggtggtggcactgctgtgcacgctgcactccctgactcagtggaatgggctcatcaacaagtacatcaactcccagctccgctccatcacccacagctttgcgggaaggccttctgaaggggcccagttagaggactacttccccgactccgagaaccctgaagtggggggcctcatggcggtcctggctgtgattggaggcatcgatggtcgcctgtgcctgggcggccaaattgtgcacgatgagtttggagaaggcactgtgactggcatcaccccgaagggcaaaatcaccgtgcagttctctgacatgcggacgtgtcacatttgcccattgaatcagctgaaaccagaaagggaaaggttgtgcagaaacctggacagtggacgccgcgggcacttcccacccatggcagcaggagggcgggagctcaaagagggctgggcctcgcccctgccagtggagtggggactgccagataaaagacgaggtcttttcttgggcagccattcccatctttgcagcacggtcctaagggcccaagaggcccccacccccgccgcccagcttctgcacctgaggctcacgggctctccccaaccctgcaatccgctccacttactcgatggggaaccagtcgccacacaggtgcttcacagtgtctatgtcatcgtggcaaaaggaggcgcaggctga

SEQ ID NO: 6022 - DNA, 423 bp, Homo sapiens
  SIMILAR (344)..(276): 951254mologous to Homo sapiens flavoprotein subunit of complex II,accession number D30648,Smith-Waterman Score=115.
  misc_feature (1)...(423): n = a,t,c or g
ggaagtcccgttgggggtaggcnccgagcgcgcgaaacactgtgcccagntttatcatctcacattattgattcacgggacaaaggtaagtgccacgcggcctggccactgcagtcctggcaagctcccatcctgggtgccaatctcccttcaatgtactccttcttccccggagtgcagaagcgtatgaagacagttatgacatggacacatgcatgagctattatacataattacaaaagctgattctgtcatcaccgcatcttgtctcatcagtaggagcgaatggctggggggacggtggcacagtcagcctcgttcaaaggtttgtcgattacgggtcttcccagtgccaacgtccacataggacagggtgtgcttcctccagtgctcctcaaagggcttcttctgttgcccctggat

SEQ ID NO: 6023 - DNA, 169 bp, Homo sapiens
  SIMILAR (3)..(107): 681254mologous to Homo sapiens flavoprotein subunit of complex II,accession number D30648,Smith-Waterman Score=109.
gaatggtctggaacacggacctggtggagaccctggagctgcagaacctgatgctgtgcggattgatgagtacgattactccaagcccatccaggggcaacagaagaagccctttgaggagcactggaggaagcacaccctgtcctatgtggacgttggcactgggaag

SEQ ID NO: 6024 - DNA, 729 bp, Homo sapiens
  SIMILAR (175)..(384): 501254mologous to Homo sapiens Gag-Pro-Pol protein,accession number AF164614,Smith-Waterman Score=179.
atgggacaagtgtgggctttggttcattccaccttggaaacttttcacactaatgatgcagaggaaggagagtataacaaagtaacagaagaagtatcagagcaggacactgggcaaaaagtagttgccccagtgactgttcgagcagcacctcgaatgaccgctctcagttctattcaggcaggaatcccacaagctagaagagaggcagagccaggacagcgcatagcacagctcctgatagtgctgtatgtggaaatggggaaaagtgaaattaaacgagcaggaggatttggaagcacaaataaacaaggcaaagcagcttattgggtaaatcaaattactgataaacatcctacctgtgaaataactattcagggccaaaatcaacagccaatttggataccattgagacacctgaaaccttaccatgaaacagatgctgaggaagagattccaggaggatcccgagctccccccagttgcagccatgtggagaatgactctgaggaggaccccaactgtcacaagcaacacccgttgaacacagccatccacctggggacagatcaagaagctgtcacagatggcggaaaaaacttgaggaaagcgggacaagcagtcacgagtaatttaatggtagctataatagcagttatcaccactgccatgagtattccttcaacaagggctgacacagagaacaattatacttattgggcatattga

SEQ ID NO: 6025 - DNA, 751 bp, Homo sapiens
  SIMILAR (737)..(162): 851254mologous to Homo sapiens flavoprotein subunit of complex II,accession number D30648,Smith-Waterman Score=838.
ccacgtaggaggcattctcgacaccctctgtacacagcatgcgctttatttggcttctcttacgcagcgtagtgactttcagatttattcaagctgctgcgtgcgccaacagtccactccttcctagtgctgaggcccccatcacatgagcacaactgtttcttgtgtgtgatgtgttgtcctctggctgtgcacttcccagtgccgacgtccacataggacagggtgtgcttcctccagtgcacctcaaagggcttcttctgttgcccctggatgggcttggagtgatcgtactcatcaatccgcaccttgtagtcttccccggcgtgcgcgccccgtgactccttccccgcctttgctccattgacggtctgcagcgcacatagcatcaggttctgcagctccagggtctccaccaggtccgtgttccagaccattcctcggtcaaacgtcttcagatgcttcaggtctccatagagctagatgattttcccacaaccttcttgcaacaagcttcccacacggaacacggcagcatgattttgcgttgacttctgcatgctgagtcgcagttccgatgttcttatgcttcttccatcagcaaatctcaatttgtcaagactcgtgacagattcttccccagcatgtggtttaattggagggactttatctccaggcctgcatgaatcttcgatgctcagggcacatgtctgaccaaagacaaccaggcgcaatagcaagggtcctcaac

SEQ ID NO: 6026 - DNA, 417 bp, Homo sapiens
  SIMILAR (160)..(288): 701254mologous to Rattus norvegicus Munc13-1,accession number U24070,Smith-Waterman Score=141.
atggcccaatgggggtccgcgcgggatcagagcccgccctgcctcctggcgccgtcgcgggggtggggactttctaggccacgccccgggggcggagcccgccggcagccgcgccgcagccgcggagggaggggcggggcgggctccggtgtcagcgaccaagccgcaggtggcggcgagcgcggggctcggcccgagctcaggagcccagggggcggtctcatcatcatcgacagcatgccagacatccgcaagaggaaacctatcccactcgtgagcgacttggcttctgatgaagaagggtgtttttggaagttattggatgcatttcctctgcatctggaggagtatggaagagctgaagtgggagggaggaagaccatgtccgtgggacgtcattgcccgtgcatgcagtga

SEQ ID NO: 6027 - DNA, 535 bp, Homo sapiens
  SIMILAR (35)..(124): 231254mologous to Rattus norvegicus Munc13-1,accession number U24070,Smith-Waterman Score=38.
cgaggcgtcgagagttcccagcgaaggagcgcgagagcgcgtcgatgtcaagccccgaagagtaaccaacatggccaagggtgccccaccaagccagccgccgccgaacagtgtgcctgcagattgagcagatccgtaaggctgagctcttccaatttcgaggagagtctcaggccgacagaggatgacgagggccaggaggggcaggactccatgtccagggccaaggccaactggctgcgtgccttcaacaaggtgcggatgcagctgcaggaggcccggggagaaggagagatgtctaaatccctatggttcaaaggcggcccagggggcggtctcatcattatcgacagcatgccagacatccgcaagaggaaacctatcccactcgtgagcgacttggccatgtccctggtccagtccaggaaagcggcgatcacctcggccttggcctccagcacgttgaacaacgaggagctgaaaaaccacgtttacaagaagaccctgcaagccttaatctaccccatctcgtgcc

SEQ ID NO: 6028 - DNA, 225 bp, Homo sapiens
  SIMILAR (37)..(177): 371254mologous to Arabidopsis thaliana Contains similarity to homeobox protein 8 gb|X16849 from Xenopus laevis,accession number AC002986,Smith-Waterman Score=68.
atgaaagctactttgcctcttgctatcacttacgagagttatgcagcaccacctgaggtgaagccaagcacttcctgctcggaacccttcagctcgccagacagcagccggctggacatccactgtcagccagatccaaactccagcccaggggagtcacaccgcagtgagcaccacttcaccgccactgccactcctccaatgtggcgcctggctacatcatag

SEQ ID NO: 6029 - DNA, 284 bp, Homo sapiens
  SIMILAR (142)..(282): 531254mologous to Bos taurus BA14,accession number U20807,Smith-Waterman Score=142.
gaatgggataccagatttcagcaatacaacccttctgagagggcttcaaatgcctggagcaagaggtccttgctgtgggtcccagagacacatcaaccttctgatggggactggcgtcttcctggtgaagatgaaggcaaagagttctttttcctggacagtgaaaccagattgtgcaaaatagctcctgaaggctggagagagcagcctcagaagacctccatgaataccttcacactcttcctgaggataaagttctttgtcagccactatgggctgctcca

SEQ ID NO: 6030 - DNA, 782 bp, Homo sapiens
  SIMILAR (163)..(711): 431254mologous to Homo sapiens protein tyrosine phosphatase (PTP-BAS, type 3),accession number D21211,Smith-Waterman Score=368.
cactgagtccatcgtgcgggcggaggaagacctccgcggacagacatgcgagacacccctgctcctcgttggcaagccgccccatgatgaaggcctacacctgggcacggagacttttggatgcagcctttaacgaaggacgcaggcatgagcctgtcctctgtgacgctggccagcgccctacaggtcaggggtgaagctctgtctgaggaggaaatctggtccctcctgttcctggccgctgagcagctcctggaagacctccgcaacgattcctcggactatgtggtttgcccctggtcagccctgctttctgcagctggaagcctttctttccaaggccgtgtttctcatatagaggctgctcctttcaaggcccctgaactgctacagggacagagtgaggatgagcagcctgatgcatctcagatgcatgtctattctttaggaatgaccctctactggtcagcagggtttcatgttccgccacatcagcccctgcagctctgcgagcccctgcactccatcctgctgaccatgtgtgaagaccagcctcacaggcggtgcacgttgcagtcggttctggaagcttgtcgggttcatgagaaagaagtgtctgtctacccagcccctgctggtctccacatcagaaggctggttggcttggttctgggtaccatttctgaggtcagtagagaaccgtgcttttcaagcagtagctgctggtcatgtgtggctattaaaatttgaattagttatattatcattaactaaaataaaat

SEQ ID NO: 6031 - DNA, 380 bp, Homo sapiens
  SIMILAR (217)..(372): 311254mologous to Andes virus M segment polyprotein,accession number AF042109,Smith-Waterman Score=66.
atgatgaaaagcagcagctccacagactggaggtcttggagtggggaaggattgctggagagcatgtccagggataatgagctagaaggagaggatagccccatcctggatcaagaggacagctggagggacagtgcctccccagatgcaggggaaggcctgggtctcaggccagagtcttcccaaaaggccatcagagaggcacaatggggccaaaacagagagagaccttgggccagttccttgacacattctcctgagtcccaccctcatttatgcaaacttcaccaagaaagggatgaatcaacattggcgacctctttggaaaaggatgtgaggcaaaactgctattcagtttgtgatatcatgagacttggaag

SEQ ID NO: 6032 - DNA, 1032 bp, Homo sapiens
  SIMILAR (217)..(423): 491254mologous to Homo sapiens Fas-associated phosphatase- 1,accession number AF233323,Smith-Waterman Score=171.
atgccccgcccagaccttgcccctgctctgttggtggcagttcttgtactcctgtacttgcttgtatctgcagcagctcctgctccttcctcggactccactccagaaaatgtgtgcccagtcgaaaccactaccaatttcatctgggagctttcttcaccccacaacacttccgcagttctgctggttgtcttccacaagggccccagtcctaagtttgaagtcaaactaaaaaagaatgccaatggtttgggattcagtttcgtgcagatggagaaagagagctgcagccatctcaaaagtgatcttgtgaggattaagaggctctttccggggcatccagctgaggagaatggggccattgcagctggtgacattatcctggccgtgaatggaagtccacggaaagcctcatcttccaggtgccgggggtcatgggcaatgcagctctctgtgcaggctggccccagctttgcctcttactatcctgctgccgtggaggtgctgcatttactgagaggggccccacaggaagtcacgctcctcctttgccgaccccctccaggtgcgctgcctgagctggagcaggaatggcagggacaaaaatacaagtgtgcttgggccatcgttaatgaagcagaagtggaggaagttgtggaggtggcagggaccgtggagttctttggggatcagaggagcatgatgccaccatcctgcatgcagtgggaagccactgggctggcacggagggttaagcaggaaatgccctcgtctgttcttcagaggggccactcgggttactggtgcacagggactaaaggaggtcaagcagcagtcattcaggtcaaacatgatgtggcttggactcaggctgtagctgaagtgttaagaagcagccagatttgggatacatctgggaggcggagttcaggagactactttgggattagaaacaggcatgaggaaagagagcaatcaagctttggcatgaggaagccttggggaaatggtggtaccaccaatgcagggtga

SEQ ID NO: 6033 - DNA, 3264 bp, Homo sapiens
  SIMILAR (553)..(1680): 651254mologous to Mus musculus protein-tyrosine- phosphatase,accession number D64141,Smith-Waterman Score=1301.
atgagggccaaagtggatggagatgtggggacagcagggtggacagcggcaacagtcaatcagagaaggcctctgccatcagagaaggcctccttcttggaccccttctctcttggcataggaacatgtggctcctatgaattgagccagaggatttggtggagaaaagagttgtggaggaaagctcctctgtgcagcagaacagaagctacctgctcaggaagaggctgcgtgggacaagcagcgagagcccagcggcacaggccccggagtgtctgcatccttgcagaggtggaaaatgccaatgctattccattaacagatgaagaagccacatttaagcagatccgaagccaagataatgaggggcctggtggcagctgtgctgtcagggcatcctgtttcctctgggaaccatactcaggccgagtggcggagcaacaacatgcctcaatattgttgccattatccattgccataccatgctgcataacaagcaaccacaaaacacagtggctaaaagcaacaattatgaatttagctcatgattctgtttttgaaaataaagttaattcagagaaggtaaaactttctcttcggaatttcccacataatgattatgaggatgtttttgaagagccttcagaaagtggcagtgatcccagcatgtggacagccagaggccccttcagaagagacaggtggagcagtgaggatgaggaggctgcagggccatcacaggctctctcccctctactttctgatacgcgcaaaattgtttctgaaggagaactagatcagttggctcagattcggccattaatattcaattttcatgagcagacagccatcaaggattgtttgaaaatccttgaggaaaaaacagcagcgtatgatatcatgcaggaatttatggctttagaacttaagaatctgcctggtgagttctactctgggaatcaaccaagcaacagagaaaaaaacagataccgagatattcttccatatgattcaacacgcgttcctcttggaaaaagcaaggactacatcaatgctagttatattagaatagtcaattgtggagaagagtatttttatatcgctactcaaggaccactgctgagcaccatagatgacttttggcaaatggtgttggaaaataattcaaatgttattgccatgataaccagagagatggaaggtggaattatcaaatgctaccattactggcccatttctctgaagaagccattggaattgaaacacttccgtgtattcctggagaactaccagatacttcaatatttcatcattcgaatgtttcaagttgtggagaagtccacgggaactagtcactctgtaaaacagttgcagttcaccaagtggccagaccatggcactcctgcctcagcagatagcttcataaaatatattcgttatgcaaggaagagccaccttacaggacccatggttgttcactgcagtgccggcataggccggacaggggtgttcctatgtgtggatgtcgtgttctgtgccatcgtaaaggactgttcattcaacatcatggatatagtggcccaaatgagagaacaacgttctggcatggttcaaacgaaggagcagtatcacttttgttacgatattgtgcttgaagttcttcggaaacttctgactttggattaagaaagacttctgttgcctctcacttgaaattaccaagtgggtttgcacctcctcataaagaacatgtttgcactgtgctgaagggctttgctatgcatacaatctgctttcttggtttatcagtttattttctttctaaaagctccctgaagggcaatatcatttggcttggggtgatcagtgtttacttattgatcttgctagacaatatcaaaataacttcccacattttccagtgaaacagatgttacataaaacgattgcagcttggctatttggttgaagggattacagagcccaataaaggatttaaaatatattcattaagattttatttggaaaggtggctggagagagctgaggatttccaggactttgtaagttcttattctgggagaacataaggccaataatcatgacctcttccaggcatttttaagacagatgtctattcatgttctttagctagagcctgtactttttgctggcatttgaataacccagtttaaaaagagtccagttagggtggactaactttggacacaaattggcttccatttcctacattttcatactgctgccttcctacagctgctagaccaagacctgttggtctgggaagcatttcatggatagggagagctcctctcggtgaacagtccaaaactaaaatagatgtttatatagaaagcccaagaggagatttttgccatgcctgagttctttcctatcccaccctaacacttaacatattacttagtctgctttgttaaaagcaagtattacctttaacttgcctcttactctttgccctttagctaactaataaagtttgatatgggcattattatataattctgagtcattcatggtatctctcatgtttgatgtatttttcaaactaagatctatgatagtttttttttccagagttccatcaaatcatttatttcctttactttctcacctctgttgaaacatttagaaactggatttgggaacccaattttggaaaaccagattcatagtcatgaaaatggaaacttccatattctgtttttgaaaagatgtggccattattacagtaattttattataggactttgcctcgtacaattaatagtgatattttggacaaggagttctggtgacaagctatacctaattataagctataaaacaatagatatgagtgtttgtacagtttaactcaatggagatcagaatattctatgtattgagaaaatgtttaatatcaatctataaatcttgaatttctaagaggcttattttgttcttttggctgaatgagtatatttgaattggttgaataattaataattctcattgtaaaaataattatatgccaaaaatatatttgatgttaaatcaaatagatgattctgtttacattgttcatatgaataataatctgtgttaatttcattttgataattggcctttaatatttgtatctctaattttattttctctctgttactgtaaaataatagctataatgtataacaattttcttcagaagaattctatgctattattaaaataaaatatttactg

SEQ ID NO: 6034 - DNA, 1214 bp, Homo sapiens
  SIMILAR (45)..(794): 321254mologous to Mus musculus phosphoprotein phosphatase,accession number Z32740,Smith-Waterman Score=257.
catccccattttccagcgtggactgtggagtctgcagatttgagtaccatgataagtttgtgcaaatggccaatttgagtcctgcacaccaggcccggtctaagcctctcatttggattcagagattgtcatgctcagaaaacgagttgtttgtatccaggcttcagggtgctgcaggaggcctgctgagtacatcaatggataacttcaacgtggacggcagcaaggaggctggagcagaaggcatcgggcgcagcccctgcactggccgggagcagctgaagagtgcctgtgtgatccagaagccaatgacctgggactctctctctggaccacctgttcagagcatgcatgcaggctcaaagaataataggaggaagagctttatagctgaaccgggccgagaaattgtacgtgtgacactgaaacgtgacccacatcgtggttttgggtttgtcattaatgagggagagtattcaggccaagctgaccctggcatttttatatcttctattatacctggaggaccagcagaaaaagcaaaaacgatcaaaccaggagggcagatactagccctgaatcacatcagtctggagggcttcacattcaacatggctgttaggatgatccagaattcccctgacaacatagaattaattatttctcagtcaaaaggtgttggtggaaataacccagatgaagaaaagaatagcacagccaattctggggtctcctctacagacatcctgagcttcgggtaccagggaagtttgttgtcacacacacaagaccaggacagaaatactgaagaactagacatggctggggtgcagagcttagtgcccaggctgagacatcagctttcctttctgccgttaaagggtgctggttcttcttgtcctccatcacctccagaaatcagtgctggtgaaatctactttgtggaactggttaaagaagatgggacacttggattcagtgtaactgtaagagtttttaggagagctgtcttcaggcttgggctggaagggttggcaaaacctggtgttagagatgtgggatccaaaaatgacaagccttttcccataccagcgaccgcagaacacgtgcagtgcccactggagcccattgtgctctctgcttccaggaatcatctttctgctggtgctaagttctgtcttggatttgagcaccctcattttggcttgctttga

SEQ ID NO: 6035 - DNA, 5697 bp, Homo sapiens
  SIMILAR (1174)..(1503): 501254mologous to Mus musculus protein tyrosine phosphatase,accession number D83966,Smith-Waterman Score=277.
atgccccgcccagaccttgcccctgctctgttggtggcagttcttgtactcctgtacttgcttgtatctgcagcagctcctgctccttcctcggactccactccagaaaatgtgtgcccagtcgaaaccactaccaatttcatctgggagctttcttcaccccacaacacttccgcagttctgctggttgtcttccacaagggccccagctgcagaaactcagggttcaaaccattaaatgatgagaaagctagaagtgttttctatttgatcagtttttccccccgcctttgttcagtaaacgattatgagggaaatgactctgaagcagaagacctgaatttcagggaggctttgccttcatcaagtcaggaaaacacacctagatcaaaggtttttgaaaataaagttaattcagagaaggtaaaactttctcttcggaatttcccacataatgattatgaggatgtttttgaagagccttcagaaagtctaggtaaaggaggggagaaggtaaataagtggatggatctgaggcgactagtttgcaaggtaaaagtagtaggaggagatggagtttgtgatcagacattgggatttgggaattatttcacaagtgggccagtttcagggggctactccttgaacaccttcatgtgcagcaatgatgccaaagctaagacctccttgagtcccccggccagtgtctggattgtgcccttcccttctacatcttacttccagcaggtggagagtaagccatactttcacgttgaagattacatcccagcgagtctgatcgagaggatgaccgctctacgggtccaggttgaagtctcagagatgcaccggctcagctctgcactgtggggagaggatgctgagctgaagttcttgagggctggccactggatatttcagcaccagcgctcaataaatattgatttgtatgatgataaggatattgatgatgatgatgatgataatgatgatgatgacgatgatgacagggtctctccaaagttaaacgaaggaggcttagggaatgggataccagatttcagcaatacaacccttctgagagggcttcaaatgcctggagcaagaggtccttgctgtgggtcccagagacacatcaaccttctgatggggactggcgtcttcctggtgaagatgaaggtcactcagcagctcccagaatacggtgtgctggttcaccaagtattctcagagaagaggaggccagaagaggagatggccctggggatctgtgccaagggtgtcatagtctatgaagtgaaaaacaacagcagaattgcaatgttacggtttcagtggagagaaaccgggaagatttctacttatcaaaaaaagttcaccatcacaagcagtgtcactgggaagaagcacacatttgtcacagattcagccaagaccagtaaatacttactggacctctgctcagcccagcatgggtttaatgcacagatgggctctgggcagccttcccatgttttatttgcatccccattttccagcgtggactgtggagtctgcagatttgagtaccatgataagtttgtgcaaatggccaatttgagtcctgcacaccaggcccggtctaagcctctcatttggattcagagattgtcatgctcagaaaacgagttgtttgtatccaggcttcagggtgctgcaggaggcctgctgagtacatcaatggataacttcaacgtggacggcagcaaggaggctggagcagaaggcatcgggcgcagcccctgcactggccgggagcagctgaagagtgcctgtgtgatccagaagccaatgacctgggactctctctctggaccacctgttcagagcatgcatgcaggctcaaagaataataggaggaagagctttatagctgaaccgggccgagaaattgtacgtgtgacactgaaacgtgacccacatcgtggttttgggtttgtcattaatgagggagagtattcaggccaagctgaccctggcatttttatatcttctattatacctggaggaccagcagaaaaagcaaaaacgatcaaaccaggagggcagatactagccctgaatcacatcagtctggagggcttcacattcaacatggctgttaggatgatccagaattcccctgacaacatagaattaattatttctcagtcaaaaggtgttggtggaaataacccagatgaagaaaagaatagcacagccaattctggggtctcctctacagacatcctgagcttcgggtaccagggaagtttgttgtcacacacacaagaccaggacagaaatactgaagaactagacatggctggggtgcagagcttagtgcccaggctgagacatcagctttcctttctgccgttaaagttaatactcagccacaggccagtgtcaaaaggcttctccctggctttgcagtgtgggttgcacgtgctctgcaaactagcaggcatgagcctgtcctctgtgacgctggccagcgccctacaggtcaggggtgaagctctgtctgaggaggaaatctggtccctcctgttcctggccgctgagcagctcctggaagacctccgcaatgatctgtgggaggagctgtgcttgcagcccatgatgatggtagaatttgctggtgtgccctgccagaggtggtctgcagtcatggcccaggcaatagccaccggtggccaggtagggagcacgcactgcaggtcacacatgcttgggggcttcagtgcatacagcagaggctcctggagtgacaccttacacatgttctgtgagggcgatgggtcccagcatgggcctatggaggaggctgtgcacctgtgccttcagcgtcatcttctccctcttccccaccctggaggttctgatgaacagctacggagctcccagaagaccagctgccttggatcctggtctgtctctagagaactcaggcttgtgctaaattccagccccatcactggcttggtttcagattcctcggactatgtggtctgcccctggtcagccctgctttctgcagctggaagcctttctttccaaggccgtgtttctcatatagaggctgctcctttcaaggcccctgaactgctacagggacagagtgaggatgagcagcctgatgcatctcagcccctgcagctctgcgagcccctgcactccatcctgctgaccatgtgtgaagaccagcctcacaggcggtgcacgttgcagtcggttctggaagcttgtcgggttcatgagaaagaagtgtctgtctacccagcccctgctggtctccacatcagaaggctggttggcttggttctgggtaccatttctgagggacaagttggagagctgagagcaggattaatgagggccaaagtggatggagatgtggggacagcagggtggacagcggcaacagtcaatcagagaaggcctctgccatcagagaaggcctccttcttggaccccttctctcttggcataggaacatgtggctcctatgaattgagccagaggatttggtggagaaaagagttgtggaggaaagctcctctgtgcagcagaacagaagctacctgctcaggaagaggctgcgtgggacaagcagcgagagcccagcggcacaggccccggagtgtctgcatccttgcagaggtggaaaatgccaatgctattccattaacagatgaagaagccacatttaagcagatccgaagccaagataatgaggggcctggtggcagctgtgctgtcagggcatcctgtttcctctgggaaccatactcaggccgagtggcggagcaacaacatgcctcaatattgttgccattatccattgccataccatgctgcataacaagcaaccacaaaacacagtggctaaaagcaacaattatgaatttagctcatgattcttgcttcaccccttctcaacccctggccagcgctcttccaggagcagatccccaggaccagcaggcgggccggaggctcagctctggatctgtgcactcggcagcagacagctcatggccaacaactccttctcagaggggttttctgcaaagaaggagcaagggatattcacaaggtgaacagagacccttgcaggtacctgggaccctgctctgtgactttgccacaccagttgctggatccatgcaccatgccccacgcagggtgaaaaagcccaagctcccttcccatgactctgctgtcccagcccagacaatcagtggtcccccaaggggttacaccctttgcatggagatgcgtttggtacctggcttgggagctgggtggaccaaaaaagggaaatcctatttggctctcagggacctctgtgtggtcctgctgaacgggcagcacctggaggtaaaatgtgatgttgaatcaacagtgggagctgtcttcaatgccgtgacatcctttgccaacctcgaggaactcacctactttggcttggcgtatatgaaaagcaaagagttctttttcctggacagtgaaaccagattgtgcaaaatagctcctgaaggctggagagagcagcctcagaagacctccatgaataccttcacactcttcctgaggataaagttctttgtcagccactatgggctgctccactcattatccctggacatgctctccagcaatccttccccactccaagacctccagtctgtggagctgctgcttttcatcattacccccactccccttccctgtcacacatgtcctcgtccctgtgcaccagtaacccgagtggcccctctgaagaacggaggagggcatttcctgcttaaccctccgtgccagcccagtggcttcccactgcatgcaggatggtggcatcatgctcctctgatccccaaggccctccagggtccctgccacctccacaacttcctccacttctgcttcattaacgatggcccaagcacacttgtatttttgtccctcaaacatccaaaggctatgtcaaatgacctcttggagtctaagcatcaacaggatctgggacatcaagtcctttatgttgtcctagtgatggtgtcaccctcaggcacaataagtgatcacttttatccacatcctagagatgaggaatcatggggcctagagaggacaggcaactgcccaaggcccatgcagcacagcaggcttccctctctgatgcctgagcttccagagagcctggccctaaaagtttcacagccaaagtctaaacatgtaaacatctacaagaagacccaaatgtcagaagaggcagaatcagggagaggaaggagacctactgagagaactccggagaaccctgctgtgggcctgacttttcaaagtgcaaggaaccaaggtcagtggcctgcagcttccacaaagttgatgcaagatgctgggctgtgcatcacctttgtgcagcttgggttctgggaacctctcatctgtaatattgcagtaacctcctctccgctccctgccttcaccagtgtcacccacctgcctccttccacattgctcaagggaatggcaatatctgccaataccaatgccttttcttcagagagagaaagaatgactccaacaaatagctgttcatctcaattgccctttcctcccaacctgccctcatcttgggccagcaattttgcagcctccaccatctga

SEQ ID NO: 6036 - DNA, 483 bp, Homo sapiens
  SIMILAR (31)..(483): 531254mologous to Homo sapiens Human secreted protein clone pt332_1 protein sequence SEQ ID NO:12,accession number Y94903,Smith -Waterman Score=397.
tttcgtcgctgaccagcagcatggaggaccccgccgctcctgggaccgggggcccgcccgcaaatggcaatggcaacgtgtggcggcaaagggaagcaggcggcgcccaagggccgcgaagcgttccgaagccagcggcgggagtcagagggctctgtggactgtcccactctggagtttgagtatggagatgcagatgggcatgcagccgagttgtcagaattgtatagttacactgagaacctggaattcaccaataacaggaggtgctttgaagaagatttcaagactcaagtgcagggcaaggaatggctggagttggaagaagatgcccaaaaggcctatataatgggactcttggaccggctagaggtggtcagtagggaacggcggctgaaggcggcccgggctgttctctacctggcccaaggtacttttggggaatgtgattcagaggtcgatgtgctacactggtccaggtac

SEQ ID NO: 6037 - DNA, 2649 bp, Homo sapiens
  SIMILAR (235)..(1842): 601254mologous to Homo sapiens Human secreted protein clone pt332_1 protein sequence SEQ ID NO:12,accession number Y94903,Smith -Waterman Score=1634.
atggaggaccccgccgcgcctgggaccgggggcccgcccgcaaatggcaatggcaacggcggcggcaaagggaagcaggcggcgcccaagggccgcgaagcgttccgaagccagcggcgggagtcagaggtgaggagcccggaaagcttcggctggggcccggagacgcccgccggcgggaagcggcggctgaggactccttttacctgccagtacatcccctattaccacagtacccagggctctgtggactgtcccactctggagtttgagtatggagatgcagatgggcatgcagccgagttgtcagaattgtatagttacactgagaacctggaattcaccaataacaggaggtgctttgaagaagatttcaagactcaagtgcagggcaaggaatggctggagttggaagaagatgcccaaaaggcctatataatgggactcttggaccggctagaggtggtcagtagggaacggcggctgaaggtggcccgggctgttctctacctggcccaaggtacttttggggaatgtgattcagaggtcgatgtgctacactggtccaggtacaactgcttcctgctgtatcagatggggaccttctccaccttcctggagctactccacatggaaattgacaacagccaggcctgtagcagtgcccttcggaaaccagctgtctccatagctgatagcacagagctcagggtgctgctgagtgttatgtacctaatggtggaaaatattcgcctggagcgagagacagacccctgtgggtggagaacagcccgggagaccttccgcactgaattaagcttctccatgcataatgaggagccttttgcccttttactcttctccatggttaccaagttctgcagtggcctggctcctcacttccccataaagaaggtcctgctcctgctctggaaggtggtcatgtttaccctcggtggatttgagcatctgcagactctcaaagtacagaagcgggcagaattgggcctgcctccactggctgaagacagtatccaggtggtgaagagcatgcgtgctgcctccccgccctcttacactcttgacctgggagagtctcagctggcacccccaccctccaagctgcgaggccgccgtggctctcgaaggcaactcctcactaagcaggacagcctggacatctacaatgaaagggatctcttcaagactgaggagcccgccacagaggaggaagaggagtctgctggtgatggagaacgaaccttggatggagagctagacctgctagagcaggaccctctggtgccacctccaccctcacaggcacccctctctgctgagcgggtggcttttcccaagggcctgccctgggccccaaaggtcagacagaaggacattgagcacttcttggagatgagcaggaacaagttcatcggattcaccctggggcaggacacagatacattggttggattacccaggcccatccatgagagtgtgaagaccctaaagcagcacaagtatatctccatcgcagatgtgcagatcaagaatgaagaggagctggagaagtgccctatgtctttgggggaagaggtggtaccagagacgccatgtgaaatcctctaccagggaatgctgtacagccttccgcagtatatgctcagaactctggatctggagggtgacaccagtgccagcgactggctgcccagcatcactgttctccagagcatgaagctgggcatcgatgtgaacaggcacaaggagattattgtaaagagtatctctaccctgcttctgctactcctcaaacacttcaaactcaaccatatctaccagaagtcagaatcaagcttgctggtagaagagcaggtcctcagagtacagagaggcttctgtagggtctatgtccatggccctatcaaccagggtatttttccactttcatacattcgaagacatctttggatacagccaattcctgctgttgccatttacctaaagcctgtccttatctctgcatcttacagcatctcagtcctggattatccttgctgtaccatccaggatttgccggagcttactactgaaagtctggaagctggagacaacagccagttctgctggaggaacctcttttcctgcatcaacctcctgaggctgctcaataaactgaccaaatggaaacattcccggaccatgagtcatggagccttggagattaccctccagccctcagagcagtgtgcagccaaagttggtccctggaagctcgcacacaggcccaacccagaccccgggtcctgcctctatggctgcaggcagatctttgcattttacccagagccctccattcatgggctctactgcagtctctgtctccccagtgccgggggcgtcctgcgcgtcacctgtctgcctcttacattaggactatttatagtttggaatggtagtgagagtaacagtatgatgacccaggacaatgacaacactgatcaaattgacagagcatgtgacatgggctggttctttcatcgcagagtagccgcacaggtgaatttggttgcagcaggagaggcagcaatgaagaagaaaagctggatggaagggaatactggagaaagggctgtggcctggctgtga

SEQ ID NO: 6038 - DNA, 1319 bp, Homo sapiens
  SIMILAR (223)..(1287): 931254mologous to Homo sapiens guanine nucleotide-binding regulatory protein 1,accession number M60165,Smith-Waterman Score= 1694.
gacccctgccagctgccgcgagtctccgctgctggaatcttgttagcggctgtctttttggagggttctggtttcccgacatttttgtttccagcccaggagaggatatcgtgattttccccccttgagcccaggctctgctctctgggggggtggggggcgctccaagccggggagccgtgccagccgagtcgtgcgggctgtggcagggaaggggccaccatgggatgtactctgagcgcagaggagagagccgccctcgagcggagcaaggcgattgagaaaaacctcaaagaggatggcatcagcgccgccaaagacgtgaaattactcctgctcggggctggagaatcaggaaaaagcaccattgtgaagcagatgaagatcatccattgaagatggcttctccggagaagacgtgaaacagtacaagcctgttgtcttacagcaacactatccagtccctgggcagccatcgtccgggccatggacactttgggcatcgaatatggtgataaggagagaaaggctgacgccaagatggtgtgtgatgtggtgagtcggatggaagacaccgagcccttctctgcagagctgctttctgccatgatgcggctctggggcgactcaggaatccaagagtgcttcaaccggtcccgggagtatcaactcaacgactctgccaaatactacctggacagcctggatcggattggggccgccgactaccagcccactgagcaggacatcctccgaaccagggtcaaaaccactggcatcgtagaaacccacttcacattcaagaacctccacttcaggctgtttgacgtcggaggccagcgatctgaacgcaagaagtggatccattgcttcgaggacgtcacggccatcattttctgtgtcgcgctcagcggctatgaccaggtgctccacgaagacgaaaccacgaaccgcatgcacgagtctctcatgctcttcgactccatctgtaacaacaagttcttcatcgatacctccatcattctcttcctcaacaagaaagatctctttggcgagaagatcaagaagtcacctttgaccatctgctttcctgaatacacaggccccaatacctatgaagacgcagccgcctacatccaagcacaatttgaaagcaaaaaccgctcacccaacaaagaaatatattgtcacatgacttgtgccacagacacgaataacatccaggtggtgttcgacgccgtcaccgacatcatcattgccaacaacctccggggctgcggcttgtactgacctcttgtcctgtatagcaacctattttg

SEQ ID NO: 6039 - DNA, 1056 bp, Homo sapiens
  SIMILAR (1)..(204): 791254mologous to Homo sapiens guanine nucleotide-binding regulatory protein 1,accession number M60165,Smith-Waterman Score= 223.
atgggatgtactctgagcgcagaggagagagccgccctcgagcggagcaaggcgattgagaaaaacctcaaagaggatggcatcagcgccgccaaagacgtgaaattactcctgctcgctgacactcaccagtttttccccactgtctgtgtcccaacaggggctggagaatcaggaaaaagcaccattgtgaagcagatgaaggagacaggtctctgctgcctcacagtgaccccacaggcccctgtacgagctcctgctgctacagtgcctcttgtattgttttacggccactcgcttacatgtccgttttccccacttatgatccaggaacacctagtgccacagagcattggctgccagtatcaattctcaccaaagaaagtgcccacttgcaccctgaaggtcatgaaagataccaggaaatcaagctgcacgggtatgtttgctgattgggtgctcaataaatgtggacataggaaacgaaaagtccgaatctgtccttacgcccccaaggcgaattctggggcgcgcgggtttattccgacccactaccacatcgcgtttcctgagcggctggagagccacggagaaggcgggctacgggcgacaagatggagagccggcccgagagggacagaggccgcgctggcagcgagctggggggcccacctgaccgtcctgcgggcagcccggccccgcgctcccattgacaaggagccatttggatggggggagcatgggaaaggagtgggagaaaacaaggatgaaacctgcatttcatggcagctgacagatcgtgatgccatttcccgagtcagggaacatgagaagaggagtgggcttgggggacttgccacatccaaggtgcctggagacacccaagtgtcaatgcaagggacctgccaaggctccagacagcatccctatctgccactgacacctcaagcaccatggaatctgctggatcatgtggcccaagaagcagagcagcttgtgcagcagcctggatctgttgcagagccttcccctgttctgggccccacgcaaaactag

SEQ ID NO: 6040 - DNA, 395 bp, Homo sapiens
  SIMILAR (115)..(222): 911254mologous to Homo sapiens phosphofructokinase- P,accession number D21863,Smith-Waterman Score=165.
catctatgatggctttgacggcttcgccaagggccagatcaaagaaatcggctggacagatgtcgggggctggaccggccaaggaggctccattcttgggacaaaacgcgttctcccggggaagtaatggaagagatcgccacacagatgcgcacgcacagcatcaacgcgctgctgatcatcggtggattcgaggcctacctgggactcctggagctgtctgtttttgtaacacttaagttattttatcagcactttatgcacgtattattaacattaatacctaatcggcgagtgcccatctgccccaccagccccagtgcgtgctgtctgtggagtgtgtctcatgctttcagatgtgcatatgagcagaattaaacatttgcctacaactc

SEQ ID NO: 6041 - DNA, 594 bp, Homo sapiens
  SIMILAR (46)..(162): 791254mologous to Homo sapiens phosphofructokinase- P,accession number D21863,Smith-Waterman Score=151.
atggcggtgctggaagggacaggattaagcctcatgctcttggtccaagcaggtctatgcccctcatcccagagcgttctcccggggaagtacttggaagagatcgccacacagatgcgcacgcacagcatcaacgcgctgctgatcatcggtggattcgagccccgtggtgaagacctgggcaacgtcaggatcttggtcaagttctttctcgctctgaacttcaatttcctcatctgtaagatgagaaaaatactcctacttccagctatctctaaggttattcaagcatgtcagaccctcaggaagacgcctgacaaacagcaggtgcacagtagtggtccctcagctttaaaaacaaagccacacaagggtggtttcaagacagcaagaccgtcttcaccacgggctgaagacggcgtagctcggccgtcagtaaacagggctctggagaagccagctgccatgttcacatatcggtccctctcccttcagggtccacagagggaccgtcagcggctttctcttctctgtcccagctccccagcagccacagcattcgccagggtgacctcgataatagaggaggaatga

SEQ ID NO: 6042 - DNA, 2593 bp, Homo sapiens
  SIMILAR (34)..(1533): 1001254mologous to Homo sapiens platelet-type phosphofructokinase,accession number D25328,Smith-Waterman Score= 2570.
cccggacgtgcggctcccctcggcctcctcgccatggacgcggacgactcccgggcccccaagggctccttgcggaagttcctggagcacctctccggggccggcaaggccatcggcgtgctgaccagcggcggggatgctcaaggtatgaacgctgccgtccgtgccgtggtgcgcatgggtatctacgtgggggccaaggtgtacttcatctacgagggctaccagggcatggtggacggaggctcaaacatcgcagaggccgactgggagagtgtctccagcatcctgcaagtgggcgggacgatcattggcagtgcgcggtgccaggccttccgcacgcgggaaggccgcctgaaggctgcttgcaacctgctgcagcgcggcatcaccaacctgtgtgtgatcggcggggacgggagcctcaccggggccaacctcttccggaaggagtggagtgggctgctggaggagctggccaggaacggccagatcgataaggaggccgtgcagaagtacgcctacctcaacgtggtgggcatggtgggctccatcgacaatgatttctgcggcaccgacatgaccatcggcacggactccgccctgcacaggatcatcgaggtcgtcgacgccatcatgaccacggcccagagccaccagaggaccttcgttctggaggtgatgggacgacactgtgggtacctggccctggtgagtgccttggcctgcggtgcggactgggtgttccttccagaatctccaccagaggaaggctgggaggagcagatgtgtgtcaaactctcggagaaccgtgcccggaaaaaaaggctgaatattattattgtggctgaaggagcaattgatacccaaaataaacccatcacctctgagaaaatcaaagagcttgtcgtcacgcagctgggctatgacacacgtgtgaccatcctcgggcacgtgcagagaggagggaccccttcggcattcgacaggatcttggccagccgcatgggagtggaggcagtcatcgccttgctagaggccaccccggacaccccagcttgcgtcgtgtcactgaacgggaaccacgccgtgcgcctgccgctgatggagtgcgtgcagatgactcaggatgtgcagaaggcgatggacgagaggagatttcaagatgcggttcgactccgagggaggagctttgcgggcaacctgaacacctacaagcgacttgccatcaagctgccggatgatcagatcccaaagaccaattgcaacgtagctgtcatcaacgtgggggcacccgcggctgggatgaacgcggccgtacgctcagctgtgcgcgtgggcattgccgacggccacaggatgctcgccatctatgatggctttgacggcttcgccaagggccagatcaaagaaatcggctggacagatgtcgggggctggaccggccaaggaggctccattcttgggacaaaacgcgttctcccggggaagtacttggaagagatcgccacacagatgcgcacgcacagcattcaacgcgctgctgatcatcggtgggtttcgaggcctacctgggactcctggagctgtcagccgcccgggagaagcacgaggagttctgtgtccccatggtcatggttcccgctactgtgtccaacaatgtgccgggttccgatttcagcatcggggcagacaccgccctgaacactatcaccgacacctgcgaccgcatcaagcagtccgccagcggaaccaagcggcgcgtgttcatcatcgagaccatgggcggctactgtggctacctggccaacatgggggggctcgcggccggagctgatgccgcatacattttcgaagagcccttcgacatcagggatctgcagtccaacgtggagcacctgacggagaaaatgaagaccaccatccagagaggccttgtgctcagaaatgagagctgcagtgaaaactacaccaccgacttcatttaccagctgtattcagaagagggcaaaggcgtgtttgactgcaggaagaacgtgctgggtcacatgcagcagggtggggcaccctctccatttgatagaaactttggaaccaaaatctctgccagagctatggagtggatcactgcaaaactcaaggaggcccggggcagaggaaaaaaatttaccaccgatgattccatttgtgtgctgggaataagcaaaagaaacgttatttttcaacctgtggcagagctgaagaagcaaacggattttgagcacaggattcccaaagaacagtggtggctcaagctacggcccctcatgaaaatcctggccaagtacaaggccagctatgacgtgtcggactcaggccagctggaacatgtgcagccctggagtgtctgacccagtcccgcctgcatgtgcctgcagccaccgtggactgtctgtttttgtaacacttaagttattttatcagcactttatgcacgtattattgacattaatacctaatcggcgagtgcccatctgccccaccagctccagtgcgtgctgtctgtggagtgtgtctcatgctttcagatgtgcatatgagcagaattaattaa

SEQ ID NO: 6043 - DNA, 462 bp, Homo sapiens
  SIMILAR (67)..(396): 341254mologous to Homo sapiens zinc metalloprotease ADAMTS6,accession number AF140674,Smith-Waterman Score=173.
atgcagccgttagaagactctctggccgctagagtgctgcagtcggtaggactgggacgatgtgggccatcgcatggagggaagttctgtgagggctccactcgcactctgaagctctgcaacagtcagaaatgtccccgggacagtgttgacttccgtgctgctcagtgtgccgagcacaacagcagacgattcagagggcggcactacaagtggaagccttacactcaagtagaagcaatctgtaggccggataagatgcgtcagcatcgcatccggcagggtttattattgttttttcgctctagaaggcaaaaaaccttccagcacaatcagtgccgcaccgacacagatggcagtatcggcaaggttgaaggtgcatgccctgaggtgggcagatcacgacgaggtcaagagatcgagaccatcctggccaacacggtgaaaccctgtctctactaa

SEQ ID NO: 6044 - DNA, 5976 bp, Homo sapiens; identical to SEQ ID NO: 5415
  SIMILAR (1957)..(5781): 971254mologous to Homo sapiens putative p150,accession number U93563,Smith-Waterman Score=6519.
  misc_feature (1)...(5976): n = a,t,c or g

SEQ ID NO: 6045 - DNA, 3657 bp, Homo sapiens
  SIMILAR (163)..(1932): 951254mologous to Homo sapiens putative p150,accession number U93563,Smith-Waterman Score=2945.
atggataaattcctcgacacatacactctcccaagactaaaccaggaagaagttgaatctctgaatagaccaataacaggagctgaaattgtggcaataatcaatagcttaccaactaaaaagagtccaggaccagatggattcacagccaaattctaccagagtaaaatactggcaaaccaaatccagcagcacatcaaaaagcttacccaccaggatcaagtggacttcatccctgggatgcaaggctggttcaatatacgcaaatcaataaatgtaatccagcatataaacagaagcaaagacaaaaaccacatgattatctcaatagatgcagaaaaggcctttgacaaaattcaacaacacttcatgctaaaaactctcaataaattacgtattgatgggacgtatctcaaaataataagagctatctatgacaaacccacagccaatatcatactgaatgggcaaaaactggaagcattccctttgaaaactggcacaagacagggatgctctctctcaccactcctattcaacatagtgttggaagttctggccagggcaattaggcaggagaaggaaataaagggtattcaattaggaaaagaggaagtcaaattgtccctgtttgcagatgacatgattgtatatctagaaaaccccattgtctcagcccaaaatctccttaagctgataagcaacttcagcaaagtctcaggatacaaaatcaatgtacaaaaatcacaagcattcttatacaccaacaacagacaaacagagagccaaatcatgagtgaactcccattcacaattgcttcaaagagaataaaatacctaggaatccaacttacaagggatgtgaaggacctcttcaaggagaactacaaaccactgctcaaggaaataaaagaggatacaaacaaatggaagaacatcccatgctcatgggtaggaagaatcaatatcgtgaaaatggccatactgcccaagataatttacagattcaatgccatccccatcaaactaccaatgactttcttcacagaattggaaaaaactactttaaagttcatatggaaccaaaaaagagcccgcattgccaaggcaatcctaagccaaaagaacaaagctggaggcatcacgctacctgacttcaaactatactacaaggctacagtaaccaaaacagcatggtactggtaccaaaacagagatatagatcaatggaacagaacagagccctcagaaataacgctgcatatctacaactttctgatctttgacaaacctgagaaaaacgagcaatggggaaaggattccctatttaataaatggtgctgggaaaactggctagccatatgtagaaagctgaaactggatcccttccttacaccttatacaaaaatcaattcaagatggattaaagacttaaacgttagacctaaaaccataaaaaccctagaagaaaacctaggcattaccattcaggacataggcatgggcaaggacttcatgtctaaaacaccaaaagcaatggcaacaaaagccaaaattgacaaatgggatctaattaaactaaagaacttctgcacagcaaaagaaactaccatcagagtgaacaggcaacctacaaaatgggagaaaattttcacaacctactcatctgacaaagggctaatatccagaatctacaatgaactccaacaaatttacaagaaaaaaacaaacaaccccatcaaaaagtgggcaaaggacatgaacagacacttctcaaaagaagacatttatgcagccaaaaaacacatgaaaaaatgctcaccatcactggccatcagagaaatgcaaatcaaaaccacaatgagataccatgtcacaccagttagaatggcaaccattaaaaagtcaggaaacaacagctggaggtcatgcctgcaaccatgggcagcacattcaacaacttaccggcacccaggaaccatggagaaaaaaaccagcagcggggacacccccactgtcttcccatccaccctgggtcgcaagaaaagcacaagtgctcaactaactgaactgacagctcttacacttgagttaagcaagggaaaggtaagaaacgccccttcaaagttagatctaagcccttttgagatgctgtatggatggccttttctcaccaatgatttcttattagaccaagagacctctgaattgggcaagcatgtaaactctctggctcgttttcaacaggaattaactcaagtagcagaagcccaaccccaagaagtaggaccacctttatttaacccaggatatttggtattgcccaagcagggagggccttacaccattctcctttcaatgccctcagcagtaaaagttacaggtattgattcctggatacatcatgctcaagttaaagcctggaaaactgagagagcaatccccggcagcccagcggaatgtcttggataccaatgtgaggaaataagagacctgaagctgaaaatcaaaagagataagaaaatgagcaagggctactcatcctactcagttccagtcatccattcagtcatccagtcatccagtctttgtacaactggtacacagaagtcaagaattgaggtttgggaacctctgcctagatttccgaagatgtatggatatgcctggattcctagacaaaagtttgctgcaggggcagggccctcatggagaacctctgttaaggcagtgcagaagggaaatgtggggtcgaagccccaccacagagaccctactggggcactgcctagtggagctgtgagaagaggaccaccatcctccagacctcagaatggtagatccactggcagcttgcaccgtgtgcctggaaaagccagacctcaacaccagcctgtgaaagcagccaggagggaggccgtgccctacaaagccacaggggtagagctgcccaagaccatgggaacccacctattgcatcagtgtgacctggatctacctgccaccttctctctcagccttcacatcaagtacctcaaacatcgacattcttattccccacatctccacctcctattcaccgtcatgggcccccatgccaggcaaatgattcgcatctctggcatagatgttgacaccaggaacctgtataagctgaatttgaaagtaaagtggctggaggttttggatcaagaggaacctgaatacagtagaacaacctccaggaagaagcagggattccctaacagcgatgaagaagatgtattgtggatggagaagcagctgtcctgcttctgtgacaagtaccaaaaatggataccaaccagacagctgaagggacagctcagttacgttaaggaagcagatctgattccagatgtaatgcccccacaagctttgttccatgatgatgatgagatggaaggcaatggagccatagacgcagggatggagtatgtctacaacattgacacgttgcttagatggtctgatggtgaggaggaaggagaaggaggagaagaaggaagaggaggaggaagaggaggagaaggaggaggaaagagggaggagggagaaggaaaaaaagaagaagaacaaggaggatggggaggaggacaggaagtggaagaagaaggaggaggaggagggggaaattaa

SEQ ID NO: 6046 - DNA, 5130 bp, Homo sapiens; identical to SEQ ID NO: 2332
  SIMILAR (2614)..(4473): 941254mologous to Homo sapiens putative p150,accession number U93572,Smith-Waterman Score=3044.

SEQ ID NO: 6047 - DNA, 3666 bp, Homo sapiens; identical to SEQ ID NO: 2174
  SIMILAR (736)..(3006): 961254mologous to Homo sapiens putative p150,accession number U93563,Smith-Waterman Score=3773.

SEQ ID NO: 6048 - DNA, 3213 bp, Homo sapiens; identical to SEQ ID NO: 2322
  SIMILAR (1)..(1821): 851254mologous to Homo sapiens putative p150,accession number U93563,Smith-Waterman Score=2589.

SEQ ID NO: 6049 - DNA, 5076 bp, Homo sapiens; identical to SEQ ID NO: 3974
  SIMILAR (1774)..(4986): 911254mologous to Homo sapiens putative p150,accession number U93563,Smith-Waterman Score=5076.

SEQ ID NO: 6050 - DNA, 3492 bp, Homo sapiens
  SIMILAR (1039)..(2673): 941254mologous to Homo sapiens putative p150,accession number U93570,Smith-Waterman Score=2688.
atgggagactttaacaccccactgtcaacattagacagatcaacgagacagaaagtcaacaaggatacccaggaattgaactcagctctgcaccaagcggacctaacagacatctacagaactctccaccccaaatcaacagaatatacatttttttcagcaccacaccacacctattccaaaattgaccacatagttggaagtaaagctctcctcagcaaatggaaaagaacagaaattataacaaactatctctcagaccacagtgcaatcaaactagaactcaggattaagaatcccactcaaagccgctccactacatggaaactgaacaacctgctcctgaatgactactgggtacataataaaatgaaggcagaaataaagatgttctttgaaaccaacgagaacaaagacacaacataccagaatctctgggatgcattcaaagcagtgtgtagagggaaatttataccactaaatgcccacaagagaaagcaggaaagatccaaaattgacaccctaacatcacaattaaaagaactagaaaagcaagagcaaacacattcaaaagctagcagaaggcaagaaataactaaaatcagagcagaactgaaggaaatagagacacaaaaaacccttcaaaaaatcaatgaatccaggagctggttttttgaaaggatcaacaaaactgatagaccgctagcaagactaataaagaaaaaaagagagaagaatcaaatagacacaataaaaaatgataaaggggatatcaccaccgatcccacagaaatacaaactaccatcagagaatactacaaacacctctacgcaaataaactagaaaatctagaagaaatggataaattcctggacacatacactctcccaagactaaaccaggaagaagttgaatctctgaatagaccaataacaggagctgaaattgtggcaataatcaatagcttaccaaccaaaaagggtccaggaccagatggattcacagccgaattctaccagaggtacaaggaggaactgcatataaacagagccaaagacaaaaaccacatgattatctcaatagatgcagaaaaagcctttgacaaaattcaacaacccttcatgctaaaaactctccataaattaggtattgatgggacatatttcaaaataataagacctatctatcacaaacccacagccaatatcatactgaatgggcaaaaactggaagcattccctttgaaaactggcacaagacagggatgccctctctcaccactcctattcaacatagtgttggaagttctggccagggcaattaggcaggagaaggaaataaagggtattcagtcaggaaaagaggaagtcaaattgtccctgtttgcagatgacgtgattgtatatctagaaaaccccattgtctcagcccaaaatctccttaagctgataagcaacttcagcaaagtctcaggatataaaatcaatgtacaaaaatcacaagcattcttatacaccaacaacagacaaacagagagccaaatcaggagtgaactcccattcacaattgcttcaaagagaataaaatacctaggaatccaacttacaagggatgtgaaggacctctacaaggagaacgacaaaccactgctcaaggaaataaaagaggatacaaacaaatggaagaacattccatgttcatgggtaggaagaatcaatatcgtgaaaatggccatactgcccaaggtcatttacagattcaatgccatccccatcaagctaccaatgactttcttcacagaattggaaaaaactactttaaagttcatatggaaccaaaaaagagcccgcatcaccaaggcaatcctaagccaaaagaacaaagctggaggcatcacactacctgactacaaactatactacaaggctacagtaaccaaaacagcatggtactggtaccaaaacagagatatagatcaatggaacagaatagagccctcagaaaaaacgccgcatacctacaactatctgaactttgacaaacctgagaaaaacaagcaatggggaaaggattccctatttaataaatggtgctgggaaaactggctagccatatgtaggaagctgaaactggatcccttccttacatcttatacaaaaatcaattcaagatggattaaagatttaaacgttagacctaaaaccataaaaaccctagaagaaaacctaggcattaccattcaggacataggcatgggcaaggacttcatgtccaaaacaccaaaagcaatggcaacaaaagacaaaattgacaaatgggatctaattaaactgaagagcttctgcacagcaaaagaaactaccatcagagtgaacaggcaacctacaaaatgggagaacattttcgcaacctactcatctgacaaagggctaatatccagaatctacaatgaactcaaacaaatttacaagaaaaaaacaaacaaccccatcaaaaagtgggcgaaggacatgaacagacacttctcaaaagaagacatttatgcagccaaaaaacacatgaaaacatgctcatcatcactggccatcagagaaatgcaaatcaaaaccactatgagataccatctcacaccagttagaatggcaatcattaaaaagtcaggaaacaacagagctggctctcaactcactcgccaatttcagagtacagcggtggggtgtggtgtatgcatcggtgcacggacagacagaaccatgagcagcaactaccatgggtcatcggggaagggaaaagtgtgctcccaggtaagcagggtcaaaccacccccaagagcctcacttgtccctggtggctctgccactgaactgactcttaaaaccggaaacgggccagggggccagcacgacggtggcagtgatctcctggccatcaatttgtcctccatccatgtgcttcagcgccttctcagcttcatctggattctcaaactctacgcacgcatagcctttggacagatggggatgcatcctttccacgggcatgtcaatcattttaattttcccataggtggaaaatatctccatgatgtgatcctttgtcacattcctggtggtttggatttggagcgggagcgcctcctgttgtcgtgtctgcgccgagaaggacttggagagccagaagagctgctagagctggagctgcgggaggtgctggagcttcctgagcggctggaggctgaggaagagctggagccactgcttgagccagtgctggtgctggagcctgagctggaagtcgagctggaccgagacctggtactgctgctaccactggaagcgctgtgcctctttcgcgttttgtcccggccgcgatccttctcactcgactccttggtggcccctttatcttttgagcgatccttggacttctcatctgagcggtctttgcgtttggatcacctgcagcagcactgtccagtagaaaccgtgtga

SEQ ID NO: 6051 - DNA, 3235 bp, Homo sapiens; identical to SEQ ID NO: 2323
  SIMILAR (442)..(2988): 931254mologous to Homo sapiens putative p150,accession number U93563,Smith-Waterman Score=4078.

SEQ ID NO: 6052 - DNA, 3834 bp, Homo sapiens
  SIMILAR (544)..(2838): 871254mologous to Homo sapiens putative p150,accession number U93574,Smith-Waterman Score=3461.
atggctactctgatccccctactgtttcacaagcatcctcatctcacacaaagatatcaattcaacgtcagaggtggctgcccgacgagcaccagtgccattgctactctggatcctagaactgcagtgtttccactcatgtctgtttttcagacctcagctccatggccattttggggtttcactcatcagacaccagtgccacagccactgaaagtgaaaatccacagttctgcagacaccgctgctgatatccaggcaaacagggtctggagtggacctccagcaaactccaagagacctgcagctgaggaaggaaaactaacaaacagaaaggacatccacaccaaaaacccatctgtacgtcaccatcatcaaagaccaaaagtagataaaaccacaaagacggggaaaaaacagaggagaaaaactggaaactctaaaaagcagagcgcctgtcctcctccaaaggaacgcagttcctcaacagcaacggaacaaagctggacggagaatgactttgacaagttgagagaaggcttcagacgatcaaactactccaagctacaggacgaaattcaaaccaaaggcaaagaagttgaaaacttggaaaaaagtttagacgaatgtataactagaataaccaatacagagaagggcttaaagaagctcgagaactacgtgaagaatgaagaaacctcaggagccaatgcgatcaactggaagaaagggatcaacaaaattgatagaccactagcaagactaataaagagaaaaagagagaagaatcaaatagacgcaataaaaattgataaaggggatatcaccaccgatcccacagaaatacaaactaccatcagagaatactacaaacacctctatgcaaataaactagaaaatctagaagaaatggataaattcctcgacacatacactctcccaagactaaaccaggaagaagttgaatctctgaatagaccaataacaggagctgaaattgtggcaataatcaatagcttaccaaccaaaaagagtccaggaccagatggattcacagctgaattctaccagaggtacaaggaggaactggtaccattccttctgaaactattccaatcaatagaaaaagagggaatcctccctaactcattttatgaggccagcatcatcctgataccaaagctgggcagagacacaaccaaaaaagagaattttagaccaatatccttgaggaacattgatgcaaaaatcctcaataaaatactggcaaaccgaatccagcagcacatcaaaaagcttatccatcatgatcgagtgggcttcatccctgggatgcaaggctggttcaacatacgcaaatcaataaatgtaatccagcatataaacagaaccaaagacaaaaaccacatgattatctcaatagatgcagaaaaggcctttgacaacattcaacaacccttcatgctaaaaactctcaataaattaggaatggatgggacatatctcaaaataagaagagctatctatgacaaacccacagccaatatcatactgaatgggcaaaaactggaagcattccctttgataactggcacaagacagggatgccctctctcaccactgctatacaacatagtgttggaagttctggccagggcaattaggcagaagaaggaaataaagggtattcaattaggaaaagaggaagtcaaattgtccctgtttgcagacgacatgactgtatatctagaaaaccccatcatatcagcccaaaatctccttcagctgataagcaacttcagcaaagtctcaggatataaaatcaatgtacaaaaatcacaagcattcttatacaccaataacagacaaacagagagccaaatcaagagggaactcccattcacaattgcttcaaagagaataaaatacttaggaatccaacttacaagggatgtgaaggacctcttcaaggaaaactacaaaccactgctcaatgaaataaaagaggatacaaacaaatggaagaacattccatgctcatgggtaggaagaatcaatattgtgaaaatggccatactgcccaaggtaatttatagattcaatgccatccccatcaagctaccaatgactttcttcacagaattggaaaaaactactttaacgctcatatggaaccaaaaaagagcccacatcgtcaagtcaatcctaagccaaaagaacaaagctggaggcatcacgctaccagacttcaaactatactacaaggctacagtaaccaaaacagcatggtactggtaccaaaacagagatatagatcagtggaacagaacagagccctcagaaataatgccacatatctacaactatctgatctttgacaaacctgagaaaaacgagcaatggggaaaagattccctatttaataaatggtgctgggaaaactggctagccatatgtagaaagctcaaactggatcccttccttacaccttatacaaaaattaattcaagatggattaaaggcttaaatgttagacctgaaaccataaaaaccctagaagaaaacctaggcattaccattcaggacataggcatgggcaaggacttcatgtctaaaacaccaaaaacaatggcaacaaaagccaaaattgacagatgggatctcattaaactaaagaacttctgcacagcaaaagaaactaccatcagagtgaacaggcaaactacaaaatgggagaaaattttcacaacctactcatctgaaaaagggctaatatccagaatctacaatgaactcaaacaaatttacaagaagaaacaaacaaccccaacaaaaagaggtattccaaaagaaagcattattgtaataggagatgacagctccatgcatgttaatgcccctgaaggccttccagtgggacaagatttggaggttgaagatggtgatattgattatcctgattctgatggcagctcctcaccagctatggaacaaagctggacagagaaggactttgatgaattgacagaagtaggcttcagaagaataaacagtgtggagaagatgttaaatgacctgatggagctgaaaaccatggcacaagaactttgtgacacatgcacaagtttcagtagcagatttgatcaagtggaagaaaggatatcagtgattgaatatcaaattaatgaaataaagcaagaggaggagtttagagaaaaaagagtaaagagagacaaacaaagcctccaagaaatatgggacaatgtgaaaagaccaaatctatgtttgattggtatacctgaaagtgatggggagaatggaaccaagttggaaaacacttttcaggatattatccaggagaacttccccaacctagcaaggcaggccaacattcaaattcaggaaatacagaaaataccacaaagatactccttgagaagagcaaccccaagacacataattgtcagattcactaaggttgaaatgaaggaaaaaatgttaaaagcagccagagagaaaggtcaggttacccacaaagggaatcccatcagactaacagtggatctctcagcagaaaccttagaagccagaagagagtggggaccaatattcaacattcttaaagaaaagaattttccacccggaatctcatatccagccaaactaagcttcataagcaaaggagaaataaaatactttacagacaagcaaatactgagagattttgtcaccaccaggcctgccttacaagacctcctgaaggaagcactaaacacggaaagtaacaactggtaccagccactgcaaagcatgccaaattgtaaagacctttga

SEQ ID NO: 6053 - DNA, 3300 bp, Homo sapiens; identical to SEQ ID NO: 3975
  SIMILAR (277)..(2088): 971254mologous to Homo sapiens putative p150,accession number U93563,Smith-Waterman Score=3088.

SEQ ID NO: 6054 - DNA, 4989 bp, Homo sapiens
  SIMILAR (85)..(2142): 971254mologous to Homo sapiens putative p150,accession number U93563,Smith-Waterman Score=3485.
atgaaggcagaaataaagatgttctttgaaaccaacgagaacaaagacacaacaaaccagaatctctgggacgcattcaaagcagaagaagttgaatctctgaatagaccaataacaggagctgaaattggggcaataatcaatagtttaccaaccaaaaagagtccaggaccagatggattcacagccgaattctaccagaggtacaaggaggaactggtaccattccttctgaaactattccaatcaatagaaaaagaggaaatcctccctaactcattttatgaggccagcatcattctgataccaaagccgggcagagacacaaccaaaaaagagaattttagaccaatatccttgatgaacatcgatgcaaaaatcctcaataaaatactggcaaaccgaatccagcagcacatcaaaaagcttatccaccatgatcaagtgggcttcttccctgggatgcaaggctggttcaatatacgcaaatcaataaatgtaatccagcatataaacagagccaaagacaaaaaccacatgattatctcaatagatgcagaaaaagcctttgacaaaattcaacaacccttcatgctaaaaactctcaataaattaggtattgatgggacgtatttcaaaataataagagctatctatgacaaacccacagccaatatcatactgaatgggcaaaaactggaagcattccctttgaaaactggcacaagacagggatgccctctctcaccgctcctattcaacatattgttggaagttctggccagggcaatcaggcaggagaaggaaataaagggtattcaattaggaaaagaggaagtcaaattgtccctgtttgcagacgacatgattgtttatctagaaaaccccatcgtctcagcccaaaatctccttaagctgataagcaacttcagcaaagtctcaggatacaaaatcaatgtacaaaaatcacaagcattcttatacaccagcaacagacaaacagagagccaaatcatgagtgaactcccattcacaattgcttcaaagagaataaaatacctaggaatccaacttacaagggatgtgaaggacctcttcaaggagaactacaaaccactgctcaaggaaataaaagaggatacaaacaaatggaagaacattccatgctcatgggtaggaagaatcaatatcgtgaaaatggccatactgcccaaggtaatttacagattcaatgccatccccatcaagctaccaatgactttcttcacagaattggaaaaaactactttaaagttcatatggaaccaaaaaagagcccacatcaccaagtcaatcctaagccaaaagaacaaagctggaggcatcacactacctgacttcaaactatactacaaggctacagtaaccaaaacagcatggtactgctaccaaaacagagatatagatcaatggaacagaacagagccctcagaaataacaccgcatacctacaactatctgatctttgacaaacctgagaaaaacaagcaatggggaaaggattccctatttaataaatggtgctgggaaaactggctagccatatggagaaagctgaaactggatcccttccttacaccttatacaaaaatcaattcaagatggattaaagatttaaacgttagacctaaaaccataaaaaccctagaagaaaacctaggcattaccattcaggacataggcatgggcaaggacttcatgtccagaacaccaaaagcaatggcaaccaaagccaaaattgacaaatgggatctaattaaactaaagagcttctgcacagcaaaagaaactaccatcagagtgaacaggcaacctacaacatgggagaaaattttcgcaacctactcatctgacaaagggctaatatccagaatctacaatgaactcaaacaaatttacaagaaaaaaacaaacaaccccatcaaaaagtgggagaaggacatgaacagacacttctcaaaagaagacatttatgcagccaaaaaacacatgaaaaaatgctcatcatcactggccatcagagaaatgcaaatcaaaaccactatgagatatcatctcacaccagttagaatggcaatcattaaaaagtcaggaaacaacagacttcttggaagtgccctagaatcagcaggtccaaatcaaactcagctggccgtgggtcagccattgcagccccacctgccacgggctccaggaagagcagtcatcagtatggagaaggccggactctgctcagaagccactgagcaggtgctccatagactcaccagctggagcggggtcacatctcggaggcaccgtcagcaccaggagggcagccaagcaagggtatggcatttccgagcctctgcggtcaagggtatcgcatttccgagcctctgcggtcaagggtatggcgtttccgagcctctgcggtcaagggtatggcgtttccgagcctctgcagtcaagagcccagagatgggttgtcggggcagctgtgggggcatcccagatgtgggtgccaacatgcgtgatgacctgacaccagtgtgtgatgacctggcaccagtgcttgatgacctgacaccagtgcatcatgacctgacaccagcgcgcaatgacctgacaccagtgcacgatgacctggcaccagtgcgtgatgacctgacaccagtgcgtcatgacctgacaccagtgcgtgatgacctggcaccagtgcgcgatgacctgacaccagtgtgcgatgacctggcaccagtgtgcgatgacgtggccccagtgtgccatgacctggcaccagtgcgcgatgacctgacaccagtgtgcgatgacctggcaccagtgcacaatgaccttgcagcaatccaaacctacctgcaagctgcaagcgatgtgcctgtgggacacagcctggaccccgctgcgaactacaactccccgaaattccgctcccggaaccagagctacatgagggccgtcagcaccctgagccaggccagctgcgtgagccaggtgagcgaggcggagatcaatgggcaattcgagtccgtgtgcgagtccgtcttcagtgaagttgaatctcaggccatggatgccctcgacctcccgggatgtttccgaacaaggagtcacagctaccttcgagccattcaagccggctactcccaagatgacgaatgtattcccatgatgacaccctctgacatcacctccaccatcaggtcaacagcagaaggcgagcgtgatgcagataaatcgtgcatctgtatcaggaactgcatatactggaattacaacatgaatgctgggatgatctcccaggtgatgtttgccattggtggtggaggccgaataatgccgcacagttctctgtatgatagtgtgacggtggagttcatgtggcaacttgactgggccatggagtgcccaaatatctggttaaacattattgtggggtgccctgagcccaaccgaatgaagcgctggccccgtcagcagccatggtcacgtccacttggaagttccaaatcccgaggttcctgcagagagcagctctctgctgtggcaccagctgctgtgttcttcagaaaatacaagttctcgccgtgtgatgtgatgttcaaaccttttcaatggaaacaggaagtgtctcgaacagcagagcagctgacatcacttcattttactgtctacatgttaaatgctgctgtacagccggtggtacagaatgccccatgcaactcgagttcgggaggagactggctggtgacggccacagctgtctcatatacaaattacaagaaaacgcccccaccggtgccccctcggaccacctccaagcctctgatctcggtgacggcgcagagcagcaccgaatccacccaggacgcctaccaggacagccgcgcacagaggatgtccccgtggccccaggacagccgcggcctctacaactccacggacagcctggacagcaacaaggccatgaacctcgcgctggagacggccgctgcccagcgccacctgccagagagccagagcagctctgtgcggaccagcgacaaggccatcctggtgtccaaggcggaggaactcctcaagagccgctgctcctccatcgggattcagatgaagacaaggggctcaccggggtccctaacctgcctgcagccctgggcctcgctgggctccggcgccgaattacacccggtgaaagtggacgtctctgtccgttcccctggatccacggcggcggccgagagctccagggttttctcgcgctctgtcttctgtgcggcacccggctctggggtggaaacggccacagattctgacacggagagccgcggtctgcgggaataccactctgtcggggtgcaagtggaagatgagaagcgacacggacgttttaaacgttctaacagcgtcacggccgccgtccaagctgacctggagctggaggggttcccaggccacatcaccacggaggacaaaggccttcagttcggctcatccttccagcggcactccgagcccagcacccccacccagtacagcgcggtgagaactgtacggacccaggggctcttcagctatagagaaaactatcggacccaagtggacacctccaccctgccccctccagacccctggctggagcccgccatcgacacggtagagactgggaggatgtctccgtgccgcagggatggctcgtggtttttgaagctgctgcacgcagagacaaagaggatggaaggctggtgcaaagagatggagagagaggcggaggagaacgacctctcggaggaaagaggtgacattggacgccgaatgttggggagatgctgccttccacgtgacccacagtccccgcagcacggctgcatggggctggtgcaagtcagcacagccgtgttccgatcgttcacatggcgtttgcatttctcatggttagggtacatttaa

SEQ ID NO: 6055 - DNA, 3420 bp, Homo sapiens
  SIMILAR (712)..(2940): 971254mologous to Homo sapiens putative p150,accession number U93568,Smith-Waterman Score=3707.
  misc_feature (1)...(3420): n = a,t,c or g
atggggaaaaaacagaacagaaaaactggaaactctaaaacgcagagcgcctctcctcctccaaaggaacgcagttcctcaccagcaacagaacaaagctggatggagaatgattttgacgagctgagagaagaaggcttcagacgatcaaattactctgagctacgggaggacattcaaaccaaaggcaaagaagttgaaaactttgaaaaaaatttagaagaatgtataactagaataaccaatacagagaagtgcttaaaggagctgatggagctgaaaaccaaggctcgaaaactacgtgaagaatgcagaagcctcaggagccgatgcgatcaactggaagaaagggtatcagcaatggaagatgaaatgaatgaaatgaagcgagaagggaagtttagagaaaaaagaataaaaagaaatgagcaaagcctccaagaaatatgggactatgtgaaaagaccaaatctacgtctgattggtgtacctgaaagtgatgtggagaatggaaccaagttggaaaacactctgcaggatattatccaggagaacttccccaatctagcaaggcaggccaacgttcagattcaggaaatacagagaacaccacaaagatactcctcgagaagagcaactccaagacacataattgtcagattcaccaaagttgaaatgaaggaaaaaatgttaagggcagccagagagaaagacagatcaacgagacagaaagtcaacaaggatacccaggaattgaactcagctctgcaccaagcagacctaatagacatctacagaactctccaccccaaatcaacagaatatacatttttttcagcaccacaccacacctattccaaaattgaccacatagttggaagtaaagctctcctcagcaaatgtaaaagaacagaaattataacaaactatctctcagaccacagtgcaatcaaactagaactcaggattaagaatctcactcaaagccgctcaactacatggaaactgaacaacctgctcctgaatgactactgggtacataacgaaatgaaggcagaaataaagatgttctttgaaaccaatgagaacaaagacacaacataccagaatctctgggacgcactcaaagcagtgtgtagagggaaatttatagcactaaatgcccacaagggaaagcaggaaagatctgaaattgacaccctaacatcacaattaaaagaactagaaaagcaagagcaaacacattcaaaagctagcagaaggcaagaaataactaaaatcagagcagaactgaaggaaatagagacacaaaaaacccttcaaaaaatcaatgaatccaggagctggttttttgaaaggatcaacaaaattgatagaccgctagcaagactaataaagaaaaaaagagagaagaatcaaatagacacaataaaaaatgataaaggggatatcaccaccgatcccacagaaatacaaactaccatcagagaatactacaaacacctctacgcaaataaactagaaaatctagaagaaatggatacattccttgacacatacactctcccaagactaaaccaggaagaagttgaatctctgaatcgaccaataacaggctctgaaantgtggcaataatcaatagtttaccaaccaaaaagagtccaggaccagatggattcacagccgaattctaccagaggtacaaggaggaactggtaccattccttctgaaactattccaatcaatagaaaaagagggaatcctccctaactcattttatgaggccagcatcatactgataccaaagccgggcagagacacaaccaaaaaagagaattttagaccaatatccttgatgaacattgatgcaaaaatcctcaataaaatactggcaaaccgaatccagcagcacatcaaaaagcttatccaccatgatcaagtgggcttcatccctgggatgcaaggctggttcaatatacgcaaatcaataaatgtaatccagcatataaacagagccaaagacaaaaaccacatgattatctcaatagatgcagaaaaagcctttgacaaaattcaacaacccttcatgctaaaaactctcaataaattaggtattgatgggacgtatttcaaaataataagagctatctatgacaaacccacagccaatatcatactgaatgggcaaaaactggaagcattccctttgaaaaccggcacaagacagggatgccctctctcaccgctcctattcaacatagtgttggaagttctggccagggcaatcaggcaggagaaggaaataaaggctattcaattaggaaaagaggaagtcaaattgtccctgtttgcagacgacatgattgtttatctagaaaaccccatcgtctcagcccaaaatctccttaagctgataagcaacttcagcnaactctcaggatacaaaatcaatgtacaaaaatcacaagcattcttatacaccaacaacagacaaacagagagccaaatcatgggtgaactcccattcacaattgcttcaaagagaataaaatacctaggaatccaacttacaagggatgtgaaggacctcttcaaggagaactacaaaccactgctcaaggaaataaaagaggagacaaacaaatggaagaacattccatgctcatgggtaggaagaatcaatatcgtgaaaatggccatactgcccaaggtaatttacagattcaatgccatccccatcaagctaccaatgactttcttcacagaattggaaaaaactactttaaagttcatatggaaccaaaaaagagcccgcattgccaagtcaatcctaagccaaaagaacaaagctggaggcatcacactacctgacttcaaactatactacaaggctacagtaaccaaaacagcatgtgggtaccagaagcagggagcagacacctcggagcctgcaggggcagtgaggggaaaccttccgaacttcccaagcccccaagagtgcagagatgccaggtccacagccatggcttggctggctgcagctgtgcctaagaagggaaagactcacattctcttgcctaatagtacaaggctagcctcagacattctgggagctggactggagaagcgatgttggggattcaccattcaatatgaactttgtgttcagtacagtctctctccttctttgtgtctggtgtctcagtgtcagactgctgttgtccaagcccccaagcaccgtggacatgttcagtggtgtctgatcccatcggcacagagcttggcttctcaggaggctcctcagagtcgcgtaaatagggtttccgatgcccggcctcaccagcttacagacgtgtctgaatctccttttcactcaggccacacttatattcactcttccctcctgaacattcgttag

SEQ ID NO: 6056 - DNA, 3579 bp, Homo sapiens
  SIMILAR (3488)..(3577): 961254mologous to Homo sapiens putative p150,accession number U93563,Smith-Waterman Score=152.
atgcctggccacaacctgaaatggaaactcaacagaggaactgtcctgattgaaaccggcatccagctcagcacctccaccatcctggggtcagcctctgagccaccttctgctccaatccctaaagcacaggttagttccactgagaagctacggaactgcatagatgatctgaaaccctttccagctctggcatctgagctgtcaaggagagctaaagcgctccagattgcaggattcccaccaatgaaagtgcccagagataccatcagcaaagtatgtttggacaagacggtgggaaaactttgccactcaggagaagaatctagaaagtgcacccttatctgtaataacaagcactatccaatccaggataatctacaggggtacaaaacccaaaacaaatttctaaataaggagattttggaactctcagctctacgaagaaatgcagaaaggagagagagggatctgatggcaaagtattctagcctggaagccaagctctgccagatagaaagtaaatacctgatattgctccaagaaatgaagacaccagtgtgctcagaagaccaggggcccacccgggaggtcatagcccagttgctggaggatgctctgcaggttgagagccaagagcagccggagcaagcatttgttaaacctcatcttgtcagtgaatatgatatttatgggttcaggactgtacctgaggatgatgaggaagagaaattggttgccaaggtccgcgcgttggatctgaagactctctacctcacagaaaaccaggaagtctccactggggtcaagtgggaaaactattttgcaagtacagtgaacagggagatgatgtgctctccagagttaaaaaacctcatccgtgcgggcattccccacgagcaccgttccaaggtgtggaagtggtgtgtggaccgtcacaccaggaagttcaaggacaacactgagcctggccacttccagaccttgctgcagaaggcgctggagaaacagaacccagcctccaagcagattgagctggacttgctgcgaactctgcccaacaacaaacattactcctgccccacctcagaaggcatacagaagttacgcaatgtcctcctcgccttctcctggcggaatccagatatcggctactgtcaaggcctaaacagtgcaatcaaactagaactcagaattaagaaactcactcaaaactgctcaactacatggaaactgaacaacctgctcctgaatgactactgggtacataacgaaacaaaggcagaaataaagatgttctttgaaaccaacgagaacaaagacacaacataccagaatctctgggacacattcaaagcagtgtgtagagggaaatttatagcactaaatgcccacaagagaaagcaggaaagatccagaattgacaccctaacatcacaattaaaagaactagaaaagcaagagcaaacacattcaaaagctagcagaaggcaagaaataactaaaatcaaagcagaactgaatgaaatagagacacaaaaaacccttcaaaaaattaatgaatccaggagctggttttttgaaaggatcaacaaaattgatagaccgctagcaagactaataaagaagaaaagagagaagaatcaaatagacacaataaaaaatgataaaggggatatcaccaccaatcccacagaaatacaaactaccatcagagaatactacaaacacctctactcaaataaactagaaaatctacaagaaatggatactttccttgacacatacaccctcccaagactaaaccaggaagaagttgactctctgaatagaccaataacaggctctgaaattgtggcaataatcaatagcttaccaaccaaaaagagtccaggaccagatggattcacagccgaattctatcagaggtacaaggaggagctgataccattccttctgaaactattccaatcaacagaaaaagagggaatcctccctaactcattttatgaggccagcatcatcctgataccaaagcctggcagagacacaaccaaaaaagagaattttagaccaatatccttgatgaacattgatgcaaaaatcctcaataaaatactggcaaaccaaatccagcagcacatcaaaaagcttatccaccatgatcaagtgggcttcatccctggaatgcaaggctggttcaatatatgcaaatcaataaatgtaatccagcatataaacagaaccaaagacaaaaaccacatgattatctcaatagatgcagaaaaggcctttgacaaaattcaacaacccttcatgataaaaactctcaataaattaggtattgatgggatgtatctcaaaataataagagctatctatgacaaacccacagccaatatcatgctgaatgggcaaaaactggaagcattccctttgaaaactggcacaagacagggatgccctctctcaccactcctattcaacattgtgttggaagttctggccagggcaattaggcaggagaaggaaataaagggtattcaattagggaaagaggaagtcaaattgtccctgtttgcagatgacatgattgtatatctagaaaaccccattgtctcagcccaaaatctccttaagctgataagcaacttcagcaaagtctcaggatacaaaatcaatgtacaaaaatcacaagcattcttataccccaataacagacaaacagagagtcaaatcatgcgtgaactcccattcacaattgcttcaaagagaataaaatacctaggaattcaacttacaagggacgtgaaggacctcttcaaggagaagtacaaaccactgctcaaggaaataaaagaggatacaaacaaatggaagaacattccatgctcatgggtaggaagaatcaatatcatgaaaatggccatactgcccaagctaccaatgactttcttcacagaattggaaaaaactactttaaagttcatatggaaccaaaaaagagcctgcatcgccaagtcaatcctaagccaaaagaacaaagctggaggcatcacactacctgacttcaaactacactacaaggctacagtaaccaaaacagcatggtactggtaccaaaacagagatatagatcaatggaacagaacagagccctcagaaataacaccgcatatctacaactatctgatctttgacaaacctgagaaaaacaagcaatggggaaaggattccctatttaataaatggtgctgggaaaactggctagccatatgtagaaagctgaaactggatcccttccttacaccttatacaaaaattaattcaagatggattaaagacttaaacgttagacctaaaaccataaaaaccctagaagaaaacctaggcattaccattcaggacataggcatgggcaaggacttcatgtctaaaacaccaaaagcaatggcaacaaaagccaaaattgacaaatgggatctaattaaagagcttctgcacagcaaaagaaactaccatcagagtgaacaggcaacctacaaaatgggagaaaattttcgcaacctactcatctga

SEQ ID NO: 6057 - DNA, 4374 bp, Homo sapiens; identical to SEQ ID NO: 2325
  SIMILAR (1)..(3291): 991254mologous to Homo sapiens unknown,accession number AF148856,Smith-Waterman Score=5719.

SEQ ID NO: 6058 - DNA, 4830 bp, Homo sapiens
  SIMILAR (2647)..(4827): 1001254mologous to Homo sapiens ha0946 protein is Kruppel- related,accession number D31763,Smith-Waterman Score=4096.
atggtaaagggatcaattcaacaagaagagctaactatcctaaatacatatgcagcccatacaggagcaccaagactcataaagcaagtcctgagtgacctacaaagagacttagactcccacacaataataatgggagactttaacaccccactgtcaacattagacagatcaacgagacagaaagttaacaaggatacccaggaattgaagtcagctctgcaccaagcggacctaacagacatctacagaactctccaccacaaatcaacagaatatacatttttttcagcaccacaccacatctattccaaaattgaccacatactgggaagtaaagctctcctcagcaaatgtaaaagaacagaaattataacaaactatctctcagaccacagtgcaatcaaactagaactctggattaagaatctcactcaaaaccactcaactacatgggaactgaacaacctgctcctgaatgactactgggtacataacgaaatgaaggcagaaataaagatgttctttgaaaccaatgagaacaaagacacaacataccataatctttgggacacattcaaagcagtgtgtagagggaaatttataccactaaatgcccacaagagaaagcaggaaagatccaaaattgacaccctaacatcacaattaaaagaactagaaaagcaagagcaaacacattcaaaagctagcagaaggcaagaaataactaaaatcagagcagaactgaaggaaatagagacacaaaaaacccttcaaaaaattaatgaatccaggagctggttttttgaaaggatcaacaaaattgatagactgctagcaagactaataaagaaaaaaagagagaagaatcaaatagatgcaataaaaaatgataaaggagatatcaccaccgatcccacagaaatacaaactaccatcagagaatactgcaaacacctctatgcaaataaactagaaaatctagaagaaatggataaattcctggacacatacactctcccaagactaaaccaggaagaagttgaatctctgaatagaccaataacaggagctgaaattgtggcaataatcaatagcttaccaaccaaaaagagtccaggaccagatggattcacagccaaattctaccagaggtacaaggaggaactggtaccattccttctgaaactattccaatcaatagaaaaagagggaatcctccctaactcattttatgaggccagcatcattctgataccaaagccaggaagagacacaacaaaaaaagagaattttagaccaatatccttgatgaacattgatgcaaaaatcctcaataaaaaactggcaaaacgaatccagcaacacatcaaaaagcttatccaccatgatcaagtgggcttcatccctggaatgcaaggctggttcaatatacgcaaatcaataaatgtaatccagcatataaacagagccaaagacaaaaaccatatgattatctcaatagatgcagaaaaagcctttgacaaaattcaacaacccttcatgctaaaaactctcaataaattagagaataaaatacctaggaatccaccttacaagggatgtgaaggacctcttcaaggagaactacaaaccactgctcaaggaaataaaagaggacagaaacaaatggaagaacattccatgctcatgggtaggaagaatcaatatcgtgaaaatggccatactgcccaagaacattttgatcacccttcagcttcttttagttctcccagaactctccacattgatcccactctggctaccagcactagctggacagtaatgactctcagaggtgaacacaatatgcctcaacatgcctttctggaagttcacataggaactgcacagcacctgaattccagttctgcaaagctcttctctgaatactggagtatatccctttggagtgccccggggaaagccagggctgcaggcatttccagcaccaactcagaccgcatctgcccactgcctagcggggcacttctctaccaatccgaagggctgctcgcccggcctcacgggaaaggtagtttccaggtagggcgccaacagcatcaagctgtgcgcgtgggctctgcgcatgcctcgtccgccggctacgtctgcgtttccgcctttccttttgtttttctcaggttttgcgtgggaggcggtcccgggatttcaagggtctacgcgcttttctatggcgaatgcaacccgacaagggagtgggctgtatcttcagagttgtctccgtctttccaagaacagaacaaaatgaacaaggtagaacagaagtcccaggagtcagtatcatttaaagatgtgactgtgggcttcacccaggaggagtggcagcacctggaccctagtcagagggctctgtatagagatgtgatgctggagaactacagcaaccttgtctcagtggggtattgtgttcacaaaccagaggtgatcttcaggctgcaacaaggagaaaagccatggaaacaggaggaagaattcccaagccaaagctttccagactatatgttcatgtctccccagaattcatatgttggagccctcaccccaagtgtggtggtgtttggagatatgcagcccttggcagaagtctggacagctgatcacctgaaagagaggagccaagaaaaccaatctaaacatttgtgggaagttgtattcatcaataatgaaatgctgactaaggaacaaggtgatgtaataggaataccatttaatgtggatgtaagttcttttccttccagaaaaatgttctgtcagtgtgattcatgtggaatgagtttcaacactgtttcagaattggttatcagtaagataaactatttaggaaaaaagtctgatgaatttaatgcctgtgggaaattgttactcaatattaagcatgatgaaactcatactcaagagaaaaatgaagttttgaaaaataggaacacactgagtcatcatgaggagactttgcagcatgagaagattcaaactttagagcacaattttgaatacagtatatgtcaggaaaccctccttgaaaaggcagtattcaatacacagaagagagagaacgcagaagagaataactgtgattataatgaatttgggagaactttgtgtgatagttcatccctcttgttccatcagatatctccgtcaagggacaatcactatgaatttagtgattgtgagaagttcttatgtgtgaagtccaccctttctaaacctcatggggtatctatgaaacactatgattgtggtgaaagtgggaataatttcaggaggaaattgtgtctgtcacaccttcagaaaggtgataaaggagagaaacactttgaatgtaatgaatgtgggaaagctttctgggagaagtcacatctcactcgacatcagagggtgcacacaggacagaaaccctttcaatgtaatgaatgtgaaaaagctttctgggataagtcaaacctcactaaacatcaaagatcacacacaggggagaaaccttttgaatgcaatgaatgtgggaaagcctttagccataagtcagccctcacattacaccagagaacacatacaggggagaaaccctatcaatgtaatgcgtgtgggaaaactttttgccagaaatctgacctcactaaacatcagagaacacacacagggctgaaaccctatgaatgttatgaatgtggaaaatccttccgtgtgacttcgcaccttaaagtacaccagagaactcacacaggtgagaaaccttttgaatgtcttgagtgtgggaaatcctttagtgaaaagtcaaatcttacacagcatcagagaattcacataggagataaatcttatgaatgtaatgcatgtgggaaaactttctaccacaagtcattactcaccaggcatcagataattcatacagggtggaaaccttatgaatgttatgaatgtgggaaaaccttctgcttgaagtcagacctcacagtacatcagagaacacacacagggcagaaaccctttgcatgtcccgaatgtgggaaattctttagccataagtcaaccctctctcaacattatagaacacacacaggggagaaaccctacgaatgtcatgaatgtggaaaaatcttttacaataaatcatacctaactaaacataatagaacacatacaggggagaaaccctatgaatgtaatgaatgtggaaaagccttctaccagaagtcacaactcactcagcatcagagaattcacataggggagaaaccctataaatgtaatgagtgtggaaaagctttctgccataagtcagctctaattgtacatcagagaacccatacacaagaaaagccctataaatgtaatgaatgtggaaaatctttctgtgtaaaatcaggacttattttccatgagagaaagcacacgggggagaaaccctatgaatgcaatgaatgtgggaaattcttcaggcacaaatcatcactcacagtacatcacagggctcacacaggagagaaatcttgtcaatgtaatgaatgtggaaaaatcttttaccgtaaatcggaacttgctcaacatcagagatcacatacaggggaaaagccctatgaatgtaacacatgcaggaaaactttctctcaaaagtcaaatctcattgtacatcagagaagacatataggagaaaaccttatgaatgaaatggatattagaaatttccagccacaagtcagcctccataatgcctcagagtattcacactgtggagaaagccctgatgacatcctgaatgttcagtaa

SEQ ID NO: 6059 - DNA, 4452 bp, Homo sapiens
  SIMILAR (2224)..(4446): 931254mologous to Homo sapiens putative p150,accession number U93567,Smith-Waterman Score=3560.
atggggaaagaggaatgtcttgagaaaatgccagtcaaaaatcagaacaaatcatccagtcaggctgaaggaacttaccgcagagggttcagcaccaagtggacagagggtatatccataaaaagtgaaattgacacgtcactgaataggcaaatgttcagcttttacagatacccatccttcagcttactgcaaagccttcctcctccagaaagtaccctcatcaaccgctcatcccctttgagcagcaccaagcctgaggtttattccactgacttagcacaaaagcacaaaatcatatccttctttgcatggctacttttgccacaaacacatttttatctagacacgccctcccaggtgaggtccgcactggtactctatgcagggccagcccagggattacgtaaagaacctaaggtgggcctggcacagagcaagtacttcatgggtatgcagttactgagttcaatcggatttcccagtgtggagactaacattaaaagcaacaatgcagccaaggtgaggccattggaagcttttgatccagaatgggacatgatgaaagcagcatcgtatggacgtggattggtgaatcctatatgggctgctgtggcatggaacagctgtttgtctctgttctttgaacaaagtggagaccactcctttggtgcacggatgtccttttgcaaaagcactcctgtgacacctcttgtgtctgagcgtatacctgctgatgtgaagttctgtccttcctgtgctcttgtacaaggttctcaggggcttgagagactgtgccatacagggagcataaatcctattgtctgtcaacctgcacgtccacctcacagctggggagagggcaagctctgtgttctaaaaaaagcaacaactccctgtacaaattcacacccagtggctaaccaacaggatgctggagtgcaaaggaacctgctgctgtggtccagtccaggtagccttccagggccagagcaagatatcgggaagggtggggagagaacttggggagcaaatgaaagatttccagcacagatggctccacctctgggggcagggcacagacaaacaaaagacagcaataacctctgcagacttaaatgtccctgtctgacagctttgaagagaatagtggttctcccagcacgcagcttgagatctgagaacgggcagactgcctcttcaagtgggtccctgacccccaagtaccctaactgggaggcaccccccactaggggccaactgacacctcacacggccaggtactcctctgagacaaaacttccagagaaacgatcaggcagcagcatttgcggttcaccaatatccactgttctgcagccaccactgctgatacccaggaaaacagggtctggagtggacctccagcaaactccaacagacgtgcagctgagggtcctgactgttagaaggaaaactaacaaacagaaaggacatccacaccaaaaacccctctgtacatcaccatcatcaaagaccaaagagaagtccttcaaggacctgatggagctgaaaaccacagcacaagaactacatgatgaatgcacaagcctcagtaaccgatgcaatcaactggaagaaattgtatcagcaatggaagacgaaatgaatgaaatgaagcgtgaagaaaagtttagagaaaaaagaatgaaaaggaacaaacaaagcctccaagaaatatgggactatgtgaaaagaccaaatctacgtctgattggtgtacctgaaagtgatggggagaatgaaaccaacttggaaaacactctgcaggatattatccaggagaacttccccaatctagcaaggcaggccaacattcaaattcaggaaatacagagaatgccacaaagatactcctcgagaagagcaactccaagacacataattgtcagattcaccaaagttgaaatgaaggaaaaaatattaagggcagacagagagaaaggtcaggttacccacaaagggaagcccatcagactaccagcggatctctcagcagaaactctacaagccagaagagagtgggggccaatattcaacattcttaaagaaaagaattttcaacccagaatttcatatccagccaaattaagcttcataagtgaaggagaaataaaatactttacagacaagcaaatgctgagagattttgtcaccaccaggcctgccctacgagagctcctgaagcacagactggcaaattggataaagagtcaagacccatcagtgtgctgtattcaggaaacccatctcacgtgcagagacacacataggctcaaaataaagggatggaggaagatctaccaagcaaatggaaaacataaaaaggcaggggttgcaatcctagtctcggataaaacagactttaaaccaacaaagatcaaaagagacaaagaaggccattacataatggtaaagggatcaattcaacaagaagaactaactatcctaaatatatatgcacccaatacaggagcacgcagattcgtaaagcaagtccttagtgacctacaaagagacttagactcccacacaataataatgggagactttaataccccactgtcaacattacacagatcaacgagacagaacgttaacaaggatatccaggaattgaactcggctctgcaccaagcagacctaatagacatttacagaactgtccaccccaaatcaacagaatctacattcttttcagcaccacaccacacctattccaaaattgaccacataattggaagtaaagcactcctcagcaaatgtaaaagaacagaaattataacaaactgtctctcagaccacagtgcaatcaaactagaactcaggattaagaaactcactcaaaaccgctcaactacatggaaactgaacaacctgctcctgaatgactactgggtacctaacgaaatgaaggcagaaataaagatgttctttgaaaccaacgagaacaaagacacaacataccagaatctctgggacacaatcaaagcagcgtgtagagggaaatttatagcactaagtgcccacaagagaaagcaggaaagatctaaaattgacatcctaacatcacaattaaaagaactagagaagcaagagcaaacacattcaaaagctagcagaaggcaagaaataactaagatcagagcagaactgaaggagacagagacacaaaaaacctttcaaaaaatcaatgaatccaggagctggttttttgaaaagatcatcaaaattgatagactgctagcaagactaataaagaagaaaagagagaagaatcaaatagatgcaataaaaaatgacaaaggggatatcaccaccgatcccacagaaatacaaactaccatcagagaatactataaacatctctacgcaaataaactagaaaatctagaagaaatggataaattccttgacacatacaccctcccaagactaaacaaggaagaaactgaatctctgaatagaccaataacaggctctgaaattgaggcaataattaatagcttagcaaccaaaaaaagtccaggaccagatggattcacagccgaattctaccagaggtacaaggaggaactggtaccattccttctgaaactattccaatcaatagaaaaacagggaatcctccctaactcattttatgaggccagcatcatcctgataccaaagcctggcagagacacgacaaaaaaagagaattttagaccaatatctttgatgaacattgatgcaaaaatcctcaataaaatattggcaagccgaatccagcaacccatcaaaaagcttatccaccatgatcaagtgggcttcatccctgggatgcatggctggttcaacatacgcaaatcaataaacgtaatccagcctataaacagaaccaaagacaaaaaccacatgattatctcaatagatgcagaaaaggcctttaacaaaattcaacaacacttcatgctaaaaactctcaataaattaggtattgatgggacgtatctcaaaataataagagctatctatgacaaacccacagccaatatcatactgaatggacaaaaactggaagcattccctttgaaaactggcacaagacagggatgccctctctcaccactcctattcaacatagtgttggaagttctggccagggcaatcaggcaggagaaggaaataaagggcattcaattagaaaaagaggaagtcaaattgtccctgtttgcagatgacatgattgtatatctagaaaaccccattgtctcagcccaaaatctccttaagctgataagcaacttcagcaaagtctcaggatacaaaatcaatgtacaaaaatcacaagcattcttatacaccaataacagacaaacagagagccaaatcatgagggaactcccattcacaattgcttcaaaggaataa

SEQ ID NO: 6060 - DNA, 3693 bp, Homo sapiens; identical to SEQ ID NO: 3978
  SIMILAR (836)..(976): 911254mologous to Homo sapiens unknown,accession number AF148856,Smith-Waterman Score=227.

SEQ ID NO: 6061 - DNA, 3300 bp, Homo sapiens; identical to SEQ ID NO: 3981
  SIMILAR (1627)..(3297): 971254mologous to Homo sapiens putative p150,accession number U93563,Smith-Waterman Score=2950.

SEQ ID NO: 6062 - DNA, 3357 bp, Homo sapiens
  SIMILAR (1)..(1755): 911254mologous to Homo sapiens putative p150,accession number U93563,Smith-Waterman Score=2724.
atgtaccaagcaaatggaaaacaaaaaaaggcaggggttgcaatcctagtctctgataaaacagactttaaaccaacaaagatcaaaagagacaaagaaggccattacataatggtaaagggatcaattcaacaagaagagctaactatcctaaatatatatgcacccaatacaggagcacccacattcatacagcaagtcctgagtgatctacaaagagacttagactcccacacattaataataggagactttaacaccccactgtcaacatcagacagatcaacgagacagaaagtcaacaaggatacccaggaattgaactcagctctgcaccaagcagacctaatagacatctacagaaccctccaccccaaatcaacagaatatacatttttttcagcaccacaccacacctattccaaaattgaccacatacttggaagtaaagcactcctcagcaaatgtaaaagaacagaaattataacaaactatctctcagaccacagtgcaatcaaactagaactcatgattaagaatctcactcaaaaccactcaaccatatggaaactgaacaacctgctcctgaatgactactgggtacataaggaaatgaaggcagaaataaagatgttctttgaaaccaacgagaacaaagacacaacataccagaatctctgggacacattcaaagcagtgtgtagagggaaatttatagcactaaatgcccacaagagaaagcaggaaagatccaaaattgacaccctaacatcacaattaaaagaactagaaaagcaagagcaaacactttcaaaagctagcagaaggcaagaaataactaaaatcagagcagaactgaaggaaatagagacacaaaaaacccttcaaaaaattaacgaatccaggagcaggttttttgaaaggatcaacaaaattgatagcctgctagcaagactaataaagaaaaaaagagagaagaatcaaatagatgcaataaaaaatgataaaggggatatcaccaccaatcccacagaaatacaaactaccatcagagaatactacaaacacctctacgcaaataaactagaaaatctagaagaaatggataaattcctcgacacatacactctcccaagactaaaccaggaagaagttgaatctctgaatagaccaataacgggagctgaaattgtggcaataatcaatagcttaccaaccaaaaagagtccaggaccagatggattcacagccgaattctaccagaggtacaaggaggaacaggtaccattccttctgaaactattccaatcaatagaaaaagagggaatcctccctaactcattttatgtgtccagcatcatcctgataccaaagccgggcagagacacaaccaaaagagagaattttagaccaatatccttgatgaacattgatgcaaaaatcctcaataaaatactggcaaaccgaatccagcagcacatcaaaaagcttatccaccatgatcaagtgggcttcatccctgggatgcaaggctggttcaatatatgcaaatcaataaatgtaatccagcatataaacagaaccaaagacaaaaaccacatgattatctcaatagatgcagaaaaggcctttgacaaaattcaacaacctttcatgctaaaaactctcaataaattagtgttggaagttctggccagggcaattaggcaggagaaggaaataaagggtattcaattaggaaaagaggaagtcaaattgtccctgtttgcagacgacatgattgtatatctagaaaaccccattgtctcagcccaaaatctccttaagctgataagcaacttcagcaaagtctcaggatacaaaatcaatgtacaaaaatcacaagcattcttatacaccaacaacagacaaacagagagccaaatcatgagtgaactcccattcacaattgcttcaaagagaataaaatacctaggaatccaacttacaagggatgtgaaggacctcttcaaggagaactacaaaccactgctcaaggaaataaaagaggatacaaacaaatggaagaacattccatgctcatgggtaggaagaatcaatatcgtgaaaatggccatactgcccaaggtaatttatagattcaatgccatccccatcaagctaccaatgactttcttcacagaattgggaaaaactgctttaaagttcatatggaaccaaaaaagagcccgcatcaccaagtcaatcctgagccaaaagaacaaagctggaggcatcacactacctgacttccaactatactgcaaggctacagtaaccaagacagcatggttccctagtggggatgtgggtttggaggcagacttttctccctctcacacattgaaaactcagtttttcagctgccttgcagagtttgcagcggcaagctgcttctttcaaaggatgaatgggtttggcatggccatgactactacgtacagcacgggggctgctgagtctcctctaccaagctgttccattgaccagggagatgacaccaagctccaccgagcacgcagccctggccgcaccttccctgctgcagctggcatccccgcagcagctgctccagatgggccaccactatcacttctgcataaactatggttcccagtggaattaggaggaagagctcttccccgagcagaggaatcacatggtgaggtcgcagctttaggggtgatggttgtagctcagggtgggaaaaaccagggagaagaggccaggtccactccatggctccgaccaacctcacatctgcccccgtgttcctcctcctcggcctggtggacggaacagacagacgcccacccgctgctgttcctgctctgccttggcatctatctgctcaacgccctgagcaacctgagcatggtggcgctggtgagatctgacggggccctccgctcccccatgtattacttcttgggtcacctgagcctcgtggacgtctgctttaccaccgtcacggtccccaggctgctggccggcctgctccacccgggccaggccatatccttccaggcgtgctttgccgagatgtacttcttcgtggctctgggcatcaccgagagctacctcccggcggccatgtcctacgaccgcgcgacggcggcgtgccggcccctgcgctacggcgcgctggtgacgccatgggcgctgcgcctcgctgcccgctacgaccgcctggccagcgtggtctacgctgtcatcacgccgaccttgaaccctttcatcaacagccttcgcaacaaagaggtcaagggcgccctgaaaagggggctcagatggagggctgcaccccaagaggcgtga

SEQ ID NO: 6063 - DNA, 3316 bp, Homo sapiens
  SIMILAR (1458)..(3314): 941254mologous to Homo sapiens putative p150,accession number U93572,Smith-Waterman Score=3039.
gatcaaattcacacataacaatattaaccttaaatgtaaatgggctaaatgctccaattaaaagacacagactggcaaattggataaagagtcaagacccatcagtgtgctgtattcaggagacccatctcacgtgcagagacacacacaggatcaaaataaagggatggagggagatctaccaagcaaatggaaaacaaaaaaaggcaggggttgcaatcctagtctctgataaaacggactttaaaccaacaaagatcaaaagagacaaagaaggccattacatgatggtaaagggatcaattcaacaagaagagctaactaccctaaatatatatgcacccaatacaggagcacccagattcataaagcaagtccttagagacctacaaagagacttagactcccacacattaataatgggagactttaacaccccactgtcaacattagacagatcaacgagacagaaagttaacaaggatatccaggatttgaactcagctctgcaccaagtggacctaatagacatctacagaactctccaccccaaatcaacagaatatacattcttctcagcactacaccacatttattccaaaattgaccacatagttggaagtaaagcactcctcagcaaatataaaacaacagaaattataacaaactgtctctcagaccacagtgcaatcaaactcgaactcaggattaagaaactcactcaaaaccgctcaactacatggaaactgaacaacctgctcctgaatgactactgggtacataacaaaatgaaggcagaaataaatacattatttgaaaccaacgagaacaaagacacaacataccagaatctctgggacacattcaaagcagtgtgtagagggaaattcatagcactaaatgcccacaagagaaagcaggaaagatctaaaattgacaccctaacatcacaattaaaagaactagagaagcaagaacaaacacattcaaaagctagcagaaggcaagaaataactaagatcagagcaaaactgaaggaaatagagacacaaaaaatccttcaaaaaatcaatgaatccaggagctggttttttgaaaagatcaacaaaattgatagaccactagcaagaccaataaagaagaaaagagagaagaatcaaatagatgcaataaaaaatgataaaggggatatcaccactgatcccacagaaatacaaactaccatcagagaatactataaacacctctatgcaaataaactagaaaatctagaagaaatggataaattcctcaacacatacaccctcccaagactaaaccaggaagaagttgaatctctgaataaaccaataacaggctctgaaattgaggcaataattaatagcttaccaatcaaaaaaagtccaggaccagatggattcatagccaaattccaccagaggtacaaggaggagctggaggccagcatcatcctgataccaaagcctggcagagacacaaccaaaaaagagaattttagaccaatacccctgatgaatattgatgcaaaaatcctcaataaaatactggcaaaccgaatccagcagcacatcaagaagcttatccaccatgatcaagtgggcttcatccctgggatgcaaggctcgttcaacatatgcaaatcaataaacgtaatccaggatataaacagaacgaatgacaaaaaccatatgattatctcaatagatgcagaaaaggcctttgacaaaattcaacaacccttcattctaaaaactctcaataaattaggtattgatgggacgtatctcaaaataataagagctatctatgacaaacccacagccaatatcatactgaatgggcaaaaactggaagcattccctttgaaaactggcacaagacaggggtgccctctctcaccactcctattcaacatagtgttggaagttctggccagggcaatcaggcaggagaaggaaataaagggcattcaattaggacaagaggaagtcaaattgtccctgtttgcagatgacatgattgtatatcgagaaaaccccatcgtctcaacccaaaatctccataagctgataagcaacttcagcaaagtctcaggatacaaaatcaatgtgcaaaaatcacaagcatttttatacaccaataacagacaaacagagagccaaatcatgagtgaactcccattcacaattgcttcaaagagaataaaatacctaggaatccaacttacaagggatgtgaaggatctcttcaaggagaactacaaaccactgctcaaggaaataaaagaggatacaaacaaatggaagaacattccatgctcatgggtaggaagaatcaatatcgtgaaaatggccatactgcccaaggtaatttatagatttaatgccatccccatcaagctaccaatgactttcttcacagaattggaaaaaactactttaaagttcatatggaaccaaaaaagagcccgcattgccaagtcaatcctaagccaaaggaacaaagctggaggcatcacactacctgacttcaaactatactacaaggctacagtaaccaaaacagcatggtactggtaccaaaacagagatatagaccaatggaacagaacggagccctcagaaataatgccacatatctacaaccatctgatctttgacaaacctgacaaaaacaagaaatggggaaatgattccctatttaataaatggtgctgggaaaactggctagccatatgtaggagaaagctgaaactggatcccttccttacaccttatacaaaaattaattcaagatggattaaagacttaaatgttagacctaaaaccataaaaaccctagaagaaaacctaggcaataccattcaggacataggcatgggcaaggacttcatgtctacaacaccaaaagcaatggcaacaaaagccaaaattgacaaatgggatctaattaaactaaagagcttctgcacagcaaaagaaactaccatcacagtgaacaggcaacctacagaatgggagaaaatttttacaatctacccatctgacaaagggctaatatccagaatctacaaagaactcaaacaaatttacaagaaaagaacaaacaaccccatcaacaagtgggtgaaggatatgaacagacacttctcaaaagaagacatttatacagccaaaaggcacatgaaaaaatgctcatcatcactggccatcagagaaatgcaaatcaaaaccacattgagataccatctcataccagttagaatggcgatcattaaaaagtcaggaaacaacag

SEQ ID NO: 6064 - DNA, 3457 bp, Homo sapiens
  SIMILAR (3290)..(3457): 941254mologous to Homo sapiens ORF2 contains a reverse transcriptase domain.; ORF2,accession number M80341,Smith-Waterman Score=279.
atggtaaagggatcaattcaacaagaggagctaactatcctaaatatttatgcacccaatacaggagcacccagattcataaagcaagtcctcagtgacctacaaagagacttagactcccacacattaataatgggagactttaacaccccactgtcaacattagacagatcaacgagacagaaagtcaacaaggatacccaggaattgaactcagctctgcaccaagcagacctaatagacatctacagaactctccaccccaaatcaacagaatatacatttttttcagcaccacaccacacctattccaaaattgaccacatacttggaagtaaagctctcctcagcaaatgtaaaagaacagaaattataacaaactatctctcagaccacagtgcaatcaaactagaactcaggattaagaatctcactcaaagccgctcaactacatggaaactgaacaacctgctcctgaatgactactgggtacataacgaaatgaaggcagaaataaagatgttctttgaaaccaacgagaacaaagacaccacataccagaatctctgggacgcattcaaagcagtgtgtagagggaaatttatagcactaaatgcctacaagagaaagcaggaaagatccaaaattgacaccctaacatcacaattaaaagaactagaaaagcaagagcaaacacattcaaaagctagcagaaggcaagaaataactaaaatcagagcagaactgaaggaaatagagacacaaaaaacccttcaaaaaatcaatgaatccaggagctggttttttgaaaggatcaacaaaattgatagaccgctagcaagactaataaagaaaaaaagagagaagaatcaaatagacacaataaaaaatgataaaggggatatcaccaccgatcccacagaaatacaaactaccatcagagaatactacaaacacctctacgcaaataaactagaaaatctagaagaaatggatacattcctcgacacatacactctcccaagactaaaccaggaagaagttgaatctctgaatagaccaataacaggctctgaaattgtggcaataatcaatagtttaccaaccaaaaagagtccaggaccagatggattcacagccgaattctaccagaggtacatggaggaactggtaccattccttctgaaactattccaatcaatagaaaaagagggaatcctccctaactcattttatgaggccagcatcattctgatgccaaagccgggcagagacacaaccaaaaaagagaattttagaccaatatccttgatgaacattgatgcaaaaatcctcaataaaatactggcaaaccgaatccagcagcacatcaaaaagcttatccaccatgatcaagtgggcttcatccctgggatgcaaggctggttcaatatacgcaaatcaataaatgtaatccagcatataaacagagccaaagacaaaaaccacatgattatctcaatagatgcagaaaaagcctttgacaaaattcaacaacccttcatgctaaaaactctcaataaattaggtattgatgggacgtatttcaaaataataagagctatctatgacaaacccacagccaatatcatactgaatgggcaaaaactggaagcattccctttgaaaaccggcacaagacagggatgccctctctcaccgctcctattcaacatagtgttggaagttctggacagggcaatcaggcaggagaaggaaataaagggtattcaattaggaaaagaggaagtcaaattgtccctgtttgcagacgacatgattgtttatctagaaaaccccatcgtctcagcccaaaatctccttaagctgataagcaacttcagcaaagtctcaggatacaaaatcaatgtacaaaaatcacaagcattcttatacaccaacaacagacaaacagagagccaaatcatgggtgaactcccattcacaattgcttcaaagagaataaaatacctaggaatccaacttacaagggatgtgaaggacctcttcaaggagaactacaaaccgctgctcaaggaaataaaagaggagacaaacaaatggaagaacattccatgctcatgggtaggaagaatcaatatcgtgaaaatggccatactgcccaaggtaatttacagattcaatgccatccccatcaagctaccaatgactttcttcacagaattggaaaaaactactttaaagttcatatggaaccaaaaaagaacccgcattgccaagtcaatcctaagccaaaagaacaaagctggaggcatcacactacctgacttcaaactatactacaaggctacagtaaccaaaacagcatggtactggtaccaaaacagagatatagatcaatggaacagaacagagccctcagaaataatgccgcatatctacaactatctgatctttgacaaacctgagaaaaacaagcaatggggaaaggattccctatttaataaatggtgctgggaaaactggctagccatatgtagaaagctgaaactggatcccttccttacaccttatacaaaaatcaattcaagatggattaaagatttaaacgttaaacctaaaaccataaaaaccctagaagaaaacctaggcattaccattcaggacataggcatgggcaaggacttcatgtccaaaacaccaaaagcaatggcaacaaaagccaaaattgacaaatgggatctaattaaactaaagagcttctgcacagcaaaagaaactaccatcagagtgaacaggcaacctacaacatgggagaaaattttcgcaacctactcatctgacaaagggctaatatccagaatctacaatgaactcaaacaaatttacaagaaaaaaacaaacaaccccatcaaaaagtgggcgaaggacatgaacagacacttctcaaaagaagacatttatgcagccaaaaaacacatgaagaaatgctcatcatcactggccatcagagaaatgcaaatcaaaaccactatgagatatcatctcacaccagttagaatggcaatcattaaaaagtcaggaaacaacaggtgctggagaggatgcggagaaataggaacacttttacactgttggtgggactgtaaactagttcaaccattgtggaagtcagtgtggcgattcctcagggatctagaactagaaataccatttgacccagccatcccattactggatatatacccaaatgagtataaatcatgctgctataaagacacatgcacacagaataaaatacctaggaatccaacttacaagggatgtgaaggacctcttcaaggagaactacaaactactgctcaacaaaataaaagaggacacaaacaaatggaagaacattccatgctcatgggtaggaagaatcaacatcgtgaaaatggccatactgcccaag

SEQ ID NO: 6065 - DNA, 5175 bp, Homo sapiens; identical to SEQ ID NO: 3982
  SIMILAR (1)..(3096): 971254mologous to Homo sapiens unknown,accession number AF149422,Smith-Waterman Score=5241.

SEQ ID NO: 6066 - DNA, 4797 bp, Homo sapiens
  SIMILAR (1)..(3093): 991254mologous to Homo sapiens unknown,accession number AF148856,Smith-Waterman Score=5349.
atggtaaagggatcaattcaacaagaggagctaactatcctaaatatttatgcacccaatacaggagcacccagattcataaagcaagtcctcagtgacctacaaagagacttagactcccacacattaataatgggagactttaacaccccactgtcaacattagacagatcaacgagacagaaagtcaacaaggatacccaggaattgaactcagctctgcaccaagcagacctaatagacatctacagaactctccaccccaaatcaacagaatatacatttttttcagcaccacaccacacctattccaaaattgaccacatagttggaagtaaagctctcctcagcaaatgtaaaagaacagaaattataacaaactatctctcagaccacagtgcaatcaaactagaactcaggattaagaatctcactcaaagccgctcaactacatggaaactgaacaacctgctcctgaatgactactgggtacataacgaaatgaaggcagaaataaagatgttctttgaaaccaacgagaacaaagacaccacataccagaatctctgggacgcattcaaagcagtgtgtagagggaaatttatagcactaaatgcctaccagagaaagcaggaaagatccaaaattgacaccctaacatcacaattaaaagaactagaaaagcaagagcaaacacattcaaaagctagcagaaggcaagaaataactaaaatcagagcagaactgaaggaaatagagacacaaaaaacccttcaaaaaatcaatgaatccaggagctggttttttgaaaggatcaacaaaattgatagaccgctagcaagactaataaagaaaaaaagagagaagaatcaaatagacacaataaaaaatgataaaggggatatcaccaccgatcccacagaaatacaaactaccatcagagaatactacaaacacctctacgcaaataaactagaaaatctggaagaaatggatacattcctcgacacatacactctcccaagactaaaccaggaagaagttgaatctctgaatcgaccaataacaggctctgaaattgtggcaataatcaatagtttaccaaccaaaaagagtccaggaccagatggattcacagccgaattctaccagaggtacaaggaggaactggtaccattccttctgaaactattccaatcaatagaaaaagagggaatcctccctaactcattttatgagaccagcatcattctgataccaaagccgggcagagacacaaccaaaaaagagaattttagaccaatatccttgatgaacattgatgcaaaaatcctcaataaaatactggcaaaccgaatccagcagcacatcaaaaagcttatccaccatgatcaagtgggcttcatccctgggatgcaaggctggttcaatatacgcaaatcaataaatgtaatccagcatataaacagagccaaagacaaaaaccacatgattatctcaatagatgcagaaaaagcctttgacaaaattcaacaacccttcatgctaaaaactctcaataaattaggtattgatgggacgtatttcaaaataataagagctatctatgacaaacccacagccaatatcatactgaatggacaaaaactggaagcattccctttgaaaactggcacaagacagggatgccctctctcaccgctcctattcaacatagtgttggaagttctggccagggcaatcaggcaggagaaggaaataaagggtattcaattaggaaaagaggaagtcaaattgtccctgtttgcagacgacatgattgtttatctagaaaaccccatcgtctcagcccaaaatctccttaagctgataagcaacttcagcaaagtctcaggatacaaaatcaatgtacaaaaatcacaagcattcttatacaccaacaacagacaaacagagagccaaatcatgagtgaactcccattcacaattgcttcaaagagaataaaatacctaggaatccaacttacaagggatgtgaaggacctcttcaaggagaactacaaaccactgctcaaggaaataaaagaggagacaaacaaatggaagaacattccatgctcatgggtaggaagaatcaatatcgtgaaaatggccatactgcccaaggtaatttacagattcaatgccatccccatcaagctaccaatgactttcttcacagaattggaaaaaactactttaaagttcatatggaaccaaaaaagagcccgcattgccaagtcaatcctaagccaaaagaacaaagctggaggcatcacactacctgacttcaaactatactacaaggctacagtaaccaaaacagcatggtactggtaccaaaacagagatatagatcaatggaacagaacagagccctcagaaataatgccgcatatctacaactatctgatctttgacaaacctgagaaaaacaagcaatggggaaaggattccctgtttaataaatggtgctgggaaaactggctagccatatgtagaaagctgaaactggatcccttccttacaccttatacaaaaatcaattcaagatggattaaagatttaaacgttaaacctaaaaccataaaaaccctagaagaaaacctaggcattaccattcaggacataggcgtgggcaaggacttcatgtccaaaacaccaaaagcaatggcaacaaaagacaaaattgacaaatgggatctaattaaactaaagagcttctgcacagcaaaagaaactaccatcagagtgaacaggcaacctacaacatgggagaaaatttttgcaacctactcatctgacaaagggctaatatccagaatctacaatgaactcaaacaaatttacaagaaaaaaacaaacaaccccatcaaaaagtgggcgaaggacatgaacagacacttctcaaaagaagacatttatgcagccaaaaaacacatgaagaaatgctcatcatcactggccatcagagaaatgcaaatcaaaaccactatgagatatcatctcacaccagttagaatggcaatcattaaaaagtcaggaaacaacaggccagaaaagaccaaaagttttttacctcctttgccaacacaaagttcaattcacagtggtttcctagagcattgtgttgaacaggattctgaggctctgtctggagaggctggtaaaagtctgatgtttgccatgggtgtaggaagtgaacgagcaaagcatagcctcagtgacgatggccagctccgtggtgccaaggtggctacagcactgacaccctctccaacgccgcattctgatgcagatgataacacccacctcgccctccgccacgatgagcaaatgagcgcgagcgagggcatgaaatttaaattccactcaggggagaaagtgctgtgcttcgagcctgaccccaccaaggcgcgagtgctgtacgatgccaagattgttgatgttattgttgggaaagacgaaaaaggcagaaagatcccagaatatctgatccattttaatggttggaacagaagctgggatagatgggcagcagaagatcatgtgcttcgtgataccgatgaaaatcgtagattacagcgtaaattggcaagaaaagctgtagctcgcctgaggagcacaggaagaaagaagaagcgctgcaggttgcctggtgtggactctgtcttaaaaggcctccccactgaagaaaaagatgaaaatgatgaaaactcattaagcagttcctctgactgtagtgaaaacaaggatgaagaaataagtgaagaaagtgatattgaagaaaagactgaagtgaaagaagaaccagagcttcaaacaagaagggaaatggaagaaagaacaataactatagaaatccctgaagttctgaagaagcagctggaggatgattgttactacattaacaggaggaaacggttagtgaaacttccatgccagaccaacatcataacgattttggaatcctatgtgaagcattttgctatcaatgcagccttttcagccaatgagaggcctcgtcaccatcacgttatgccacatgccaacatgaacgtgcattatatcccagcagaaaagaatgttgacctttgtaaggagatggtggatggattaagaataacctttgattacactctcccgttggttttactctatccatatgaacaagctcagtataaaaaggtgacttcgtctaaattttttcttccaattaaggaaagtgccacaagcactaacaggagccaggaggaactctctcccagtccgcctttgttgaatccatccacgccacagtccacagagagtcagccgaccaccggtgaaccagccacccccaaaaggcgcaaagctgagccagaagcattgcagtctctgaggcggtccacgcgccacagtgccaactgtgacaggctttctgagagcagcgcttcacctcagcccaagcgccggcagcaggacacatccgccagcatgcccaagctcttcctgcacctggaaaagacctcgcctgctgtgctgactccttcaggggtccttctaagcatcatcctgttggaactcccaaaagtcatcccagtgccattctgtgttcaggtgcccatttccttgtgtacatcctgtccctgccacatccataagctcctgagagaaaggtttttagcagaataccacgatgacttcttcccagagtcggcttatgtcgctgcctgtgaggcacattacagcaccaagaacccccgggcaatttattaa

SEQ ID NO: 6067 - DNA, 3384 bp, Homo sapiens
  SIMILAR (1)..(3129): 981254mologous to Homo sapiens unknown,accession number AF148856,Smith-Waterman Score=5357.
atggtaaagggatcaattcaacaagaggagctaactatcctaaatatttatgcacccaatacaggagcacccagattcataaagcaagtcctcagtgacctacaaagagacttagactcccacacattaataatgggagactttaacaccccactgtcaacattagacagatcaacgagacagaaagtcaacaaggatacccaggaattgaactcagctctgcaccaagcagacctaatagacatctacagaactctccaccccaaatcaacagaatatacatttttttcagcaccacaccacacctattccaaaattgaccacatactgggaagtaaagctctcctcagcaaatgtaaaagaacagaaactataacaaactatctctcagaccacagtgcaatcaaactagaactcaggattaagaatctcactcaaagccgctcaactacatggaaactgaacaacctgctcctgaatgactactgggtacataacgaaatgaaggcagaaataaagatgttctttgaaaccaacgagaacaaagacaccacataccagaatctctgggacgcattcaaagcagcgtgtagagggaaatttatagcactaaatgcctacaagagaaagcaggaaagatccaaaattgacaccctaacatcacaattaaaagaactagaaaagcaagagcaaacacattcaaaagctagcagaaggcaagaaataactaaaatcagagcagaactgaaggaaatagagacacaaaaaacccttcaaaaaatcaatgaatccaggagctggttttttgaaaggatcaacaaaattgatagaccgctagcaagactaataaagaaaaaaagagagaagaatcaaatagacacaataaaaaatgataaaggggatatcaccaccgatcccacagaaatacaaactaccatcagagaatactacaaacacctctacgcaaataaactagaaaatctagaagaaatggatacattcctcgacacatacactctcccaagactaaaccaggaagaagttgaatctctgaatcgaccaataacaggctctgaaattgtggcaataatcaatagtttaccaaccaaaaagagtccaggaccagatggattcacagccgaattctaccagaggtacaaggaggaactggtaccattccttctgaaactattccaatcaatagaaaaagagggaatcctccctaactcattttatgaggccagcatcattctgataccaaagcctggcagagacacaaccaaaaaagagaattttagaccaatatccttgatgaacattgatgcaaaaatcctcaataaaatactggcaaaccgaatccagcagcacatcaaaaagcttatccaccatgatcaagtgggcttcatccctgggatgcaaggctggttcaatatacgcaaatcaataaatgtaatccagcatataaacagagccaaagacaaaaaccacatgattatctcaatagatgcagaaaaagcctttgacaaaattcaacaacccttcatgctaaaaactctcaataaattaggtattgatgggacgtatttcaaaataataagagctatctatgacaaacccacagccaatatcatactgaatgggcaaaaactggaagcattccctttgaaaaccggcacaagacagggatgccctctctcaccgctcctattcaacatagtgttggaagttctggccagggcaatcaggcaggagaaggaaataaagggtattcaattaggaaaagaggaagtcaaattgtccctgtttgcagacgacatgattgtttatctagaaaaccccatcgtctcagcccaaaatctccttaagctgataagcaacttcagcaaagtctcaggatacaaaatcaatgtacaaaaatcacaagcattcttatacaccaacaacagacaaacagagagccaaatcatgggtgaactcccattcacaattgcttcaaagagaataaaatacctaggaatccaacttacaagggatgtgaaggacctcttcaaggagaactacaaaccactgctcaaggaaataaaagaggacacaaacaaatggaagaacattccatgctcatgggtaggaagaatcaatatcgtgaaaatggccatactgcccaaggtaatttacagattcaatgccatccccatcaagctaccaatgactttcttcacagaattggaaaaaactactttaaagttcatatggaaccaaaaaagagcccgcattgccaagtcaatcctaagccaaaagaacaaagctggaggcatcacactacctgacttcaaactatactacaaggctacagtaaccaaaacagcatggtactggtaccaaaacagagatatagatcaatggaacagaacagagccctcagaaataatgccgcatatctacaactatctgatctttgacaaacctgagaaaaacaagcaatggggaaaggattccctatttaataaatggtgctgggaaaactggctagccatatgtagaaagctgaaactggatcccttccttacaccttatacaaaaatcaattcaagatggattaaagatttaaacgttaaacctaaaaccataaaaaccctagaagaaaacctaggcattaccattcaggacataggcgtgggcaaggacttcatgtccaaaacaccaaaagcaatggcaacaaaagacaaaattgacaaatgggatctaattaaactaaagagcttctgcacagcaaaagaaactaccatcagagtgaacaggcaacctacaacatgggagaaaatttttgcaacctactcatctgacaaagggctaatatccagaatctacaatgaactcaaacaaatttacaagaaaaaaacaaacaaccccatcaaaaagtgggcgaaggacatgaacagacacttctcaaaagaagacatttatgcagccaaaaaacacatgaagaaatgctcatcatcactggccatcagagaaatgcaaatcaaaaccactatgagatatcatctcacaccagttagaatggcaatcattaaaaagtcaggaaacaacagactacagaatggtagctccattgacagcttgtaccatgagcctggaaaagctgcagacactcaatgccagcctgtgaaagctgccagaaggggtgctgtaccctgcaaagccacaggggcagagctgcccaaggccatgggaacccacctcttgcatcagcatgacctcgattgcttggagtggcagagacgcagctcagtgctgctcaacagccttgttgtccatgagcccgaagctctggttgcaagccctactgagttcactcctgaaaccgaacctctcccagcatag

SEQ ID NO: 6068 - DNA, 3348 bp, Homo sapiens
  SIMILAR (1)..(3093): 981254mologous to Homo sapiens unknown,accession number AF149422,Smith-Waterman Score=5291.
atggtaaagggatcaattcaacaagaggagctaactatcctaaatatttatgcacccaatacaggagcacccagattcataaagcaagtcctgagtgacctacaaagagacttagactcccacacattaataatgggagactttaacatcccactgtcaacattagacagatcaacgagacagaaagtcaacaaggatacccaggaattgaactcagctctgcaccaagcggacctaatagacatctacagaactctccaccccaaatcaacagaatatacatttttttcagcaccacaccacacctattccaaaattgaccacatagttggaagtaaagctctcctcagcaaatgtaaaagaacagaaattataacaaactatctctcagaccacagtgcaatcaaactagaactcaggattaagaatctcactcaaagccgctcaactacatggaaactgaacaatctgctcctgaatgactactgggtacataacgaaatgaaggcagaaataaagatgttctttgaaaccaacgagaacaaagacaccacataccagaatctctgggacgcattcaaagcagtgtgtagagggaaatttatagcagtaaatgcccacaagagaaagcaggaaagatccaaaattgacaccctaacatcacaattaaaagaactagaaaagcaagagcaaacacattcaaaagctagcagaaggcaagaaataactaaaatcagagcagaactgaaggaaatagagacacaaaaaacccttcaaaaaatcaatgaatccaggagctggttttttgaaaggatcaacaaaattgatagaccgctagcaagactaataaagaaaaaaagagagaagaatcaaatagacacaataaaaaatggtaaaggggatatcaccaccgatcccacagaaatacaaactaccatcagagaatactacaaacacctctatgcaaataaactagaaaatctagaagaaatggatacattcctcgacacatacactctcccaagactaaaccaggaagaagttgaatctctgaatagaccaataacaggctctgaaattgtggcaataatcaatagtttaccaaccaaaaagagtccaggaccagatggattcacagccgaattctaccagaggtacaaggaggaactggtaccattccttctgaaactattccaatcaatagaaaaagagggaatcctccctaactcattttatgaggccagcatcattctgataccaaagccgggcagagacacaaccaaaaaagagaattttagaccaatatccttgatgaacattgatgcaaaaatcctcaataaaatactggcaaaccaaatccagcagcacatcaaaaagcttatccaccatgatcaagtgggcttcatccctgggatgcaaggctggttcaatatacgcaaatcaataaatgtaatccagcatatcaacagagccaaagacaaaaaccacatgattatctcaatagatgcagaaaaagcctttgacaaaattcaacaacccttcatgctaaaaactctcaataaattaggtattgatgggacgtatttcaaaataataagagctatctatgacaaacccacagccaatatcatactgaatgggcaaaaactggaagcattccctttgaaaaatggcacaagacagggatgccctctctcaccactcctattcaacatagtgttggaagttctggccagggcaatcaggcaggagaaggaaataaagggtattcaattaggaaaagaggaagtcaaattgtccctgtttgcagacgacatgattgtttatctagaaaaccccatcgtctcagcccaaaatctccttaagctgataagcaacttcagcaaagtctcaggatacaaaatcaatgtacaaaaatcacaagcattcttatacaccaacaacagacaaacagagaggcaaatcacgagtgaactcccattcacaattgcttcaaagagaataaaatacctaggaatccaacttacaagggatgtgaaggacctcttcaaggagaactacaaaccactgctcaaggaaataaaagaggacacaaacaaatggaagaacattccatgctcatgggtaggaagaatcaatatcgtgaaaatggccatactgcccaaggtaatttacagattcaatgccatccccatcaagctaccaatgactttcttcacagaattggaaaaaactactttaaagttcatatggaaccaaaaaagagcccgcatcgccaagtcaatcctaagccaaaagaacaaagctggaggcatcacactacctgacttcaaactatactacaaggctacagtaaccaaaacagcatggtactggtaccaaaacagagatatacatcaatggaacagaacagagccctcagaaataatgccgcatatctacaactatctgatctttgacaaacctgagaaaaacaagcaatggggaaaggattccctatttaataaatggtgctgggaaaactggctagccatatgtagaaagctgaaactggatcccttccttacaccttatacaaaaatcaattcaagatggattaaagatttaaacgttagacctaaaaccataaaaaccctagaagaaaacctaggcattaccattcaggacataggcgtgggcaaggacttcatgtccaaaacaccaaaagcaatggcaacaaaagccaaaattgacaaatgggatctaattaaactaaagagcttctgcacagcaaaagaaactaccatcagagtgaacaggcaacctacaacatgggagaaaatttttgcaacctactcatctgacaaagggctaatatccagaatctacaatgaactcaaacaaatttacaagaaaaaaacaaacaaccccatcaaaaagtgggcgaaggacatgaacagacgcttctcaaaagaagacatttatgcagccaaaaaacacatgaaaaaatgctcatcatcactggccatcagagaaatgcaaatcaaaaccactatgagatatcatctcacaccagttagaatggcaatcattaaaaagtcaggaaacaacaggcaaacagggtctggagtggacctccagcatactccagcagacctgcagcagaggggcctgactgttagaaggaaaatgaacaaacacaaaggaatagcatcaacatcaacaaaaaggacatccactcaaaagccccatctgaaggtcaccaaaatcaaagaccagaggcctacgttacaagagctcctgaaggaagcactaaatatggaaaggaacaaccagtaccagccattgcaaaaacataccaaattctaa

SEQ ID NO: 6069 - DNA, 3783 bp, Homo sapiens
  SIMILAR (1)..(3156): 951254mologous to Homo sapiens putative p150,accession number U93565,Smith-Waterman Score=5296.
atgggagactttaacaccccactgtcaacattagacagatcaacgagacagaaagtcaacaaggatacccaggaattgaacttagctctgcaccaagcggacctaatagacatctacagaactctccaccccaaatcaacagaatatacatttttttcagcaccacaccacacctattccaaaattgaccgcatagttggaagtaaagctctcctcagcaaatgtaaaagaacagaaattataacaaactatctctcacaccacagtgcaatcaaactagaactcaggattaagaatctcactcaaaaccgctcaactacatggaaactgaacaacctgctcctgaatgactactgggtacatagcgaaatgaaggcagaaataaagatgttctttgaaaccaacgagaacaaagacacaacataccagaatctctgggacacattcgaagcagtgtgtagagggaaatttatagcactaaatggccacaagagaaagcaggaaagatccaaaattgacaccctaacatcacaattaaaagaactagaaaagcaagagcaaacacattcaaaagctagcagaaggcaagaaataactaaaatcagagcagaactgaaggaaatagagatacaaaaaacccttcaaaaaattaatgaatccaggagctggttttttgaaaggatcaacaaaattgatagaccactagcaagactaataaagaaaaaaagagagaagaatctaatagacgcaataaaaactgataaaggggatatcaccaccaatcccacagaaatacaaactaccatcagagaatactacaaacacctctacgcaaataaactagaaaatcgagaagaaatggataaattcctcgacacatacactctcccaagactaaaccaggaagaagttgaatctctgaatagaacaataacaggatctgaaattgtggcaagaatcaatagcttaccaaccaaaaagagtccaggaccagatggattcacagctgaattctaccagaggtacaaggaggaactggtaccattccttctgaaactattccaatcaatagaaaaagagggaatcctccctaactcattttatgaggccagcatcattctgataccaaagccaggcagagacacaaccaaaaaagagaattttagaccaatatcgttgatgaacattgatgcaaaaatcctcaataaaatactggcaaaaggaatccagcagcacatcaaaaagcttatccaccatgatcaagtgggcttcatccctgggatgcaaggctggttcaatatacacaaatcaataaatgtaatccagcatataaacagagccaaagacaaaaaccacatgattatctcaatagatgcagaaaaagcctttgacaaaattcaacaaccctttatgctaaaaactctcaataaattaggtattgatgggacgtatttcaaaataataagagctatctatgacaaacccacagccagtatcatactgaatgggcaaaaactagaagcattccgtttgaaaactggcacaagacagggatgccctctctcaccactcctattcaacatagtgtttgaaattctggcccgggcaattaggcaggagaaggaaataaagggtattcaattaggaaaagaggaagtcaaattgtccctgtttgcaggcgacatgattgtatatctagaaaaccccattgtctcagcccaaaatctccttaagctgataagcaacttcagcaaagtctcaggatacaaaatcaatgtgcaaaaatcacaagcattcttatacaccaataacagacaaacagagagccaaatcatgagtgaactcccattcacaattgcttcaaagagaataaaatacctaggaatccaacttacaagggatgtgaaggacctcttcaaggagaactacaaaccactgctcaaggaaataaaagaggatacaaacaaatggaagaacattccatgctcatgggtaggaagaatcaatatcgtgaaaatggccatactgcccaaggtaatttatagaatcaatgccatccccatcaagctaccaatgcctttcttcacagaattggaaaaatctactttaaagttcatatggaaccaaaaaagagcccgcatcgccaagtcaatcctaagccaaaagaacaaagctggaagcatcacactacctgacttcaaactatactacaaggctacagtaaccaaaacagcatggtactggtaccaaaacagagatatagatcaatggaacagaacagagccctcagaaataacaccgcatatctacaactatctgatctttgacaaacctgagaaaaacaagcaatggggaaaggattccctatttaataaatggtgctgggaaaactggctagccatatgtagaaagctgaaactggatcccttccttacaccttatacaaaaatcaattcaagatggattaaagacttaaacgttagacctaaaaccataaaaaccctagaagaaaacctagggattaccattcaggacataggcataggcgacgacttcatgtctaaaacaccaaaaacaatggcagcaaaagacaaaatcgacaaatgggatctaattaaactaaagagcttctgcacagcaaaagaaactaccatcagagtgaacaggcaacctacaaaatgggagaaaattttcgcaacctactcttctgacaaagggctaatatccagaatctacaatgaactcaaacaaatttttaagaaaaaaacaaacaaccccatcaaaaagtgggtgaaggacatgaacagacacttctcaaaaggagacatttatgctgccaaaaaacacatgaaaaaatgctcatcatcactggccatcagagaaatgcaaatcaaaaccacaatgagataccatctcacaccagttagaatggcaatcattaaaaagtcaggaaacaacaggtgctggaggggatgtggagaaataggaacacttttacactgttggtgggactgtaaactagttcaaccattgtggaagtcagtgtggcgattcctcagggatctagaactggaaataccatttgacccagccatcccattactgggtatatacccaaaggactataaatcatgctgctataaagacacatgcacactaacttggatggagctagaagccattattctaagtgaagtactcaggaatggaaaaaccaaaaaccgtatgttctcacttataagtgggaaccaagatacgggtatgcaaaggcatacagaattctatgatggactttggcgactcagaagagggagggttgagggggcatgctatgatatcatttggccttcatttggtacagatgtatcatttgagaaacagatccacctctggctttttctcacccctcagcctgctacaattaaaatagcactacttggctatggactgttgggaaagatcctgatggctatccgagatgcaggttttgaaatctcagctatgcagatgttcaatatggatcgggttaatgttgaggaattctatgaagtttataaaggagtagtgaccgaatatcatgacatggtgacagaaatgtattctggcccttgtgtagcaatggagattcaacagaataatgctacaaagacatttcgagaattttgtggacctgctgatccttgtattgagaatagtctaaagacaagagtggaagttataatccaggtacaagatgatggtgagttggaccaggatggtggtaatagacatggtgagaaatag

SEQ ID NO: 6070 - DNA, 3723 bp, Homo sapiens
  SIMILAR (1)..(3003): 971254mologous to Homo sapiens unknown,accession number AF149422,Smith-Waterman Score=5062.
atgggagactttaacaccccactgtcaacattagacagatcaacgagacagaaagtcaacaaggatacccaggaattgaactcagctctgcaccaagcagacctaatagacatctacagaactctccaccccaaatcaacagaatatacatttttttcagcaccacaccacacctattccaaaattgaccacatagttggaagtaaagctctcctcagcaaatgtaaaagaacagaaattataacaaactatctctcagaccacagtgcaatcaaactagaactcaggattaaaaatctcactcaaagccgctcaactacatggaaactgaacaacctgctcctgaatgactactgggtacataacgaaatgaaggcagaaataaagatgttctttgaaaccaacgagaacaaagacaccacataccagaatctctgggacgcattcaaagcagtgtgtagagggaaatttatagcactaaatgcctacaagagaaagcaggaaagatccaaaattgacaccctaacatcacaattaaaagaactagaaaagcaagagcaaacacattcaaaagctagcagaaggcaagaaataactaaaatcagagcagaactgaaggaaatagagacacaaaaaacccttcaaaaaatcaatgaatccaggagctggttttttgaaaggatcaacaaaattgatagaccactagcaagactaataaagaaaaaaagagagaagaatcaaatagacacaataaaaaatgataaaggggatatcaccaccgatcccacagaaatacaaactaccatcagagaatactacaaacacctctacgcaaataaactagaaaatctagaagaaatggatacattcctcgacacatacactctcccaagactaaaccaggaagaagttgaatctctgaatagaccaataacaggttctgaaattggggcaataatcaatagtttaccaaccaaaaagagtccaggaccagatggattcacagccgaattctaccagaggtacaaggaggaactggtaccattccttctgaaactattccaatcaatagaaaaagagggaatcctccctaactcattttatgaggccagcatcattctgataccaaagccgggcagagacacaacaaaaaaagagaattttagaccaatatccttgatgaacattgatgcaaaaatcctcaataaaatactggcaaaccaaatccagcagcacatcaaaaagcttatccaccatgatcaagtgggcttcatccctgggatgcaaggctggttcaatatacgcaaatcaataaatgtaatccagcatataaacagagccaaagacaaaaaccacatgattatctcaatagatgcagaaaaagcctttgacaaaattcaacaacccttcatgctaaaaactctcaataaattaggtattgatgggacgtatttcaaaataataagagctatctatgacaaacccacagccaatatcatactgaatgggcaaaaactggaagcattccctttgaaaactggcacaagacagggatgccctctctcaccgctcctattcaacatagtgttggaagttctggccagggcaatcaggcaggagaaggaaataaagggtattcaattaggaaaagaggaagtcaaattgtccctgtttgcagacgacatgattgtttatctagaaaaccccatcgtctcagcccaaaatctccttaagctgataagcaacttcagcaaagtctcaggatacaaaatcaatgtacaaaaatcacaagcattcttatacaccaacaacagacaaacagagagccaaatcatgggtgaactcccattcacaattgcttcaaagagaataaaatacctaggaatccaacttacaagggatgtgaaggacctcttcaaggagaactacaaaccactgctcaaggaaataaaagaggacacaaacaaatggaagaacattccatgctcatgggtaggaagaatcaatatcgtgaaaatggccatactgcccaaggtaatttacagattcaatgccatccccatcaagctaccaatgactttcttcactgaattggaaaaaactactttaaagttcatatggaaccaaaaaagagcccgcatcgccaagtcaatcctaagccaaaagaacaaagctggaggcatcacactacctgacttcaaactatactacaaggctacagtaaccaaaacagcatggtactggtaccaaaacagagatatagatcaatggaacagaacagagccctcagaaataatgccgcatatctacaactatctgatctttgacaaacctgagaaaaacaagcaatggggaaaggattccctatttaataaatggtgctgggaaaactggctagccatatgtagaaagctgaaactggatcccttccttacaccttatacaaaaatcaattcaaaatggattaaagatttaaacgtcagacctaaaaccataaaaaccctagaagaaaacctaggcattaccattcaggacataggcgtgggcaaggacttcatgtccaaaacaccaaaagcaatggcaacaaaagccaaaattgacaaatgggatctaattaaactaaagagcttctgcacagcaaaagaaactaccatcagagtgaacaggcaacctaccacatgggagaaaattttcgcaacctactcatctgacaaagggctaatatccagaatctacaatgaactcaaacaaatttacaagaaaaaaacaaacaaccccatcaaaaagtgggcgaaggacatgaacagacacttctcaaaagaagacatttatgcagccaaaaaacacatgaagaaatgctcatcatcactggccatcagagaaatgcaaatcaaaaccactatgagatatcatctcacaccaactgcttgtttggaaacagcggaggaacaacaactaaataacatggagtgcgcaggcaccgaagctataaacagcctcatcagcattgccctcctgcccaagggtggaatgagccgtatcttgattgagactcaaggggacaggaccctgaagtggcacaaagagcgagcagtgtgcggagcccatatgcaggcccgagcggggcagacgacgcacagcgcaggaggatttctgctcccgcctggaattcatttgcagtcattaccttgtgggtgcgaagagttgcccagaaaacagaggatggaaagaaatcagcctccaggagtaagaactggtacaactcccttccccaagatgaaacccgaggacacagtgatagtcacaactgggtcagcccaaaagcttgcatgtggtctgccacacacacactgggagaaagcgaatgctgcctcctttaaggacacctcaggggcatccaaggtcatccacgacagcctgatatgggcctttcagctcatgactttcacctgggattggttctcatttctaagtggcacttcctcccccgtggagctttctggggacacttcatggaagtggcaaaatggtcagtggaagttccaggctttcatcaccccttcagcctccagcacacccagaaaaaccagggtgcccactctttcccccacatccgtgggcatctcccggaaggtctttgatgaaccccagttaggtctgaatcttgtgctggatgagtcacagggacactatccagccacagtggctggtcccagtagttga

SEQ ID NO: 6071 - DNA, 3897 bp, Homo sapiens
  SIMILAR (1)..(2748): 971254mologous to Homo sapiens unknown,accession number AF149422,Smith-Waterman Score=4641.
atggtaaagggatcaattcaacgagaggagctaactatcctaaatatttatgcacccaatacaggagcacccagattcataaagcaagtcctcagtgacctaaaaagagacttagactcccacacattaataatgggagactttaacaccccactgtcaacattagacagatcaacgagacagaaagtcaacaaggatacccaggaattgaactcagctctgcaccaagcagacctaatagacatctacagaactctccaccccaaatcaacagaatatacatttttttcagcaccacaccacacctattccaaaattgaccacatagttggaagtaaagctctccttagcaaatgtaaaagaacagaaattataacaaactatctctcagaccacagtgcaatcaaactagaactcaggattaagaatctcactcaaagccgctcaactacatggaaactgaacaacctgctcctgaatgactactgggtacataacgaaatgaaggcagaaataaagatgttctttgaaaccaacgagaacaaagacaccacataccagaatctctgggacgcattcaaagcagtgtgtagagggaaatttatagcactaaatgcctacaagagaaagcaggaaagatccaaaattgacaccctaacatcacaattaaaagaactagaaaagcaagagcaaacacattcaaaagctagcagaaggcaagaaataactaaaatcagagcagaactgaaggaaatagtgacacaaaaaacccttcaaaaaatcaatgaatccaggagctggttttttgaaaggatcaacaaaattgatagaccgctagcaagactaataaagaaaaaaagagagaagaatcaaatagacacaataaaaaatgataaaggggatatcaccaccgatcccacagaaatacaaactaccatcagagaatactacaaacacctctacgcaaataaactagaaaatctagaagaaatggatacattcctcgacacatacactctcccaagactaaaccaggaagaagttgaatctctgaatagaccaataacaggctctgaaattgtggcaataatcaatagtttaccaaccaaaaagagtccaggaccagatagattcacagccgaattctaccagaggtacaaggaggaactggtaccattccttctgaaactattccaatcaatagaaaaagagggaatcctccctaactcattttatgaggccagcatcattctgataccaaagccgggcagagacacaaccaaaaaagagaattttagaccaatatccttgatgaacattgatgcaaaaatcctcaataaaatactggcaaaccgaattcagcagcacatcaaaaagcttatccaccatgatcaagtgggcttcatccctgggatgcaaggctggttcaatatacgcaaatcaataaatgtaatccagcatataaacagagccaaagacaaaaaccacatgattatctcaatagatgcagaaaaagcctttgacaaaattcaacaacccttcatgctaaaaactctcaataaattaggtattgatgggacgtatttcaaaataataagagctatctatgacaaacccacagccaatatcatactgaatgggcaaaaactggaagcattccctttgaaaactggcacaagacagggatgccctctctcaccactcctattcaacatagtgttggaagttctggccagggcaatcaggcaggagaaggaaataaagggtattcaattaggaaaagaggaagtcaaattgtccctgtttgcagatgacatgattgtttatctagaaaaccccatcgtctcagcccaaaatctccttaagctgataagcaacttcagcaaagtctcaggatacaaaatcaatgtacaaaaatcacaagcattcttatacaccaacaacagacaaacagagagccaaatcatgggtgaactcccattcacaattgcttcaaagagaataaaatacctaggaatccaacttacaagggatgtgaaggacctcttcaaggagaactacaaaccactgctcaaggaaataaaagaggacacaaacaaatggaagaacattccatgctcatgggtaggaagaatcaatatcgtgaaaatggccatactgcccaaggtaatttacagattcaatgccatccccatcaagctaccaatgactttcttcacagaattggaaaaaactactttaaagttcatatggaaccaaaaaagagcccgcatcgccaagtcaatcctaagccaaaagaacaaagctggaggcatcacactacctgacttcaaactatactacaaggctacagtaaccaaaacagcatggtactggtaccaaaacagagatatagatcaatggaacagaacagagccctcagaaataatgccgcatatctacaactatctgatctttgacaaacctgagaaaaacaagcaatggggaaaggattccctatttaataaatggtgctgggaaaactggctagccatatgtagaaagctgaaactggatcccttccttacaccttatacaaaaatcaattcaagatggattaaagatttaaacattagacctaaaaccataaaaaccctagaagaaaacctaggcattaccattcaggacataggcgtgggcaaggacttcatgacagcaaaagaaactaccatcagagtgaacaggcaacctacaacatgggagaaaattttcgcaacctactcatctgacaaagggctaatatccagaatctacaatgaactcaaacaaatttacaagaaaaaaacaaacaaccccatcaaaaagtgggcgaaggacatgaacagacacttctcaaaagaagacatttatgcagccaaaaaacacatgaagaaatgctcatcctcactggccatcagagaaatgcaaatcaaaaccactatgagatatcatctcacaccagttagaatggcaatcattaaaaagtcaggaaacaacagcttcctaacattccttgggaatccacgtctgcccagctttcaggctgcaggtccacaagtccaggtgaattttctcccttgccagcgcccaggattccatggggtacagtcctgtccaatcagaacattgcattctcttggccactatgattggctcagagatgaccatgtgactcgatcaaatctgaccctaagaattttgctagaaagaccaagaagaaaagcaccattttaccctctagattttccaagaagttatgatgcaggcctagagctgttggtgccatcatgtcaccacaagggacagcctgcttggaaatggagccaacgcagaggagaatctaatactgttgctgatctgacaggaggcagtgctcaggcagtcacgttcgctcacccaccactcacttcctgccatgtggcccagttcctaacaggctacgaaccagtactagtccacggcctgggggtctgggattcctgctatatacaatatattactacaactgaagttagatgtggccacgtggcagagttccacccaatggcatgtggaggaagtgacctaactctaaaggagcagctgttctttttccatattctttcccattcagcggacaggaaaaaaatgatgatgagaccccgggcttacagacatgcctgctggaaacgctttggtacattttggatgttccagggatcatatccaaatgctgaaaatggtctccaaagctctacgggtaagtcaagctatggcgaaaatggagaaatctacaaaggtaaaacattttattcttacaagtcacgtcacctatggatgagttcctatgcatgtatgaaaacacacatggatggtgaagatttggattttttcacataa

SEQ ID NO: 6072 - DNA, 3726 bp, Homo sapiens
  SIMILAR (1)..(3249): 981254mologous to Homo sapiens unknown,accession number AF148856,Smith-Waterman Score=5590.
atggtaaagggatcaattcaacaagaggagctaactatcctaaatatttatgcacccaatacaggagcacccagattcataaagcaagtcctcagtgacctacaaagagacttagactcccacacattaataatgggagactttaacaccccactgtcaacattagacagatcaacgagacagaaagtcaacaaggatacccaggaattgaactcagctctgcaccaagcagacctaatagacatctacagaactcttcaccccaaatcaacagaatatacatttttttcagcaccacaccacacctattccaaaattgaccacatagttggaagtaaagctctcctcagcaaatgtaaaagaacagaaattataacaaactatctctcagaccacagtgcaatcaaactagaactcaggattaagaatctcactcaaagccgctcaactacatggaaactgaacaacctgctcctgaatgactactgggtacataacgaaatgaaggcagaaataaagatgttctttgaaaccaacgagaacaaagacaccacataccagaatctctgggacgcattcaaagcagtgtgtagagggaaatttatagcactaaacgtctacaagagaaagcaggaaagatccaaaattgacaccctaacatcacaattaaaagaactagaaaagcaagagcaaacacattcaaaagctagcagaaggcaagaaataactaaaatcagagcagaactgaaggaaatagagacacaaaaaacccttcaaaaaatcaatgaatccaggagctggttttttgaaaggatcaacaaaattgatagaccactagcaagactaataaagaaaaaaagagagaagaatcaaatagacacaataaaaaatgataaaggggatatcaccaccgatcccacagaaatacaaactaccatcagagaatactacaaacacctctatgcaaataaactagaaaatctagaagaaatggatacattcctcgacacatacactctcccaagactaaaccaggaagaagttgaatctctgaatagaccaataacaggctctgaaattgtggcaataatcaatagtttactaaccaaaaagagtccaggaccagatggattcacagccgaattctaccagaggtacaaggaggaactggtaccattccttctgaaactattccaatcaatagaaaaagagggaatcctccctaactcattttatgaggccagcatcattctgataccaaagccgggcagagacacaaccaaaaaagagaattttagaccaatatccttgatgaacattgatgcaaaaatcctcaataaaatactggcaaaccgaatccagcagcacatcaaaaagcttatccaccatgatcaagtgggcttcatccctgggatgcaaggctggttcaatatacgcaaatcgataaatgtaatccagcatataaacagagccaaagacaaaagccacatgattatctcaatagatgcagaaaaagcctttgacaaaattcaacaacccttcatgctaaaaactctcaataaattaggtattgatgggacgtatttcaaaataataagagctatctatgacaaacccacagccaatatcatactgaatgggcaaaaactggaagcattccctttgaaaactggcacaagacagggatgccctctctcaccgctcctattcaacatagtgttggaagttctggccagggcaatcaggcaggagaaggaaataaagggtattcaattaggaaaagaggaagtcaaattgtccctgtttgcagacgacatgattgtttatctagaaaaccccatcgtctcagcccaaaatctccttaagctgataagcaacttcagcaaagtctcaggatacaaaatcaatgtacaaaagtcacaagcattcttatacaccaacaacagacaaacagagagccaaatcatgggtgaactcccattcataattgcttcaaagagaataaaatacctaggaatccaacttacaagggatgtgaaggacctcttcaaggagaactacaaaccactgctcaaggaaataaaagaggagacaaacaaatggaagaacattccatgctcatgggtaggaagaatcaatatcgtgaaaatggccatactgcccaaggtaatttacagattcaatgccatccccatcaagctaccaatgactttcttcacagaattggaaaaaactactttaaagttcatatggaaccaaaaaagagcccgcatcgccaagtcaatcctaagccaaaagaacaaagctggaggcatcacactacctgacttcaaactatactacaaggctacagtaaccaaaacagcatggtactggtaccaaaacagagatatagatcaatggaacagaacagagccctcagaaataacgccgcatatctacaactatctgatctttgacaaacctgagaaaaacaagcaatggggaaaggattccctatttaataaatggtgctgggaaaactggctagccatatgtagaaagctgaaactggatcccttccttacaccttatacaaaaatcaattcaagatggattaaagatttaaacgttagacctaaaaccataaaaaccctagaagaaaacctaggcattaccattcaggacataggcgtgggcaaggacttcatgtccaaaacaccaaaaacaatggcaacaaaagccaaaattgacaaatgggatctaattaaactaaagagcttctgcacagcaaaagaaactaccatcagagtgaacaggcaacgtacaacatgggagaaaattttcgcaacctactcatctgacaaagggctaatatccagaatctacaatgaactcaaacaaatttacaagaaaaaaacaaacaaccccatcaaaaagtgggtgaaggacatgaacagacacttctcaaaagaagacatttatgcagccaaaaaacacatgaagaaatgctcatcatcactggccatcagagaaatgcaaatcaaaaccactatgagatatcatctcacaccagttagaatggcaatcattaaaaagtcaggaaacaacaggtgctggagaggatgtggagaaataggaacacttttacactgttggtgggactgtaaactagttcaaccattgtggaagtcagtgtggcgattcctcagggatctagaactagaaataccatttgacccagacatcccattactggctgcagggccaggttctgcagggttgcggctcagtatggtgggtgcatcaccaccatcagtgacaactggtccaggccatttgctccttatgcatgattatcttgataattggactgctgagaggacagaaagcatttccatgctgctggatcataggctctgctgtaagggaacaagtaattatgcaggcactcaccatgcacacttgaccagcacagcgttgaagaacaggtctcacatttccaccttgttgatgaaagcagcttggagacatgctgtcaatgaacaagctgtaaataatgtaatgttcttaataaataagtgtggacaaatcatgttgcaaaacaaggaacttagtgtcttatggggtgaaaatgtcattgaagagcacacagtaatatgttggggtcagcttgatgactcacaagaactgattaaccttccaaaaggtgccaatccagagtatgttagttctttcttcatgtaa

SEQ ID NO: 6073 - DNA, 3783 bp, Homo sapiens
  SIMILAR (1)..(3045): 981254mologous to Homo sapiens unknown,accession number AF148856,Smith-Waterman Score=5206.
atggtaaagggatcaattcaacaagaggagctaactatcctaaatatttatgcacccaatacaggagcacccagattcataaagcaagtcctgagtgacatacaaagagacttagactcccacacattaataatgggagactttaacaccccactgtcaacattagacagatcaacgagacagaaagtcaacaaggatacccaggaattgaactcagctctgcaccaagcggacctaatagacatctacagaactctccaccccaaatcaacagaatatacatttttttcagcaccacaccacacctattccaaaattgaccacatagttggaagtaaagctctcctcagcaaatgtaaaagaacagaaattataacaaactgtctctcagaccacggtgcaatcaaactagaactcaggattaagaatctcactcaaagccgctcaactacatggaaactgaacaacctgctcctgaatgactactgggtacataacgaaatgaaggcagaaataaagatgttctttgaaaccaacgagaacaaagacaccacataccagaatctctgggacgcattcaaagcagtgtgtagagggaaatttatagcactaaatgcctacaagagaaagcaggaaagatccaaaatcgacaccctaacatcacaattaaaagaactagaaaagcaagagcaaacacattcaaatgctagcagaaggcaagaaataactaaaatcagagcagaactgaaggaaatagagacacaaaaaacccttcaaaaaatcaatgaatccaggagctggttttttgaaaggatcaacaaaattgatagaccgctagcaagactaataaagaaaaaaagagagaagaatcaaatagacacaataaaaaatgataaaggggatatcaccaccgatcccacagaaatacaaactaccatcagagaatactacaaacacctctacgcaaataaactagaaaatctagaagaaatggatacattcctcgacacatacactctcccaagactagaccaggaagaagttgaatctctgaatagaccaataacaggctctgaaattgtggcaataatcaatagtttaccaaccaaaaagagtccaggaccagatggattcacagccgaattctaccagaggtacaaggaggaactggtaccattccttctgaaactattccaatcaatagaaaaagagggaatcctccctaactcattttatgaggccagcatcattctgataccaaagccgggcagagacacaaccaaaaaagagaattttagaccaatatccttgatgaacattgatgcaaaaatcctcaataaaatactggcaaaacgaatccagcagcacatcaaaaagcttatccaccatgatcaagtgggcttcatccctgggatgcaaggctggttcaatatatgcaaatcaataaatgtaatccagcatataaacagagccaaagacaaaaaccacatgattatctcaatagatgcagaaaaagcctttgacaaaattcaacaacccttcatgctaaaaactctcaataaattaggtattgatgggacgtatttcaaaataataagagctatctatgacaaacccacagccaatatcatactgaatgggcaaaaactggaagcattccctttgaaaactggcacaagacagggatgccctctctcaccgctcctattcaacatagtgttggaagttctggccagggcaatcaggcaggagaaggaaataaagggtattcaattaggaaaagaggaagtcaaattgtccctgtttgcagacgacatgattgtttatctagaaaaccccatcgtctcagcccaaaatctccttaagctgataagcaacttcagcaaagtctcaggatacaaaatcaatgtacaaaaatcacaagcattcttatacaccaacaacagacaaacagagagccaaatcatgagtgaactcccattcacaattgcttcaaagagaataaaatacctaggaatccaacttacaagggatgtgaaggacctcttcaaggagaactacaaaccactgctcaaggaaataaaagaggacacaaacaaatggaagaacattccatgctcatgggtaggaagaatcaatattgtgaaaatggccatactgcccaaggtaatttacagattcaatgccatccccatcaagctaccaatgactttcttcacagaattggaaaaaactactttaaagttcatatggaaccaaaaaagagcccgcatcgccaagtcaatcctaagccaaaagaacaaagctggaggcatcacactacctgacttcaaactatattacaaggctacagtaaccaaaacagcatggtactggtaccaaaacagagatatagatgaatggaacagaacagagccctcagaaataatgccgcatatctacaactatctgatctttgacaaacctgagaaaaacaagcaatggggaaaggattccctatttaataaatggtgctgggaaaactggctagccatatgtagaaagctgaaactggatccctttcttacaccttatacaaaaatcaattcaagatggattaaagatttaaacgttagacctaaaaccataaaaaccctagaagaaaacctagacattaccattcaggacataggcgtgggcaaggacttcatgtccaaaacaccaaaagcaatggcaacaaaagacaaaattgacaaatgggatctaattaaactaaagagcttctgcacagcaaaagaaactaccatcagagtgaacaggcaacctacaacatgggagaaaattttcgcaacctactcatctgacaaagggctaatatccagaatctacaatgaactcaaacaaatttacaagaaaaaaacaaacaaccccatcaaaaagtgggtgaaggacatgaacagacacttctcaagagaagacatttatgcagccaaaaaacacatgaaaaaatgctcatcatcactggccatcagagaaatgcaaatcaaaaccactatgaggttttactgggatttaataatgcttataatgatggttggaaatctagtcatcataccagttggaatcacattctttacagagcaaacaacaacaccatggattattttcaatgtggcatcagatacagttttcctattggacctgatcatgaattttaggactgggactgtcaatgaagacagttctgaaatcatcctggaccccaaagtgatcaagatgaattatttaaaaagctggtttgtggttgacttcatctcatccatcccagtggattatatctttcttattgtagaaaaaggaatggattctgaagtttacaagacagccagggcacttcgcattgtgaggtttacaaaaattctcagtctcttgcgtttattacgactttcaaggttaattagatacatacatcaatgggaagaggaacgcagctcctcaccagcaacagaacaaagctggacggagaatgactttgataagttgagagaaggcttcagacgatcaaactactctgagctaaaggaggaagttcgaacccttggcaaagaagttaaaaaccttgaaaaaaaattagacgaatggctaactagaataatcaatgcagagaagtccttaaaggacctgatggagctgaaaaccatggcacgagaactacatgaccaatgcacaagcctcagtagccgatttgatgaactggaagaaagagtatcagtgatggaagatcaaatgaatgaaatgaagtga

SEQ ID NO: 6074 - DNA, 3855 bp, Homo sapiens
  SIMILAR (1105)..(3684): 951254mologous to Homo sapiens putative p150,accession number U93563,Smith-Waterman Score=4225.
atggctgcctggaacctgctacttaaatcatatgcatattggggaggtctaaggaaggaagatttccactgtttagaccggaagaccctgaggacagtatcctttctggctgccctgctgtcatatgagtccatagggggcaaaggaaaactaacaaccagaaaggacatctacaccgaaaacccatctgtacatcaccatcatcaaagaccaaaagtagataaaaccacaaagatggggaaaaaacagaacagaaaaactggaaactctaaaatgcagagcgcctctcctcctccaaaggaacgcagttcctcaccagcaacagaacaaagctggatggagaatgattttgaagagctgagagaagaaggcttcagacgatcaaattactctgagctacgggaggacattcaaaccaaaggcaaagaagttgaaaactttgaaaaaaatttagaagaatgtataactagaataaccaatacagagaagtgcttaaaggagctgatggagctgaaaaccaaggctcgagaactacgtgaagaatgcagaagcctcaggagccgatgcgatcaactggaagaaagggtatcagcaatggaagatgaaatgaatgaaatgaagcgagaagggaagtttagagacaaaagaataaaaagaaatgagcaaagcctccaagaaatatgggactatgtgaaaagaccaaatctacgtctgattggtgtacctgaaagtgatgtggagaatggaaccaagttggaaaacactctgcaggatattatccaggagaacttccccagtctagcaaggcaggccaacgttcagattcaggaaatacagagaacgccacaaagatactcctcgagaagagcaactccaagacacataattgtcagattcaccaaagttgaaatgaaggaaaaaatgttaagggcagccagagagaaaggtcgggttaccctcaaaggaaagcccatcagactaacagcggatctctcggcagaaaccctacaagccagaagagagtgggggccaatattcaacattcttaaagaaaagaattttcaacccagaatttcatatccagccaaactaagcttcataagtgaaggagaaataaaatactttatagacaagcaaatgctgagagattttgtcaccaccaggcctgccctaaaagagctcctgaaggaagcgctaaacatggaaaggaacaaccggagaaagcaggaaagatccaaaattgacaccctaacatcacaattaaaagaactagaaaagcaagagcaaacacattcaaaagctagcagaaggcaagaaataactaaaatcagagcagaactgaaggaaatagagacacaaaaaacccttcaaaaaatcaatgaatccaggagctggttttttgaaaggatcaacaaaattgatagaccgctagcaagactaataaagaaaaaaagagagaagaatcaaatagacacaataaaaaatgataaaggggatatcaccactgatcccacagaaatacaaactaccatcagagaatactacaaacacctctacgcaaataaactagaaaatctagaagaaatggatacattcctcgacacatacactctcccaagactaaaccaggaagaagttgaatctctgaatagaccaataacaggctctgaaattgtggcaataatcaatagtttaccaaccaaaaagagtccaggaccagatggattcacagccgaattctaccagaggtacaaggaggaactggtaccattccttctgaaactattccaatcaatagaaaaagagggaatcctccctaactcattttatgaggccagcatcattctgataccaaagccgggcagagacacaaccaaaaaagagaattttagaccaatatccttgatgaacattgatgcaaaaatcctcaataaaatactggcaaaccgaatccagcagcacatcaaaaagcttatccaccatgatcaagtgggcttcatccctgggatgcaaggctggttcaatatacgcaaatcaataaatgtaatccagcatataaacagagccaaagacaaaaaccacatgattatctcaatagatgcagaaaaagcctttgacaaaattcaacaacccttcatgctaaaaactctcaataaattaggtattgatgggaagtatttcaaaataataagagctatctatgacaaacccacagccaatatcatactgaatgggcaaaaactggaagcattccctttgaaaactggcacaagacagggatgccctctctcaccgctcctattcaacatagtgttggaagttctggccagggcaatcaagcaggagaaggaaataaagggtattcagttaggaaaagaggaagtcaaattgtccgtgtttgcagacgacatgattgtttatctagaaaaccccatcgtctcagcccaaaatctccttaagctgataagcaacttcagcaaagtctcaggatacaaaatcaatgtacaaaaatcacaagcattcttatacaccaacaaccgacaaacagagagccaaatcatgagtgaactcccattcacaattgcttcaaagagaataaaatacctaggaatccaacttacaagggatgtgaaggacctcttcaaggagaactacaaaccactgctcaaggaaataaaagaggacacaaacaaatggaagaacattccatgctcatgggtaggaagaatcaatatcgtgaaaatggccatactgcccaaggtaatttacagattcaatgccatccccatcaagctaccaatgactttcttcacagaattggaaaaaactactttaaagttcatatggaaccaaaaaagagcccgcatcgccaagtcaatcctaagccaaaagaacaaagctggaggcatcacactacctgacttcaaactatactacaaggctacagtaaccaaaacagcatggtactggtaccaaaacagagatatagatcaatggaacagaacagagccctcagaaataatgccgcatatctacaactatctgatctttgacaaacctgagaaaaacaagcaatggggaaaggattccctatttaataaatggtgctgggaaaactggctagccatatgtagaaagctgaaactggatcccttccttacaccttatacaaaaatcaattcaagatggattaaagatttaaacgttagacttaaaaccataaaaaccctagaagaaaacctaggcattaccattcaggacataggcgtaggcaaggacttcatgtccaaaacaccaaaagcaatggcaacaaaagccaaaattgacaaatgggatctaattaaactaaagagcttctgcacagcaaaagaaactaccatcagagtgaacaggcaacctacaacatgggagaaaattttcgcaacctactcatctgacaaagggctaatatccagaatctacaatgaactcaaacaaatttacaagaaaaaaacaaacaaccccatcaaaaagtgggcaaaggacatgaacagacacttctcaaaagaagacatttatgcagccaaaaaacacatgaagaaatgctcatcatcactggccatcagagaaatgcaaatcaaaaccactatgagatatcatctcacaccagttagaatggcaatcattaaaaagtcaggaaacaacagcagccagatgccactgactagctcagataacactgctgtcaactgtaaaaaattaagatccaaaccagatgaaattgccaaagagtcagaagctcctccaggcttagccagctttcacctttgctcatcatacatctatggggctcctcttaactcacagatgggctag

SEQ ID NO: 6075 - DNA, 3348 bp, Homo sapiens
  SIMILAR (1)..(2973): 951254mologous to Homo sapiens putative p150,accession number U93563,Smith-Waterman Score=4940.
atgggagactttaacatcccactgtcaacattagacagatcaacgagacagaaagtcaacaaggatacccaggaattgaactcagctctgcaccaagcggacctcatagatagctacagaactctccaccccaaatcaacagaatatacatttttttcagcaccacaccacacctattccaaaattgaccacatacttggaagtaaagctctcctcagcaaatgtaaaagaacagaaattataacaaactatctctcagaccacagtgcaatcaaactagaactcaggattaagaatctcactcaaaactgctcaactacatggaaactgaacaacctgctcctgaatgactactgggtacataacgaaatgaaggcagaaataaagatgttctttgaaaccaatgagaacaaagacacaacataccacaatctctgggatgcattcaaagcagtgtgtagagggaaatttatagcactaaatgcccacaagagaaagcaggaaagatccaaaattgacaccctaacatcacaattaaaagaactagaaaagcaagagcaaacacattcaaaagctagcagaaggcaagaaataactaaaatcagagcagaactgaaggaaatagagacacaaaaaacccttcaaaaaattaacgaatccaggagctgggtttttgaaaggatcaacaaaattgatagaccgctagcaagactaacaaagaaaaaaagcgagaagaatcaaatagatgcaataaaaaatgataaaggggatatcaccaccgatcctacagaaatacaaactaccatcagagaatactacaaacacctctacgcaaataaactagaaaatctagaagaaacggataaattcctcgacacatacactctcccaagacgaaaccaggaagaagttgaatctctgaatagaccaataacaggagctgaaattgtggcaataatcaataacttaccaaccaaaaagagtccaggatcagatggattcacagccgaattctaccagaggtacaaggaggaactggtaccattccttctgaaactattccaatcaatagaaaaagagggaatcctccctaactcattttatgaggccagcatcatcctgataccaaagccgggcagagacacaaccaaaaaagagaattttagaccaatatccttgatgaacattgatgcaaaaatcctcaataaaatactggcaaaccaaatccagcagcacatcaaaaagcttatccaccatgatcaagtgggcttcatccctgggatgcaaggctggttcaatatatgcaaatcaataaatgtaatccagcatataaacagaaccaaagacaaaaaccacatgattatctcaatagatgcagaaaaggcctttgacaaaattcaacaacccttcatgctaaaaactctcaataaattaggtattgatgggacttatctcaaaataataagagctatctatgacgaacccacagccaatatcatactgaatgggcaaaaactggaagcattccctttgaaaactggcacaagacagggatgccctctctcaccactcctattcaacatagtgttggaagttctggccagggcaattaggcaggagagggaaataaagggtattcaattaggaaaagaggaagtcaaattgtccctgtttgcagatgacatgattgtatatctagaaaaccccattgtctcagcccaaaatctccttaagctgataagcaacttcggcaaagtctcaggatacaaaatcaatgtacaaaaatcacaagcattcttaaacaccaacaacagacaaacagagagccaaatcatgagtgaactcccattcacaattgcttcaaagagaataaaatacctaggaatccaacttacaagggatgtgaaggacctcttcaaggagaactacaaaccactgctcaaggaaataaaagaggatacaaacaaatggaagaacattccatgctcatgggtaggaagaatcaatatcatgaaaatggccatactgcccaaggtaatttacagattcaatgccatccccatcaagctaccaatgactttcttcacagaattggaaaaaactactttaaagttcatatggaaccaaaatagagcctgcatcgccaagtcaatcctaagccaaaagaacaaagctggaggcatcacactacctgacctcaaactatactacaaggctacagtaaccaaaacagcatggtactggtaccaaaacagagatatagatcaatggaacagaacagagccctcagaaataacgctgcatatctacaactatctgatctttgacaaacctgagaaaaacaagcaatggggaaaggattccctatttaataaatggtgctgggaaaactggctagccatatgtagaaagctgaaactggatcccttccttacaccttatacaaaaatcaattcaagatggattaaagacttaaacattagacctaaaaccataaaaaccctagaagaaaacctaggcattaccattcaggacataggcatgggcaaggacttcatgtctaaaacaccaaaagcaatggcaaccaaagccaaaattgacaaatgggatctaattaaactaaagagcttctgcacagcaaaagaaactaccatcagagtgaacaggcaacctacaaaatgggggaaaattttcgcaacctactcatctgacaaagggctaatatccagaatctacaatgaactcaaacaaatttacaagaaaaaaacaaacaaccccatcaaaaagtttgcaaaggatatgaacagacacttctcaaaaaaagacatctatgcagccaaaaaacacatgaaaaaatgctcaccatcactggccatcagagaaatgcaaatcaaaaccacaatgagataccatctcacaccagttagaatggcaatcattaaaaagtcaggaaacaacagaactggccgtggtttacatccaggaagggattggtcagtcacctgtgccaggtccccgggggatcctgagcccagcggtataaagggtggctgtgggagtggcacaccctctcccagccccagcaagcaaaccgtcaggcggccgtggactcagatcccggagatgaagcccctgctcctggccgtcagcctcggcctcattgctgccctgcaggcccaccacctcctggcctcagacgaggagattcaggatgtgtcagggacgtggtatctgaaggccatgacggtggacagggagttccctgagatgaatctggaatcggtgacacccatgaccctcacgaccctggaagggggcaacctggaagccaaggtcaccatgctgtga

SEQ ID NO: 6076 - DNA, 6136 bp, Homo sapiens
  SIMILAR (1016)..(3940): 971254mologous to Homo sapiens putative p150,accession number U93563,Smith-Waterman Score=4937.
atggggaaaaaacagaacagaaaaactggaaactctaaaacgcagagtgcctctcctcctccaaaggaacgcagttcctcaccagcaacggaaaaaagctggatggagaatgactttgacgagctgagagaagaaggtttcagacgatcaaattactctgagctacgggaggacattcaaaccaaaggcaaagaagttgaaaactttgaaaaaaatttagaagaatgtataactagaataaccaatacagagaagtgcttaaaggagctgatggagctgaaaaccaaggctcgagaactacgtgaagaatgcagaagcctcaggagccgatgtgatcaactggaagaaagggtatcagcaatggaagatgaaatgaatgaaatgaagcgagaagggaagtttagagaaaaaagaataaaaagaaatgagcaaagcctccaagaaatatgggactatgtgaaaagaccaaatctacgtctgactggtgtacctgaaagtgacggggagaatggaaccaagttggaaaacactctgcaggatattatccaggagaacttccccaatctagcaaggcaggtcaatgttcagattcaggaaatacagagaacgccacaaagatactcctcgagaagagcaactccaagacacataattgtcagattcaccaaagttgaagtgaaggaaaaaatgttaagggcagccagagagaaaggtcgggttaccctcaaagggaagcccatcagactaacagcggatctctcggcagaaaccctacaagccagaagagagtgggggccaatattcaacattcttaaagaaaagaattttcaacccagaatttcatatccagccaaactaagcttcataagtgaaggagaaataaaacactttacagacaagcaaatgctgagagattttgtcaccaccaggcctgccctaaaagagctcctgaaggaagtgctaaacatggaaaggaacaaccagtaccagccgctgcaaaatcatgccaaaatacagatcaacgagacagaaagtcaacaaggatacccaggaattgaactcagctctgcaccaagcggacctaatagacatctacagaactctccacaccaaatcaacagaatatacatttttttcagcaccacaccacacctattccaaaattgaccacatagttggaagtaaagctctcctcagcaaatgtgaaagaacagaaattataacaaactatctctcagaccacagtgcaatgaaactagaactcaggattaagaatctcactcaaaactgctcaactacatggaaactaaacaacctgctcctgaatgactactgggtacataacgaaatgaaggcagaaataaagatgttctttgaaaccaacgagaacaaagacacaacaaaccagaatctctgggacgcattcaaagcagtgtgtagagggaaatttatagcactgaatgcccacaagagaaagcaggaaagatccaaaattgacaccctaacatcacaattaaaagaactagaaaagcaagagcaaacacattcaaaagctagcagaaggcaagaaataactaaaatcagagcagaactgaaggaaatagagacacaaaaaacccttcaaaaaatcaatgaatccaggagctggttttttgaaaggatcaacaaaattgatagaccgctagcaagactaataaagaaaaaaagagagaagaatcaaatagacacaataaaaaatgataaaggggatatcaccaccgatcccacagaaatacaaactaccatcagagaatactacaaacacctctacgcaaataaactagaaaatctagaagaaattaataaattgctcgacacatacactctcccaagactaaaccaggaagaagttgaatctctgaatagaccaataacaggagctgaaattggggcaataatcaatagtttaccaaccaaaaagagtccaggaccagatggattcacagccgaattctaccagaggtacaaggaggaactggtaccattccttctgaaactattccaatcaatagaaaaagaggaaatcctccctaactcattttatgaggccagcatcattctgataccaaagccgggcagagacacaaccaaaaaagagaattttagaccaatatccttgatgaacatcgatgcaaaaatcctcaataaaatactggcaaaccgaatccagcagcacatcaaaaagcttatccaccatgatcaagtgggcttcttccctgggatgcaaggctggttcaatatacgcaaatcaataaatgtaatccagcatataaacagagccaaagacaaaaaccacatgattatctcaatagatgcagaaaaagcctttgacaaaattcaacaacccttcatgctaaaaactctcaataaattaggtattgatgggacgtatttcaaaataataagagctatctatgacaaacccacagccaatatcatactgaatgggcaaaaactggaagcattccctttgaaaactggcacaagacagggatgccctctctcaccgctcctattcaacatagtgttggaagttctggccagggcaatcaggcaggagaaggaaataaagggtattcaattaggaaaagaggaagtcaaattgtccctgtttgcagacgacatgattgtttatctagaaaaccccatcgtctcagcccaaaatctccttaagctgataagcaacttcagcaaagtctcaggatacaaaatcaatgtacaaaaatcacaagcattcttatacaccagcaacagacaaacagagagccaaatcatgagtgaactcccattcacaattgcttcaaagagaataaaatacctaggaatccaacttacaagggatgtgaaggacctcttcaaggagaattacaaaccactgctcaaggaaataaaagaggatacaaacaaatggaagaacattccatgctcatgggtaggaagaatcaatatcgtgaaaatggccatactgcccaaggtaatttacagattcaatgccatccccatcaagctaccaatgactttcttcacagaattggaaaaaactactttaaagttcatatggaaccaaaaaagagcccgcatcgccaagtcaatcctaagccaaaagaacaaagctggaggcatcacactacctgacttcaaactatactacaaggctacagtaaccaaaacagcatggtactggtaccaaaacagagctatagatcaatggaacagaacagagccctcagaaataacaccgcatacctacaactatctgatctttgacaaacctgagaaaaacaagcaatggggaaaggattccctatttaataaatggtgctgggaaaactggctagccatatgtagaaagctgaaactggatcccttccttacaccttatacaaaaatcaattcaagatggattaaagatttaaacgttagacctaaaaccataaaaaccctagaagaaaacctaggcattaccattcaggacataggcatgggcaaggacttcatgtccagaacaccaaaagcaatggcaaccaaagccaaaattgacaaatgggatctaattaaactaaagagcttctgcacagcaaaagaaactaccatcagagtgaacaggcaacctacaacatgggagaaaattttcgcaacctactcatctgacaaagggctaatatccagaatctacaatgaactcaaacaaatttacaagaaaaaaacaaacaaccccatcaaaaagtgggagaaggacatgaacagacacttctcaaaagaagacatttatgcagccaaaaaacacatgaaaaaatgctcatcatcactggccatcagagaaatgcaaatcaaaaccactatgagatatcatctcacaccagttagaatggcaatcattaaaaagtcaggaaacaacagacttcttggaagtgccctagaatcagcaggtccaaatcaaactcagctggccgtgggtcagccattgcagccccacctgccacgggctccaggaagagcagtcatcagtatggagaaggccggactatgctcagaagccactgagcaggtgctccatagactcaccagctggagcggggtcacatctcggaggcaccgtcagcaccaggagggcagccaagcaagggtatggcatttccgagcctctgcggtcaagggtatcgcatttccgagcctctgcggtcaagggtatggcgtttccgagcctctgcggtcaagggtatggcgtttccgagcctctgcagtcaagagcccagagatgggttgtcggggcagctgtgggggcatcccagatgtgggtgccaacatgcttgatgacctgacaccagtgcatcatgacctgacaccagcgcgcaatgacctgacaccagtgcacgatgacctggcaccagtgcgtgatgacctgacaccagtgcgtcatgacctgacaccagtgcgtgatgacctggcaccagtgcgtgatgacctgacaccagtgtgtgatgacctggcaccagtgtgcgatgacgtggccccagtgtgccatgacctggcaccagtgtgtgatgacctgacaccagtgtgtgatgacctggcaccagtgcacaatgaccttgcagcaatccagacctacctgcaagctgcaagcgatgtgcctgtgggacacagcctggaccccgctgcgaactacaactccccgaaattccgctcccggaaccagagatacatgagggccgtcagcaccctgagccaggccagctgcgtgagccaggtgagcgaggcggagatcaatgggcaattcgagtccgtgtgcgagtccgtcttcagtgaagttgaatctcaggccatggatgccctcgacctcccgggatgtttccgaacaaggagtcacagctaccttcgagccattcaagccggctactcccaagatgacgaatgtattcccatgatgacaccctctgacatcacctccaccatcaggtcaacagcagaaggcgagcgtgatgcagataaatcgtgcatctgtatcaggaactgcatatgtaagccagaattgctcgggttttcagatattgtggagatggaagtactgttgaatctgcctcccatacccctcgaacccgccggtcctcacctgtgtcaccctccaacccgccggccctcacctgtgtcaccctcgaccccgccggtcctcacctgtgtcaccctccaacccgccggccctcacctgtgtcaccctcgaccccgccggccctcacctgtgtcaccctcgaccccgccggccctcacctgtgtcaccctcgaccccgccggtcctcacctgtgtcaccctcgaccccgccggtcctcacctgtgtcaccctccaacccgccggccctcacctgtgtcaccctcgaccccgccggtcctcacctgtgtcaccctccaacccgccggccctcacctgtgtcaccctcgaacccgccggccctcacctgtgtcaccctcgaccccgccggtcctcacctgtgtcaccctccaacccgccggtcctcacctgtgtcaccctccaacccgccggccctcacctgtgtcaccctccaacccgccggccctcacctgtgtcaccctccaacccgccggcccccacctgtgtcaccctccaacccgccggccctcacctgtgtcaccctcgaccccgccggtcctcacctgtgtcaccctccaacccgccggtcctcacctgtgtcaccctcgaccccgccggtcctcacctgtgtcaccctcacaaccatccggccctcacatgtgtcacccacgaccccgccggtcctcacctgtgtcaccctcgaccccgccggtcctcacctgtgtcaccctccaacccgccggccctcacctgtgtcaccctcgaccccgccggccctcacctgtgtcaccctccaacccgccggccctcacctgtgtcaccctccaacccgccggccctcacctgtgtcaccctccaacccgccggccctcacatgtgtcaccctcgaccccgccggtcctcacctgtgtcaccctcgaccccgccggtcctcacctgtgtcaccctccaacccgccggtcctcacctgtgtcacccctcggggctga

SEQ ID NO: 6077 - DNA, 3924 bp, Homo sapiens
  SIMILAR (712)..(3510): 981254mologous to Homo sapiens putative p150,accession number U93563,Smith-Waterman Score=4809.
atggggaaaaaacagaacagaaaaactggaaactctaaaacgcagagcgcctctcctcctccaaaggaacgcagttcctcaccagcaacagaacaaagctggatggagaatgattttgacgagctgagagaagaaggcttcagacgatcaaattactctgagctatgggaggacattcaaaccaaaggcaaagaagttgaaaactttgaaaaaaatttagaagaatgtataactagaataaccaatacagagaagtgcttaaaggagctgatggagctgaaaaccaaggctcgagaactacatgaagaatgcagaagcctcaggagccgatgcgatcaactggaagaaagggtatcagcaatggaagatgaaatgaatgaaatgaagcgagaagggaagtttagagaaaaaagaataaaaagaaatgagcaaagcctccaagaaatatgggactatgtgaaaagaccaaatctacgtctgattggtgtacctgaaagtgatgtggagaatggaaccaagttggaaaacactctgcaggatattatccaggagaacttccccaatctagcaaggcaggccaacgttcagattcaggaaatacagagaatgccacaaagatactcctcgagaagagcaactccaagacacataattgtcagattcaccaaagttgaaatgaaggaaaaaatgttaagggcagccagacagaaagcaccacaccacacctattccaaaattgaccacatagttggaagtaaagctctcctcagcaaatgtaaaagaacagaaattataacaaactatctctcagaccacagtgcaatcaaactagaactcaggattaagaatctcactcaaagccgctcaactacatggaaactgaacaacctgctcctgaatgactactgggtacataacgaaatgaaggcagaaataaagatgttctttgaaaccaacgagaacaaagacaccacataccagaatctctgggacacattcaaagcagtgtgtagagggaaatttatagcactaaatgcctacaagagaaagcaggaaacatccaaaattgacaccataacatcacaattaaaagaactagaaaagcaagagcaaacacattcaaaagctagcagaaggcaagaaataactaaaatcagagcagaactgaaggaaatagagacacaaaaaacccttcaaaaaatcaatgaatccaggagctggttttttgaaaggatcaacaaaattgatagaccgctagcaagactaataaagaaaaaaagagagaagaatcaaatagacacaataaaaaatgataaaggggatatcaccaccgatcccacagaaatacaaactaccatcagagaatactacaaacacctctacgcaaataaactagaaaatctagaagaaatggatacattcctcgacacatacactctcccaagactaaaccaggaagaagttgaatctctgaatagaccaataacaggctctgaaattgtggcaataatcaatagtttaccaaccaaaaagagtccaggaccagatggattcacagccgaattctaccagaggtacaaggaggaactggtaccattccttctgcaactattccaatcaatagaaaaagagggaatcctccctaactcattttatgaggccagcatcattctgataccaaagccgggcagagacacaaccaaaaaagagaattttagaccaatatccttgatgaacattgatgcaaaaatcctcaataaaatactggcaaaccgaatccagcagcacatcaaaaagcttatccaccatgatcaagtgggcttcatccctgggacgcaaggctggttcaatatacgcaaatcaataaatgtaatccagcatataaacagagccaaagacaaaaaccacatgattatctcaatagatgcagaaaaagcctttgacaaaattcaacaacccttcatgctaaaaactctcaataaattaggtattgatgggacatatttcaaaataataagagctatctatgacaaacccacagccaatatcatactgaatgggcaaaaactggaagcattccctttgaaaactggcacaagacagggatgccctctctcaccgctcctattcaacatagtgttggaagttctggccagggcaatcaggcaggagaaggaaataaagggtattcaattaggaaaagaggaagtcaaattgtccctgtttgcagacgacatgattgtttatctagaaaaccccatcgtctcagcccaaaatctccttaagctgataagcaacttcagcaaagtctcaggatacaaaatcaatgtacaaaaatcacaagcattcttatacaccaataacagacaaacagagagccaaatcatgagtgaactcccattcacaattgcttcaaagagaataaaatacctaggaatccaacttacaagggatgtgaaggacctcttcaaggagaactacaaaccactgctcaaggaaataaaagaggacacaaacaaatggaagaacattccatgctcatgggtaggaagaatcaatatcgtgaaaatggccatactgcccaaggtaatttacagattcaatgccatccccatcaagctaccaatgactttcttcacagaattggaaaaaactactttaaagttcatatggaaccaaaaaagagcctgcatctccaagtcaatcctaagccaaaagaacaaagctggaggcatcacactacctgacttcaaactatactacaaggctacagtaaccaaaacagcatggtactggtaccaaaacagagatatagatcaatggaacagaacagagccctcagaaataatgccacatatctacaactatctgatctttgacaaacctgagaaaaacaagcaatggggaaaggattccctatttaataaatggtgctgggaaaactggctagccatatgtagaaagctgaaactggatcccttccttacaccttatacaaaaatcaattcaagatggattaaagatttaaacgttagacctaaaaccataaaaaccctagaagaaaacctaggcattaccattcaggacataggcgtgggcaaggacttcatgtccaaaacaccaaaagcaatggcaacaaaagccaaaattgacaaatgggatctaattaaactaaagagcttctgcacagcaaaagaaactaccatcagagtgaacaggcaacctacaacatgggagaaaattttcacaacctactcatctgacaaagggctaatatccagaatctacaatgaactcaaacaaatttacaagaaaaaaacaaacaaccccatcaaaaagtgggcgaaggacatgaacagacacttctcaaaagaagacatttatgcagccaaaaaacacatgaagaaatgctcatcatcactggccatcagagaaatgcaaatcaaaaccactatgagatatcatctcgcaccagttagaatggcaatcattaaaaagtcaggaaacaacagcaaaatggtggaagcagatgggcctggcaatcttttcactggtgtcctccatttagaaaccaatgaaaagtcgcttaaagcagtatttgggaaatatggtcccatattggaagacaactttttggatggaaaagcaatgaaagtagaacaagttaacaaaccgtcttttcaaagtggtggtaatgtggagatcaccatcttcttggagaaacaggagcccttcaggaagtctgagacaggaaaaaaattttttaagttgttcctgctgacattagcaaacttttttaaatttagtgaccatgatgactatagtgggggccttggtagagatcattctgaacatccaaatgggagttcttacagagatgcatatcagagttatgggaccttctatggtgcaccacctgcatga

SEQ ID NO: 6078 - DNA, 4354 bp, Homo sapiens
  SIMILAR (4163)..(4351): 531254mologous to Homo sapiens putative p150,accession number U93574,Smith-Waterman Score=157.
atgacaggatcaaattcacacataacaatattaactttaaatataaatggactaaattctgcaattaaaagacacagactggcaagttggataaagagtcaagacccatcagtgtgctgtattcaggaaacccatctcatgtgcagagacacacataggctcaaaataaaaggatggaggaagatctaccaagcaaatggaaaacaaaaaaaggcaggggttgcaatcctagtctctgataaaacagactttaaaccaacaaagatcaaaagagacaaagaaggccattacataatggtaaagggatcaattcaacaagaggagctaactatcctaaatatttatgcacccaatacaggagcacccagattcataaagcaagtcctgagtgacctacaaagagacttagactcccacacattaataatgggagactttaacaccccactgtcaatattagacagatcaacgagacagaaagtcaacaaggatacccaggaattgaactcagctctgcaccaagcagacctaatagacatctacagaactctccaccccaaatcaacagaatatacatttttttcagcaccacaccacacctattccaaaatcgaccacatagttggaagtaaagctctcctcagcaaatgtaaaagaacagaaattataacaaactatctctcagaccacagtgcaatcaaactagaactcaggattaagaatctcactcaaagccgctcaactacatggaaactgaacaacctgctcctgaatgactactgggtacataacgaaatgaaggcagaaataaagatgttctttgaaaccaacgagaacaaagacaccacataccagaatctctgggacgcattcaaagcagtgtgtagagggaaatttatagcactaaatgcctacaagagaaagcaggaaagatccaaaattgacaccctaacatcacaattaaaagaactagaaaagcaagagcaaacacattcaaaagctagcagaaggcaagaaataactaaaatcagagcagaactgaaggaaatagagacacaaaaaacccttcaaaaaatcaatgaatccaggagctggttttttgaaaggatcaacaaaattgatagaccgctagcaagactaataaagaaaaaaagagagaagaatcaaatagacacaataaaaaatgataaaggggatatcaccaccgatcccacagaaatacaaactaccatcagagaatactacaaacacctctacgcaaataaactagaaaatctagaagaaatggatacattcctcgacacatacactctcccaagactaaaacaggaagaagttgaatctctgaatggaccaataacaggctctgaaattgtggcaataatcaatagtttaccaaccaaaaagagtccaggaccagatggattcacagccgaattctaccagaggtacaaggaggaactggtaccattccttctgaaactattccaatcaatagaaaaagagggaatcctccctaactcattttatgaggccagcatcattctgataccaaagccgggcagagacacaaccaaaaaagagaattttagaccaatatccttgatgaacattgatgcaaaaatcctcaataaaatactggcaaaccgaatccagcagcacatcaaaaagcttatccaccatgatcaagtgggcttcatccctgggatgcaaggctggttcaatatacgcaaatcaataaatgtaatccagcatataaacagagccaaagacaaaaaccacatgattatctcaatagatgcagaaaaagcctttgacaaaattcaacaacccttcatgctaaaaactctcaataaattaggtattgatgggacgtatttcaaaataataagagctatctatgacaaacccacagccaatatcatactgaatgggcaaaaactggaagcattccctttgaaaactggcacaagacagggatgccctctctcaccgctcctattcaacatagtgttggaagttctggccagggcaatcaggcaggagaaggaaataaagggtattcaattaggaaaagaggaagtcaaattgtccctgtttgcagacgacatgattgtttatctagaaaaccccattgtctcagcccaaaatctccttaagctgataagcaacttcagcaaagtctcaggatacaaaatcaatgtacaaaaatcacaagcattcttatacaccaacaacagacaaacagagagccaaatcatgggtgaactcccattcacaattgcttcaaagaggataaaatacctaggaatccaacttacaagggatgtgaaggacctcttcaaggagaactacaaaccactgctcaaggaaataaaagaggacacaaacaaatggaagaacattccatgctcatgggtaggaagaatcaatatcgtgaaaatggccatactgcccaaggtaatttacagattcaatgccatccccatcaagctaccaatgactttcttcacagaattggaaaaaactactttaaagttcatatggaaccaaaaaagagcccgcattgccaagtcaatcctaagccaaaagaacaaagctggaggcatcacactaccttacttcaaactatactacaaggctacagtaaccaaaacagcatggtactggtaccaaaacagagatatagatcaatggaacagaacagagccctcagaaataatgccacatatctacaactatctgatctttgacaaacctgagaaaaacaagcaatggggaaaggattccctatttaataaatggtgctgggaaaactggctagccatatgtagaaagctgaaactggatctcttccttacaccttatacaaaaatcaattcaagatggattaaagatttaaacgttaaacctaaaaccataaaaaccctagaagaaaacctaggcattaccattcaggacataggcgtgggcaaggacttcatgtccaaaacaccaaaagcaatggcaacaaaagacaaaattgacaaatgggatctaattaaactaaagagcttctgcacagcaaaagaaactaccatcagagtgaacaggcaacctacaacatgggagaaaattttcgcaacctactcatctgacaaagggctaatatccagaatctacaatgaactcaaacaaatttacaagaaaaaaacaaacaaccccatcaaaaagtgggcgaaggacatgaacagacacttctcaaaagaagacatttatgcagccaaaaaacacatgaagaaatgctcatcatcactggccatcagagaaatgcaaatcaaaaccactatgagatatcatctcacaccagttagaatggcaatcatgaaaaaagtcaggaaacaacagctcgagggaagcagccccgaagcctccgcggcggcggcggcggcggtcgcggatcctctccaggctgctcgcaaagtccggccggccggaggcagccgccaactcctctcaacttctgccgatccgctgggcgaagcaacacgcttcctgcgcgtctctcctaggggctgagccggtctccgagggtctcggccgcctccactccctggcgctgcacacaacttacgtggaggccaggcccgcgcggggggcccagagaaagccggcgccgggcgaggctcttgcaggttctcagacccgaacacagacctgggttagagttggggacttgcctgtaataagtgacttacccattgccctcaacctaaggaagccttgccatttaaaacctcccaatggagcctatcaaagcgtgcttcaaagtgtgagggaggctgagagaggaattacagaaccgcctgacattggctgcaacctgatggggagatctgactcaaggaacagtacgatggccattgatgtccccgcccacgcactctgtagaagccttgggaatcttttcaaagcactgcccccacccgagagcatcatgacttctgttgctgggacaaaggtaagaatcattaggaaacacgatcacagtagtgcacctgcttacgcacgatatccagcccagagaaggtcccgcttcctaagccctcctgagactcaccagccacaagcccacatctatactaagttctttcgaaggccctctttactgctggacattcttcctttgtgcaacacgttaataaacccaacttggttcagccacagcgctgcaatgaacattcacggcataaaaaggaatgagagcatgtcttttgcaggagcatggatggagctggaggttatcatccttagcaaactaacacaagaacagaaaaccaaataccgcaagttctcacttataagtgggcactaa

SEQ ID NO: 6079 - DNA, 405 bp, Homo sapiens
  SIMILAR (46)..(327): 431254mologous to Homo sapiens Human secreted protein fragment encoded from gene 23,accession number Y25806,Smith- Waterman Score=165.
atggtggtgaccacctctgcccgaggcggcggcggggaccgcacaccctcccggcggctgggctgcgggctcgcgccggccggggccgcggcgctgctggccggggcaagctgcctgtgctacggccgctccctgcagggcgagttcgtgcacgacgacgtgtgggcgatcgtgaacaaccccgacgtgcggcccggcgccccgctccgctggggcatcttcaccaacgacttctggggcaagggcatggccgagaacaccagccacaagtcctaccggccgctctgcgtcctcaccttcaaaaatgttggtgaacatgctgttggtttgcagcagcacccaggccctcagctcctccagtgctctccagatctcgtctttcagctacttggaatcatggtgcag

SEQ ID NO: 6080 - DNA, 1062 bp, Homo sapiens
  SIMILAR (121)..(306): 461254mologous to Drosophila melanogaster BcDNA.GH12144,accession number AF181645,Smith-Waterman Score=143.
atggtggtgaccacctctgcccgaggcggcggcggggaccgcacaccctcccggcggcggggctgcgggctagcgccggccggggccgcggcgctgctggccggggcaagctgcctgtgctacggccgctccctgcagggcgagttcgtgcacgacgacgtgtgggcgatcgtgaacaaccccgacgtgcggcccggcgccccgctccgctggggcatcttcaccaacgacttctggggcaagggcatggccgagaacaccagccacaagtcctaccggccgctctgcgtcctcaccttcaagatgtgcatggcactttgctccgggatccactgcccggctaatctgggctctcggggcggttcgggaggcgccggctggggagttgggatcgagtttctcaactgtctgccctctcagcgggcttctctctcgaggcagggctgggagcgggctggtgaaaccgcctccgcaccccttcgcctgccggatcgtgaccaagtgggactagcgcggacccagagggttccggagggaaatgttggtgaacatgctgttggtttgcagcagcacccaggccctcagctcctccagtgctctccagatctcgtctttcagctacttggaatcatggtgcagagagggccagatgactttcccttttttgaggcattgagaattacattggtgaaggagcacctgcaacttcgagaagctctttggtggatctcttctgtaggccaggtagaatacctccctcttccccatgtctgcacctggctaaacatatttttgactggtatgaacccattctactttcatgcagtaaatataattttacactgcttagtgactcttgtgctgatgtacacctgtgataaaactgtcttcaagaatcgtggacttgcttttgtaacggcattgctttttgctgtacatcctattcatactgaggcgtgggtagaagccaaagatgttgcagaagagacattctgcaatgcacaggacagtccctacaacaaagaattatctggcagaaaatgccagtggggctatgattga

SEQ ID NO: 6081 - DNA, 518 bp, Homo sapiens
  SIMILAR (81)..(518): 701254mologous to Homo sapiens protein that is immuno- reactive with anti-PTH polyclonal antibodies,accession number U28831,Smith-Waterman Score=457.
tgagaaggctacatgtgacgagaatgattctgtttcaaatatagccacagaaataaaggagggacaacaatctgtttcatgtgtctcctcagaaacaatcagcctggaaggttatatttaaaaagaaagtttctcttttgaatattgccacaagaataacgggcggtgggaaatctggaacagtgtcttctcagaaacaaccaccctcaaaggctacaagtgacaagacagattctgctttgaatatagctacagaaataaaggatggactacaatgtgggacagtgtcttctcagaaacaaccagccttgaaggctacaactgacgaggaagattctgtttcgaatatagccacagaaataaaggatggagaaaaatctgggacagtgtcttctcagaaacaaccagccttgaaggctacaactgatgagaaagattctgtttcgaacatagccacagaaataaaggatggagaaaaatctgtgacagtgtcttctcagaaacaaccagcctcaaag

SEQ ID NO: 6082 - DNA, 846 bp, Homo sapiens
  SIMILAR (22)..(705): 391254mologous to Homo sapiens protein that is immuno- reactive with anti-PTH polyclonal antibodies,accession number U28831,Smith-Waterman Score=267.
atggagcagggatacacatccggtgcgaggtatggttggattgacagaaaccagcaaaggttacacgttcagccgccgtggtgcgtaaggagtacgaggctagcgcaagggaccgtggatctcacagcggcagcggacagcagcacaacggggacaattgaggcatcaaaccaaacaatgcgcggaaggccggctaccgctaagggtccaacggcgaaccgaaaaacagcgcgcgcaagcgctctcaaggcgccaacagggctgtcggacgagaggctaacgcacagccgcgagaccagacgcgcggctacaagtgacgacaaagattctgtttcaaatatagccacagaaataaaggagggaccaatatctgggacagttattgggcaagttaaagggcatgatgaatgtttgaagtataatggtgtaaatccttctgatttcttgcaagaaagacatgagggatcatataccacctgctttgacattgattctcaggtgttgtcttctcagaaacaaccagctgagaaggttatatttaaaaagaaagtttctcttttgaatattgccacaagaataatgggtggtgggaaatctggaacagtgtcttctcagaaacaaccagcctcaaaggctacaagtgacaagacagattctgctttgaatatagctacagaaataaaggatggactacagtgtgggacaggcccgagattcttcatttgtaataagttctcgggtgatgctgatgctgctggtcttggacctgatcttcgcagtaagattatagacttccccacattgaaattgggaagaagaaacattggagagcagatcaagacataa

SEQ ID NO: 6083 - DNA, 435 bp, Homo sapiens
  SIMILAR (172)..(345): 981254mologous to Homo sapiens MLTK-beta,accession number AB049734,Smith-Waterman Score=303.
atggccttctgtaagagtaacctgaatgaacgctggtttgttccagagccgtatcgggagaaaatcacagaatatgcttctctgggatcactctatgattacattaacagtaacagaagtgaggagatggatatggatcacattatgacctgggccactgatgtagccaaagttgttatagctgctgatggagtattgaagatctgtgactttggtgcctctcggttccataaccatacaacacacatgtccttggttggaactttcccatggatggctccagaagttatccagagtctccctgtgtcagaaacttgtgacacatattcctatggtgtgaacctgtccaccccatcatgtgatgtggaatatcaattctgcattcatgctagagccttcccttacctggtggaaacagaaatgccatttcagtga

SEQ ID NO: 6084 - DNA, 1320 bp, Homo sapiens
  SIMILAR (794)..(579): 811254mologous to unidentified cloning vector beta- galactosidase alpha-peptide,accession number M77169,Smith-Waterman Score=307.
atgtggatctgcccaggcggccgcggcggcggcggcggaggaggcgaccgagaagatacccgccctgcgccccgctctgctgtgggcgctgctggcgctctggctgtgctgcgcgacccccgcgcatggagggaggccggcagcaagtctcagaaactcctttttcgtagtgccagggtgcaccggaggtgggcagttttgcccttcaggtaccgcgtttcctgggaaaatgaaagtgatgatgaggaagaggaagaaaaagggccagtgtctcccaggaatctgcaggagtctgaagaggaggaagtcccccaggagtcctgggatgaaggttattcgactctctcaattcctcctgaaatgttggcctcgtaccagtcttacagcagcacatttcactcattagaggaacagcaagtctgcatggctgttgacataggcagatgccgggagcagacaagcccgtcagggcgtgtcagcgggtgttggcgggtgtctgggctggatttactatgcggcatcagagcagattgtactgagagtgctccatatgcggtgtcatattccggcacagatgcgttgcgcacctgttgggaagggcgatcggtgcgggcctcttcgttattacgccagctggcgaaagggggatgtgttgcaaggcgattaagttgggtaacgccagggttttcccagtcacgacgttgtaaaacgacggccagtgccaagcttgcatgcatgcaggtcgactctagaggatcccggcaaaaactatatatcatcatcaccatcgtcatcatcatcatcatctccatcctcacccagagtaccgagctaaagaaattaacccaattggagaaaagagaaatgtttgccaggctaataaagttgggtaacgacaggtttttccccattaacaacgttgtaaaagaacggcccagtccaaagctggaatgcttcaagaacaagcgcgacaccccgatgcctgtagcaatggcaacatttgggcgcaaattattaactggcgaactacttactctagcttcccggcaacaattaatagactggatggaggcggataaagttgcaggaccacttctgcgctcggcccttccggatggctggttaattgctgataaatctggagccgttaagcttggttctcgcggtatcattgcagcactggggccaaatgtggcgataagtcgtgtcttaccgggttggagtcaagacgatagttaccggataaggcgcagcggtcgggctgaacggggggttcgtgcacacagcccagcttggagcgaacgacctacaccgaactga

SEQ ID NO: 6085 - DNA, 446 bp, Homo sapiens
  SIMILAR (357)..(395): 841254mologous to Mus musculus putative E1-E2 ATPase,accession number AF156550,Smith-Waterman Score=52.
gcattgtgcggtggaatttcccataacggaaataaagaacggaagcgtacctgggagagctggctgaaaccacgacttggtttgaccattggaaaggactctaaaccacagcagcagaaggagagctagacttgcagggacccaggctccacactagggacctcgaccttgtcctgcagggagtggagacccatgaatggatgttagcccacagtgccttgcatacaggagatcatcattcttctggtcctatgccatgtgattgttactgaggaggatggagatgacatcatctaccacgcctcctccccagatgaagctgctttggtggaaggtgctaaaaagctgggctttgtacagtgagaacaccatattcggtcatcatagaagcaatagagctttggagccaaacccttctgatgatccaagggcaagcacagtcttcc

SEQ ID NO: 6086 - DNA, 1155 bp, Homo sapiens
  SIMILAR (943)..(1065): 731254mologous to Mus musculus putative E1-E2 ATPase,accession number AF156550,Smith-Waterman Score=141.
atggggggcccccggggaaagggccgcagacacctgtgggccggctccgtgggtgtccttgaacttggatggtggtcccgcagctctgggcgccacgcagactgctgtgcccactggggctgggctcaccaggaagtaggatcagcagaaacgcgggcgctcacaactggtgccaggttcggtttccttaggcctctacccgcagggccccgtccctaccgtgcctggtgggtgcttcctcacctgctgctctccccacaacggggctgctcttttgcccaggggctctggggcggtcccggccacccagagcgcgaggtcgcaggtcccagtactcatgccggaggccctgacgtgctgggggtgcccacgcgggcctgtggtccccacgccggcttgtggtccccacgcctggctcgggcacctgcagagggagggcgccctcttgagtcggcgccctctgccgcgctgttgccgcccccgcggctggagctgtgcccgcacagtgaggccctacccgcgggccgcctcctcccgctgctgccccagcgctgtcctacccccggtcgcgtcgccgaggcagccgccacagccccctccaccgtggcagccgctgccaccgcccagcccacagtgccttgcatacaggagatcatcattcttctggtcctatgccatgtgattgttactgaggaggatggagatgacatcatctaccacgcctcctccccaggaagtggatatgttatagcaagcagtgttaccccagaccgtgcagggggcattatgataaatggtctagaatgcgcatataactatataaaattggaaaatcctgaattcagaggcataactagccccaagatttctgatggacccatgcagctttgtgttctttatcttcatttcttggagtggctgatttgcaggcttgtgcactctgtggcttacgctgttctctctgaggatgattatgaggagtggctgaaaggctatcaagaagccagcaacacattgaaaaatggagctcagtggttggaagagtgtggtcagatcattgagaagttaaccacacatgatagtctttacagatccaagaaggacttaagcagctaccgaacaaaatctttgaacaggcatccttctactatatag

SEQ ID NO: 6087 - DNA, 642 bp, Homo sapiens; identical to SEQ ID NO: 2412
  SIMILAR (10)..(234): 701254mologous to Mus musculus Pro-Pol-dUTPase polyprotein,accession number Y12713,Smith-Waterman Score=265.

SEQ ID NO: 6088 - DNA, 1536 bp, Homo sapiens
  SIMILAR (33)..(1433): 1001254mologous to Homo sapiens GABAA receptor gamma 3 subunit,accession number S82769,Smith-Waterman Score=2483.
tgaattcgtgagatggcgagctccacggcaccatggccccgaagctgctgctcctcctctgcctgttctcgggcttgcacgcgcggtccagaaaggtggaagaggatgaatatgaagattcatcatcaaaccaaaagtgggtcttggctccaaaatcccaagacaccgacgtgactcttattctcaacaagttgctaagagagtatgataaaaagctgaggccagatattggaataaaaccgaccgtaattgacgttgacatttatgttaacagcattggtcctgtgtcatcaataaacatggaataccaaattgacatattttttgctcagacctggacagatagtcgccttcgattcaacagcacaatgaaaattcttactctgaacagcaacatggtggggttaatctggatcccagacaccatcttccgcaattctaaaaccgcagaggctcactggatcaccacacccaatcagctcctccggatttggaatgacgggaaaatcctttacactttgaggctcaccatcaatgctgagtgccagctgcagctgcacaacttccccatggacgaacactcctgcccgctgattttctccagctatggctatcccaaagaagaaatgatttatagatggagaaaaaattcagtggaggcagctgaccagaaatcatggcggctttatcagtttgacttcatgggcctcagaaacaccacagaaatcgtgacaacgtctgcaggtgattatgttgtcatgactatatattttgaattgagtagaagaatgggatacttcaccattcagacatacattccctgtatactgactgtggttttatcctgggtgtcattttggatcaaaaaagatgctacgccagcaagaacagcattaggcatcaccacggtgctgaccatgaccaccctgagcaccatcgccaggaagtccttgccacgcgtgtcctacgtgaccgccatggacctttttgtgactgtgtgcttcctgtttgtcttcgccgcgctgatggagtatgccaccctcaactactattccagctgtagaaaaccaaccaccacgaaaaagacaacatcgttactacatccagattcctcaagatggattcctgagcgaataagcctacaagccccttccaactattccctcctggacatgaggccaccaccacctgcgatgatcactttaaacaattccgtttactggcaggaatttgaagatacctgtgtctatgagtgtctggatggcaaagactgtcagagcttcttctgctgctatgaagaatgtaaatcaggatcctggaggaaagggcgtattcacatagacatcttggagctggactcgtactcccgggtctttttccccacgtccttcctgctctttaacctggtctactgggttggatacctgtatctctaagtgttgctcagagtgaagagtgaagagcatttggtacacacttgaccttctgtcgtccccagaccagtagtgaccaatcgggagtagcaaggaaggacac

SEQ ID NO: 6089 - DNA, 1059 bp, Homo sapiens
  SIMILAR (637)..(756): 951254mologous to Homo sapiens GABAA receptor gamma 3 subunit,accession number AF228458,Smith-Waterman Score=182.
  misc_feature (1)...(1059): n = a,t,c or g
atggcagctttgaacaacatacgaacagtgtctgtgattgtacaccccacaacaggccggggagggccctttgtgaggtttgaagatggactggaatcaccactccagggagagtttagtatggcccccggttgttgttcaggcacatcggcttccccctctactttcctctctctccacattctggcaactcttaaccggtaccactcacctctcatggaaaaatacatggactttagaagtcctcaggcacttggcataatgcagggcttctgggtggtgaaaaccttaaagataaagaaaatccatccaccttcttcttttcttacgcaaggaagccgcccggaacagcgggacgattcanccacaaaagacagcgaaaaatcgggcgccgacaagggaaccaccacagcacaaccaccgacatggagcaaacaggataaggaaagcggcaccgaaggaaaacggaggggcgagacaacgccaagagacgaccacgacgtaacattacatgaggtatgcagcatcagggattcctgtaaggcagccgtgctggggtggagtgatgtgggtgaccgtctgggattcctgttgcgtgttgcacccttttacaacatgctacccgtcccctgttcaggcatcaccacggtgctgaccatgaccaccctgagcaccatcgccaggaagtccttgccacgcgtgtcctacgtgaccgccatggacctttttgtgactgtgtgcttcctctcccagttccatccacatagcaagggactacacagaggcatgaagcaacgagtggatgaatgtctggctgatcactgtcaaagcacacgtgtaggaaacctttattgcaattgttcgttaataaaggcagatctttcaaccggaggttgtcaaaaggaggcagatcccttcaatgcagtggggattgtggaggaggaggagggtgggcagccgcaccgtgaggccccaatggtagcagagggagatggccacacgtgtgaggagcaagcaacaccctgtgaacatgtggtccaggccatcctgctaatttag

SEQ ID NO: 6090 - DNA, 7680 bp, Homo sapiens
  SIMILAR (250)..(4263): 991254mologous to Homo sapiens vascular endothelial growth factor receptor,accession number AF063657,Smith-Waterman Score= 6989.
gcggacactcctctcggctcctccccggcagcggcggcggctcggagcgggctccggggctcgggtgcagcggccagcgggcctggcggcgaggattacccggggaagtggttgtctcctggctggagccgcgagacgggcgctcagggcgcggggccggcggcggcgaacgagaggacggactctggcggccgggtcgttggccgggggagcgcgggcaccgggcgagcaggccgcgtcgcgctcaccatggtcagctactgggacaccggggtcctgctgtgcgcgctgctcagctgtctgcttctcacaggatctagttcaggttcaaaattaaaagatcctgaactgagtttaaaaggcacccagcacatcatgcaagcaggccagacactgcatctccaatgcaggggggaagcagcccataaatggtctttgcctgaaatggtgagtaaggaaagcgaaaggctgagcataactaaatctgcctgtggaagaaatggcaaacaattctgcagtactttaaccttgaacacagctcaagcaaaccacactggcttctacagctgcaaatatctagctgtacctacttcaaagaagaaggaaacagaatctgcaatctatatatttattagtgatacaggtagacctttcgtagagatgtacagtgaaatccccgaaattatacacatgactgaaggaagggagctcgtcattccctgccgggttacgtcacctaacatcactgttactttaaaaaagtttccacttgacactttgatccctgatggaaaacgcataatctgggacagtagaaagggcttcatcatatcaaatgcaacgtacaaagaaatagggcttctgacctgtgaagcaacagtcaatgggcatttgtataagacaaactatctcacacatcgacaaaccaatacaatcatagatgtccaaataagcacaccacgcccagtcaaattacttagaggccatactcttgtcctcaattgtactgctaccactcccttgaacacgagagttcaaatgacctggagttaccctgatgaaaaaaataagagagcttccgtaaggcgacgaattgaccaaagcaattcccatgccaacatattctacagtgttcttactattgacaaaatgcagaacaaagacaaaggactttatacttgtcgtgtaaggagtggaccatcattcaaatctgttaacacctcagtgcatatatatgataaagcattcatcactgtgaaacatcgaaaacagcaggtgcttgaaaccgtagctggcaagcggtcttaccggctctctatgaaagtgaaggcatttccctcgccggaagttgtatggttaaaagatgggttacctgcgactgagaaatctgctcgctatttgactcgtggctactcgttaattatcaaggacgtaactgaagaggatgcagggaattatacaatcttgctgagcataaaacagtcaaatgtgtttaaaaacctcactgccactctaattgtcaatgtgaaaccccagatttacgaaaaggccgtgtcatcgtttccagacccggctctctacccactgggcagcagacaaatcctgacttgtaccgcatatggtatccctcaacctacaatcaagtggttctggcacccctgtaaccataatcattccgaagcaaggtgtgacttttgttccaataatgaagagtcctttatcctggatgctgacagcaacatgggaaacagaattgagagcatcactcagcgcatggcaataatagaaggaaagaataagatggctagcaccttggttgtggctgactctagaatttctggaatctacatttgcatagcttccaataaagttgggactgtgggaagaaacataagcttttatatcacagatgtgccaaatgggtttcatgttaacttggaaaaaatgccgacggaaggagaggacctgaaactgtcttgcacagttaacaagttcttatacagagacgttacttggattttactgcggacagttaataacagaacaatgcactacagtattagcaagcaaaaaatggccatcactaaggagcactccatcactcttaatcttaccatcatgaatgtttccctgcaagattcaggcacctatgcctgcagagccaggaatgtatacacaggggaagaaatcctccagaagaaagaaattacaatcagagatcaggaagcaccatacctcctgcgaaacctcagtgatcacacagtggccatcagcagttccaccactttagactgtcatgctaatggtgtccccgagcctcagatcacttggtttaaaaacaaccacaaaatacaacaagagcctggaattattttaggaccaggaagcagcacgctgtttattgaaagagtcacagaagaggatgaaggtgtctatcactgcaaagccaccaaccagaagggctctgtggaaagttcagcatacctcactgttcaaggaacctcggacaagtctaatctggagctgatcactctaacatgcacctgtgtggctgcgactctcttctggctcctattaaccctccttatccgaaaaatgaaaaggtcttcttctgaaataaagactgactacctatcaattataatggacccagatgaagttcctttggatgagcagtgtgagcggctcccttatgatgccagcaagtgggagtttgcccgggagagacttaaactgggcaaatcacttggaagaggggcttttggaaaagtggttcaagcatcagcatttggcattaagaaatcacctacgtgccggactgtggctgtgaaaatgctgaaagagggggccacggccagcgagtacaaagctctgatgactgagctaaaaatcttgacccacattggccaccatctgaacgtggttaacctgctgggagcctgcaccaagcaaggagggcctctgatggtgattgttgaatactgcaaatatggaaatctctccaactacctcaagagcaaacgtgacttattttttctcaacaaggatgcagcactacacatggagcctaagaaagaaaaaatggagccaggcctggaacaaggcaagaaaccaagactagatagcgtcaccagcagcgaaagctttgcgagctccggctttcaggaagataaaagtctgagtgatgttgaggaagaggaggattctgacggtttctacaaggagcccatcactatggaagatctgatttcttacagttttcaagtggccagaggcatggagttcctgtcttccagaaagtgcattcatcgggacctggcagcgagaaacattcttttatctgagaacaacgtggtgaagatttgtgattttggccttgcccgggatatttataagaaccccgattatgtgagaaaaggagatactcgacttcctctgaaatggatggctcccgaatctatctttgacaaaatctacagcaccaagagcgacgtgtggtcttacggagtattgctgtgggaaatcttctccttaggtgggtctccatacccaggagtacaaatggatgaggacttttgcagtcgcctgagggaaggcatgaggatgagagctcctgagtactctactcctgaaatctatcagatcatgctggactgctggcacagagacccaaaagaaaggccaagatttgcagaacttgtggaaaaactaggtgatttgcttcaagcaaatgtacaacaggatggtaaagactacatcccaatcaatgccatactgacaggaaatagtgggtttacatactcaactcctgccttctctgaggacttcttcaaggaaagtatttcagctccgaagtttaattcaggaagctctgatgatgtcagatatgtaaatgctttcaagttcatgagcctggaaagaatcaaaacctttgaagaacttttaccgaatgccacctccatgtttgatgactaccagggcgacagcagcactctgttggcctctcccatgctgaagcgcttcacctggactgacagcaaacccaaggcctcgctcaagattgacttgagagtaaccagtaaaagtaaggagtcggggctgtctgatgtcagcaggcccagtttctgccattccagctgtgggcacgtcagcgaaggcaagcgcaggttcacctacgaccacgctgagctggaaaggaaaatcgcgtgctgctccccgcccccagactacaactcggtggtcctgtactccaccccacccatctagagtttgacacgaagccttatttctagaagcacatgtgtatttatacccccaggaaactagcttttgccagtattatgcatatataagtttacacctttatctttccatgggagccagctgctttttgtgatttttttaatagtgctttttttttttgactaacaagaatgtaactccagatagagaaatagtgacaagtgaagaacactactgctaaatcctcatgttactcagtgttagagaaatccttcctaaacccaatgacttccctgctccaacccccgccacctcagggcacgcaggaccagtttgattgaggagctgcactgatcacccaatgcatcacgtaccccactgggccagccctgcagcccaaaacccagggcaacaagcccgttagccccaggggatcactggctggcctgagcaacatctcgggagtcctctagcaggcctaagacatgtgaggaggaaaaggaaaaaaagcaaaaagcaagggagaaaagagaaaccgggagaaggcatgagaaagaatttgagacgcaccatgtgggcacggagggggacggggctcagcaatgccatttcagtggcttcccagctctgacccttctacatttgagggcccagccaggagcagatggacagcgatgaggggacattttctggattctgggaggcaagaaaaggacaaatatcttttttggaactaaagcaaattttagacctttacctatggaagtggttctatgtccattctcattcgtggcatgttttgatttgtagcactgagggtggcactcaactctgagcccatacttttggctcctctagtaagatgcactgaaaacttagccagagttaggttgtctccaggccatgatggccttacactgaaaatgtcacattctattttgggtattaatatatagtccagacacttaactcaatttcttggtattattctgttttgcacagttagttgtgaaagaaagctgagaagaatgaaaatgcagtcctgaggagagttttctccatatcaaaacgagggctgatggaggaaaaaggtcaataaggtcaagggaagaccccgtctctataccaaccaaaccaattcaccaacacagttgggacccaaaacacaggaagtcagtcacgtttccttttcatttaatggggattccactatctcacactaatctgaaaggatgtggaagagcattagctggcgcatattaagcactttaagctccttgagtaaaaaggtggtatgtaatttatgcaaggtatttctccagttgggactcaggatattagttaatgagccatcactagaagaaaagcccattttcaactgctttgaaacttgcctggggtctgagcatgatgggaatagggagacagggtaggaaagggcgcctactcttcagggtctaaagatcaagtgggccttggatcgctaagctggctctgtttgatgctatttatgcaagttagggtctatgtatttaggatgcgcctactcttcagggtctaaagatcaagtgggccttggatcgctaagctggctctgtttgatgctatttatgcaagttagggtctatgtatttaggatgtctgcaccttctgcagccagtcagaagctggagaggcaacagtggattgctgcttcttggggagaagagtatgcttccttttatccatgtaatttaactgtagaacctgagctctaagtaaccgaagaatgtatgcctctgttcttatgtgccacatccttgtttaaaggctctctgtatgaagagatgggaccgtcatcagcacattccctagtgagcctactggctcctggcagcggcttttgtggaagactcactagccagaagagaggagtgggacagtcctctccaccaagatctaaatccaaacaaaagcaggctagagccagaagagaggacaaatctttgttgttcctcttctttacacatacgcaaaccacctgtgacagctggcaattttataaatcaggtaactggaaggaggttaaactcagaaaaaagaagacctcagtcaattctctacttttttttttttttttccaaatcagataatagcccagcaaatagtgataacaaataaaaccttagctgttcatgtcttgatttcaataattaattcttaatcattaagagaccataataaatactccttttcaagagaaaagcaaaaccattagaattgttactcagctccttcaaactcaggtttgtagcatacatgagtccatccatcagtcaaagaatggttccatctggagtcttaatgtagaaagaaaaatggagacttgtaataatgagctagttacaaagtgcttgttcattaaaatagcactgaaaattgaaacatgaattaactgataatattccaatcatttgccatttatgacaaaaatggttggcactaacaaagaacgagcacttcctttcagagtttctgagataatgtacgtggaacagtctgggtggaatggggctgaaaccatgtgcaagtctgtgtcttgtcagtccaagaagtgacaccgagatgttaattttagggacccgtgccttgtttcctagcccacaagaatgcaaacatcaaacagatactcgctagcctcatttaaattgattaaaggaggagtgcatctttggccgacagtggtgtaactgtgtgtgtgtgtgtgtgtgtgtgtgtgtgtgtgtgtgtgtgggtgtgggtgtatgtgtgttttgtgcataactatttaaggaaactggaattttaaagttacttttatacaaaccaagaatatatgctacagatataagacagacatggtttggtcctatatttctagtcatgatgaatgtattttgtataccatcttcatataatatacttaaaaatatttcttaattgggatttgtaatcgtaccaacttaattgataaacttggcaactgcttttatgttctgtctccttccataaatttttcaaaatactaattcaacaaagaaaaagctcttttttttcctaaaataaactcaaatttatccttgtttagagcagagaaaaattaagaaaaactttgaaatggtctcaaaaaattgctaaatattttcaatggaaaactaaatgttagtttagctgattgtatggggttttcgaacctttcactttttgtttgttttacctatttcacaactgtgtaaattgccaataattcctgtccatgaaaatgcaaattatccagtgtagatatatttgaccatcaccctatggatattggctagttttgcctttattaagcaaattcatttcagcctgaatgtctgcctatatattctctgctctttgtattctcctttgaacccgttaaaacatcctgtggcactc

SEQ ID NO: 6091 - DNA, 1314 bp, Homo sapiens
  SIMILAR (454)..(609): 961254mologous to Homo sapiens Human tyrosine kinase receptor Flt1,accession number Y70751,Smith-Waterman Score=253.
atgcaatataaccagacagagtttcccaaggagttaaggaaacaccccaagcaaaagaccagagcaccttgtcccagggcctgccttgacttagggaccgaacacgggtttcatcgggaaagggcagattctgacggtttctacaaggagcccatcactatggaagatctgatttcttacagttttcaagtggccagaggcatggagttcctgtcttccagaaagggacttgggtcctggagtgagtgcatggaactctactttcaaattagttctgcacagctaggtctagttgtcagtcctccccacactgtcatttcagccactcctgaatccagaccctcactgaccaagaactactacattactggcgttggtgtttggaagggatctgaagaaggggtctatcggggtgcactaggtaccttaacttcacgacttacatcaaacatggaggatgcagcactacacatggagcctaagaaagaaaaaatggagccaggcctggaacaaggcaagaaaccaagactagatagcgtcaccagcagcgaaagctttgcgagctccggctttcaggaagataaaagtctgagtgatgttgaggaaaagagagtgccatacatcagggctggtgtgatgccgccagaccatgcagccaaggctgtgtttccaaactatcatatttatcctccaactgcacctcacgttgcttatatgcaaccgaaagcaaacgcaccttccttcttcatggctgatgaactccgacagcacaagaaagataaagcaaatgctgctgaagagagggcaaagaggtttctatcggtcctagaaaatggctgtgctaaacaatcagaacactgcaaccaacccttgcgagtagagcggcttctggttactgtcacaccagtcctggaactattaagcagctcctccctccctaccacgacagagacggctacctggccgtctctcgccagcagtgtctgcgcgatttgccttggggcttgccagaggatctacagtagggatcggcaaactcttcttgtaaaggtccagctagtgtttccaaactatcatatttatcctccaactgcacctcacgttgcttatatgcaaccgaaagcaaacgcaccttccttcttcatggctgatgaactccgacaggaatcccgacaagaaatcaacacaatactcgacctgctttggaaaaactcttcagacaccttgctgaagcaaacaccaaactattttgatgaacacttccacaaaaatgacaacatacaagaaccttccacagaaaataatcgcacttaa

SEQ ID NO: 6092 - DNA, 1448 bp, Homo sapiens
  SIMILAR (150)..(1181): 891254mologous to Homo sapiens putative p150,accession number U93563,Smith-Waterman Score=1550.
gtgctcgtcatgtgcagccacgtcctttggtagttaatcctcctcctccaccacagtttcagaacgtctggcggaatccaaacactgaaacctacctgcagccccaaatcacgccgaatcctgtaactcagcacgttcaggaatatcctacttatcccgattcagcatttcaggtcaccactggatatcagttgcctgtatataattatcagagaaagcaggaaagatccaaaattgacaccgtaacatcacaattaaaagaactagaaaagcaagagcaaacacagtcaaaagctagcagaaggcaagaaataactaagatcagagcagaactgaaggaaatagagacacaaaaaacccttcaaaaaattaatgaatccaggagctggttttttgaaaggatcaacaaaagtgacagaccgctagcaagactaataaagaaaaaaagagagaagaatccaatagacgcaataaaaaatgataaaggggatatcgccactgatcacacagaaatacaaactaccatcagagaatactacaaacacctctacgcaaataaactagaaaatctagaagaaatggataaactcctcgacacatacactctcccaagactaaaccaggaagaagttgaatctctgaatagaccaataacaggagctgaaattgtggcaataatcaatagctcaccaaccaaaaagagtccaggaccagatggattcacagccgaattctaccagaggtacaaggaggaactggtaccattccttctgaaactattccaatcaacagaaaaagacagaatcctccctaactcattttatgaggccagcatcattctgataccaaagccaggcagagacacaaccaaaaaagagaattttagaccaatatccttgatgaacattgatgcaaaaatcctcaataaaatactggcaaaacgaatccagcggcacatcaaaaagcttatccaccatgatcaagtgggcttcatcgctgggatgcaaggctggttcaatatacgcaaatcaataaatgtaatccagcatataaacagaaccaaagacaaaaaacacatgattatctcaatagatgcagaaaaagcccttgacaaaattcaacaacccttcatgctaaaaactctcaataaattaggtattgatgggacgtatttcaaaataagtcactactactgccactacaacaactattactactacaactacaacaactacaacaactactactactactacagctacaacaactactactactactactactactactaccaccactactactactacaatgggacccacattgccactgatacctattggcttgggttcctgaattgcagcactaccctgctccctaggcccaaacatccagagcaccccttcttctccagagttggtccagtgctgctccctggccactag

SEQ ID NO: 6093 - DNA, 702 bp, Homo sapiens
  SIMILAR (301)..(669): 471254mologous to Cryptosporidium parvum polythreonine protein,accession number U83169,Smith-Waterman Score=220.
atgcaccataagtgcagtgccaaggcagtagaaagaagtcatatcacttatgtgatggacctagaaaaaagccacagtgctgtctgcaggcagggctcaggccaagattttacatcagctgaatgctggtttcagtgtcatgtaaaagtgccccctgtcacgttgctaaagaaaggagatcagtggttgcctgagaagagggtacatggagagagacaggaaggagagattacaaaggagcacaaggataccttttgggatgatgtttatgttcactatattgatcggcttcatgggtatatacctagacctacggctggagtgtgtcgtgctcagggttcaagtaggcacaggtccccttcatccctgaggctaaactgccaccaaaacacccccagcctagtgactgaacatccccaagggcccaaaggacagctgtgctccactattcagggtacttgctactgctacacctggcctcacagaatctggaatactgctgactccaccatcacaaggtctagagtcactactactgccactacaacaactattactactacaactacaacaactacaacaactactactactactacagctacaacaactactactactactactactactactaccaccactactactactacaatgggacccacattgccactgatacctattggcttgggttcctga

SEQ ID NO: 6094 - DNA, 492 bp, Homo sapiens
  SIMILAR (121)..(285): 981254mologous to Homo sapiens dJ365I19.1 (KIAA0456),accession number AL078463,Smith-Waterman Score=284.
atgtctcctgcagatgtacaggcagcatgtgactttccgggtctcctttcgactccagagtcattccctctcagctggtatatttttgatttccatagaaatctttcagtttccctaaaaaggaaggatcagaatgttctctctccagtcaactgctggaatctcctcttaaaccaggtgaagcgggaaagcagggaccataccaccctgagtgacatctacctgaataatatcattcctcgatttgtacaagtcagcgaggactcaggaagactctttaaaaagcctgatcaaataactgatttggaatcttccatctacctaattgcatccgtgaaggtgctttccctgtgtcttagagacagaatattgagggtacaatcatctgacgacgaaaagaaggcagagaaagataactcctcccagagctcactggctattattagtagcccggctgtgctgtggttggggccacacctcattttggagtga

SEQ ID NO: 6095 - DNA, 1642 bp, Homo sapiens
  SIMILAR (41)..(1570): 1001254mologous to Homo sapiens serotonin receptor,accession number AJ003078,Smith-Waterman Score=2675.
ctgagcactcggaggcactcctatgcttggaaagctcgctatgctgctgtgggtccagcaggcgctgctcgccttgctcctccccacactcctggcacagggagaagccaggaggagccgaaacaccaccaggcccgctctgctgaggctgtcggattaccttttgaccaactacaggaagggtgtgcgccccgtgagggactggaggaagccaaccaccgtatccattgacgtcattgtctatgccatcctcaacgtggatgagaagaatcaggtgctgaccacctacatctggtaccggcagtactggactgatgagtttctccagtggaaccctgaggactttgacaacatcaccaagttgtccatccccacggacagcatctgggtcccggacattctcatcaatgagttcgtggatgtggggaagtctccaaatatcccgtacgtgtatattcggcatcaaggcgaagttcagaactacaagccccttcaggtggtgactgcctgtagcctcgacatctacaacttccccttcgatgtccagaactgctcgctgaccttcaccagttggctgcacaccatccaggacatcaacatctctttgtggcgcttgccagaaaaggtgaaatccgacaggagtgtcttcatgaaccagggagagtgggagttgctgggggtgctgccctactttcgggagttcagcatggaaagcagtaactactatgcagaaatgaagttctatgtggtcatccgccggcggcccctcttctatgtggtcagcctgctactgcccagcatcttcctcatggtcatggacatcgtgggcttctacctgccccccaacagtggcgagagggtctctttcaaaattacactcctcctgggctactcggtcttcctgatcatcgtttctgacacgctgccggccactgccatcggcactcctctcattggtaaggcccctcctggcagcagagctcagtctggtgagaaacccgccccctcccacctcctgcatgtgtctcttgcctctgccctgggctgcacaggtgtctactttgtggtgtgcatggctctgctggtgataagtttggccgagaccatcttcattgtgcggctggtgcacaagcaagacctgcagcagcccgtgcctgcttggctgcgtcacctggttctggagagaatcgcctggctactttgcctgagggagcagtcaacttcccagaggcccccagccacctcccaagccaccaagactgatgactgctcagccatgggaaaccactgcagccacatgggaggaccccaggacttcgagaagagcccgagggacagatgtagccctcccccaccacctcgggaggcctcgctggcggtgtgtgggctgctgcaggagctgtcctccatccggcaattcctggaaaagcgggatgagatccgagaggtggcccgagactggctgcgcgtgggctccgtgctggacaagctgctattccacatttacctgctagcggtgctggcctacagcatcaccctggttatgctctggtccatctggcagtacgcttgagtgggtacagcccagtggaggagggggtacagtcctggttaggtggggacagaggatttctgcttaggc

SEQ ID NO: 6096 - DNA, 1385 bp, Homo sapiens
  SIMILAR (585)..(1313): 1001254mologous to Homo sapiens serotonin 5-HT3 receptor,accession number D49394,Smith-Waterman Score=1252.
ctgagcactcggaggcactcctatgcttggaaagctcgctatgctgctgtgggtccagcaggcgctgctcgccttgctcctccccacactcctggcacagggagaagccaggaggagccgaaacaccaccaggcccgctctgctgaggctgtcggattaccttttgaccaactacaggaagggtgtgcgccccgtgagggactggaggaagccaaccaccgtatccattgacgtcattgtctatgccatcctcaacgtggatgagaagaatcaggtgctgaccacctacatctggtaccggcagtactggactgatgagtttctccagtggaaccctgaggactttgacaacatcaccaagttgtccatccccacggacagcatctgggtcccggacattctcatcaatgagttcgtggatgtggggaagtctccaaatatcccgtacgtgtatattcggcatcaaggcgaagttcagaactacaagccccttcaggtggtgactgcctgtagcctcgacatctacaacttccccttcgatgtccagaactgctcgctgaccttcaccagttggctgcacaccagtggtcatccgccggcggcccctcttctatgtggtcagcctgctactgcccagcatcttcctcatggtcatggacatcgtgggcttctacctgccccccaacagtggcgagagggtctctttcaagattacactcctcctgggctactcggtcttcctgatcatcgtttctgacacgctgccggccactgccatcggcactcctctcattggtgtctactttgtggtgtgcatggctctgctggtgataagtttggccgagaccatcttcattgtgcggctggtgcacaagcaagacctgcagcagcccgtgcctgcttggctgcgtcacctggttctggagagaatcgcctggctactttgcctgagggagcagtcaacttcccagaggcccccagccacctcccaagccaccaagactgatgactgctcagccatgggaaaccactgcagccacatgggaggaccccaggacttcgagaagagcccgagggacagatgtagccctcccccaccacctcgggaggcctcgctggcggtgtgtgggctgctgcaggagctgtcctccatccggcaattcctggaaaagcgggatgagatccgagaggtggcccgagactggctgcgcgtgggctccgtgctggacaagctgctattccacatttacctgctagcggtgctggcctacagcatcaccctggttatgctctggtccatctggcagtacgcttgagtgggtacagcccagtggaggagggggtacagtcctggttaggtggggacagaggatttctgcttaggc

SEQ ID NO: 6097 - DNA, 504 bp, Homo sapiens
  SIMILAR (1)..(66): 1001254mologous to Homo sapiens serotonin receptor,accession number AJ003080,Smith-Waterman Score=106.
atgctgctgtgggtccagcaggcgctgctcgccttgctcctccccacactcctggcacagggagaaggaggtttctctccctacagagctggggtggagcatactggggcacaattagaggaagccatccaggggttggacagacgtgaagagctctggggattcctgctgctgggagtggtgggtgagcatagaccccgctctccaagaccttctgtcttcttgtccttcaatgaaggagaccctgtaggactggagaagtatgctcaggtctgctacgagcatctcccaggaatgagggtcttgctgaaggggaacttggaagtctcaggagagtggtatcttttgtggccctctcgggtaaagaaaagcaaccaggaaccaggacctgatgagagccagaaaaacaattacttcccaccatacccagttctcatagcacacagccgaaataattcacatccggaaagatgatacatctatctggtcaactttggggagcgg

SEQ ID NO: 6098 - DNA, 2202 bp, Homo sapiens
  SIMILAR (220)..(1653): 1001254mologous to Homo sapiens serotonin 5-HT3 receptor,accession number D49394,Smith-Waterman Score=2508.
ggaaacatgatccagctgaaggactgattgcaggaaaacttggcagctccccaaccttggtggcccagggagtgtgaggctgcagcctcagaaggtgtgagcagtggccacgagaggcaggctggctgggacatgaggttggcagagggcaggcaagctggcccttggtgggcctcgccctgagcactcggaggcactcctatgcttggaaagctcgctatgctgctgtgggtccagcaggcgctgctcgccttgctcctccccacactcctggcacagggagaagccaggaggagccgaaacaccaccaggcccgctctgctgaggctgtcggattaccttttgaccaactacaggaagggtgtgcgccccgtgagggactggaggaagccaaccaccgtatccattgacgtcattgtctatgccatcctcaacgtggatgagaagaatcaggtgctgaccacctacatctggtaccggcagtactggactgatgagtttctccagtggaaccctgaggactttgacaacatcaccaagttgtccatccccacggacagcatctgggtcccggacattctcatcaatgagttcgtggatgtggggaagtctccaaatatcccgtacgtgtatattcggcatcaaggcgaagttcagaactacaagccccttcaggtggtgactgcctgtagcctcgacatctacaacttccccttcgatgtccagaactgctcgctgaccttcaccagttggctgcacaccatccaggacatcaacatctctttgtggcgcttgccagaaaaggtgaaatccgacaggagtgtcttcatgaaccagggagagtgggagttgctgggggtgctgccctactttcgggagttcagcatggaaagcagtaactactatgcagaaatgaagttctatgtggtcatccgccggcggcccctcttctatgtggtcagcctgctactgcccagcatcttcctcatggtcatggacatcgtgggcttctacctgccccccaacagtggcgagagggtctctttcaagattacactcctcctgggctactcggtcttcctgatcatcgtttctgacacgctgccggccactgccatcggcactcctctcattggtgtctactttgtggtgtgcatggctctgctggtgataagtttggccgagaccatcttcattgtgcggctggtgcacaagcaagacctgcagcagcccgtgcctgcttggctgcgtcacctggttctggagagaatcgcctggctactttgcctgagggagcagtcaacttcccagaggcccccagccacctcccaagccaccaagactgatgactgctcagccatgggaaaccactgcagccacatgggaggaccccaggacttcgagaagagcccgagggacagatgtagccctcccccaccacctcgggaggcctcgctggcggtgtgtgggctgctgcaggagctgtcctccatccggcaattcctggaaaagcgggatgagatccgagaggtggcccgagactggctgcgcgtgggctccgtgctggacaagctgctattccacatttacctgctagcggtgctggcctacagcatcaccctggttatgctctggtccatctggcagtacgcttgagtgggtacagcccagtggaggagggggtacagtcctggttaggtggggacagaggatttctgcttaggcccctcaggacccagggaatgccagggacattttcaagacacagacaaagtcccgtgccctgtttccaatgccaattcatctcagcaatcacaagccaaggtctgaacccttccaccaaaaactgggtgttcaaggcccttacacccttgtcccacccccagcagctcaccatggctttaaaacatgctctcttagatcaggagaaactcgggcactccctaagtccactctagttgtggacttttccccattgaccctcacctgaataagggactttggaattctgcttctctttcacaactttgcttttaggttgaaggcaaaaccaactctctactacacaggcctgataactctgtacgaggcttctctaacccctagtgtcttttttttcttcacctcacttgtggcagcttccctgaacactcatcccccatcagatgatgggagtgggaagaataaaatgcagtgaaaccc

SEQ ID NO: 6099 - DNA, 672 bp, Homo sapiens
  SIMILAR (177)..(563): 311254mologous to Mus musculus jerky,accession number U35730,Smith-Waterman Score=154.
gtcttcagacacgggccaaccagcagagtaaagcggcacaccagcaggaggaggccatccatggtcacttccagacgcacacggcgaggagcagagccgtcacgaacgccggcgcgggagggagacagccagcaagccaacggggagagaagccaccgcagcaggagcagtgggatgaaaaggttccaactgcaggatttcaactaagtcacattcctatgaaggctgagagaagtgaggaagttacagaagaaagggtggaagctagcagaggtcagttcatcaggtttaaggaaagaagccgtctccatagcataaaagtacaaggtgaggcagcaagtgctgatggagaagctgtagcaagttctccagaagatctagccaagataactgacgaaggtggctactctaaacaacagattttccatgtagatgaaacagccttctactggaagaagacaccatctacaactttcatggctagagaggaggagtcaatgcctcacttcaaagcttcgaaggaccagctgactctcttgttagaggctaatgccacagccaccccaacttcggcaaccaccaccctgatcagtctgcagctgtcaagacgagaaaacaccctccgctgggaaaaagattacaacttgctgaaggctcagatgatcattcgca

SEQ ID NO: 6100 - DNA, 398 bp, Homo sapiens
  SIMILAR (3)..(197): 861254mologous to multiple sclerosis associated retrovirus element gag polyprotein,accession number AF123881,Smith-Waterman Score=299.
acttgaggaaaattaaaatagacctaggtaaattctcagataaccctgatggctatattgatgttttacaagggttaagacaatcctttgatctgacatggagagatataatgttactgctagatcagtcactaaccccaaatgagaaaagtgccgccaaaactgcagcccgagagtttggcgatctctggtttgtctattccagaattgaagctgtaaaactacaaatcgttcttcaaatggagccccagatgcagtccatgactaagatctactgcggacccctggaccggcccactagcccatgctttgatgttgatgacattgaaggcacccctcacgaggaaatctcaactgcacgacccctactatgccccaattcagcaggaagcagttaa

SEQ ID NO: 6101 - DNA, 423 bp, Homo sapiens
  SIMILAR (49)..(243): 901254mologous to multiple sclerosis associated retrovirus element gag polyprotein,accession number AF123881,Smith-Waterman Score=317.
atgcccggcccacggggccttcttataaagacaccagtcattggatacttgaagcgaattaaaatagacctaggtaaattctcagataaccctgatggctatattgatattttacaagggttaggaaaatcctttgatctgacatggagagatataatgttactactagatcagacactaaccccaaatgagagaagtgccgccataactgcagcccgagagtttgacgatctctggtatctcggagtgaagctgcagaccttcgcagtgagtgttacagctcataaagacactgtggacccaaacaacgagcagcagcaagatttactacaaagagctaaaaaacaaagcttccacccagttttccgcactaagcaggaggacccgagcctgcaacgggccatgagaagcaaagacagctga

SEQ ID NO: 6102 - DNA, 1781 bp, Homo sapiens
  SIMILAR (232)..(825): 861254mologous to Homo sapiens Protein encoded by the endogenetic fragment of HERV-W,accession number B07702,Smith- Waterman Score=893.
actttgttacccccacgacctggtgttggatctgattaccccaacattcctggctgcccgatgtggggcaacaaagaccctggtgaaggaacactagagcgtgggaaagtggaggatgcatcgcaaaggacatcgaggactctaaaagaaaccagcgggaaagctgagcatcggaagaaacaggatgggaaatgttccccccaaggcaaaaacgcccttaagatgtattctggagaattcgacccagtcagagtgtgtgtacctttttccctctcagatttgaagcaacttaaaatagacctaggtagattctcagataaccctgatggctatattgatgttttacaagggttaggacaatcctttgatctgacatggagagatataatgttactgctagatcagacactaaccccaaatgagagaaatgccaccataactgcagcccgagagtttggtgatctctggtgtctcagtcaggtcaatgataggatgacaacagaggaaagagaacgattccctacaggccagcaggcagttcccagtgcagaccctcattgagacacagaatcagaacatggagattggtgctgcagacatttactaacttgcgtgctggaaggactaaggaaaaccaggaagaaggctgtgaatttttcagtgatgtccactgtaacacagggaaaggaagaaaatcctactgcctttctggagagactaagggaggcactgaggaagcatacctccctgtcacctgactctattgaaggccaactaatcttaaagattaagtttatcactcggtcagctgcagacattagaaaacaaacttcaaaagtccaccttaggcctggagcaaaacttaagacaccctattgaacttggcaacctcggttttttataatagagatcaggaggagcagtcggaatgggacaaacgggatttaaaaaaggctaccgctttagttatggccctcaggcaagcagactttggaggctctggaacacggaaaggctgggcaaatccaatgcctaatagggcttgcttccagtgtggtctacaaggacactttaaaaagattgtccaaatacaaataagccaccccctcatccatgccccttatgtcaaaggaatcaatggaaggcccactgccccaggggacaaaggtttccaaaccaaagctcaactctgctcagaacaggctaaatacttagggctaaaattatccaaaggcaccagggccctcagtgaggaacgtatccagcccatactggcttatcctcatcccaaaaccctaaagcaactaagagggttctttggcataccaggcttctgccgaatatggattcccagaatcaaagctgtaaaactacacatcgttcttcaaatggatccccagaggcagtccatgactaagatctaccatggacccctggactggcctgctagcccatgctctgatgttaatgacaccaaaggcaaccctcctgaggaaatctcaactgcaccacccctactatgccccaattcagcaggaagcagttggagcggggataacacagaaagaaggcctttaccagatgcaggccccttgaccttggacttcctaggctccaaacctagagtacaaaacaacagtgatgccagcagagaaaaacacagccatgaaacaaaacacccagaccagagacacagaactgcttcatatagccattttcaggcaaagcagggagccagtgttttgccatgcatattagagaaaagggaagcctcctactga

SEQ ID NO: 6103 - DNA, 420 bp, Homo sapiens
  SIMILAR (85)..(240): 341254mologous to Mus musculus NKR-P1 gene-40 protein,accession number M77678,Smith-Waterman Score=116.
atggctggagatgtagtctacgctgacatcaaaactgttcggacttccccgttagaactcgcgtttccacttcagagatctgtttctttcaacttttctactgtccataaatcatgtcctgccaaagactggaaggtgcataagggaaaatgttactggattgctgaaactaagaaatcttggaacaaaagtcaaaatgactgtgccataaacaattcatatctcatggtgattcaagacattactgctatgcttgagcaagaggaatgggacaagttcgtggcagccaccagccgccaggagatggctgaagtagacaatcaatttccaggttattgggaaattcaagaccaatcaatagaattatctggagataaactctctgggacagtgttcatcaagttgcagtgccctgtttga

SEQ ID NO: 6104 - DNA, 550 bp, Homo sapiens
  SIMILAR (262)..(390): 391254mologous to Mus sp. galactose and N-acetylgalactosamine -specific lectin, MMGL,accession number S36676,Smith-Waterman Score =115.
atggaggaagtccaccacccacttggggagcagaaggaaatttgccatctcaatttacttaacttatcagaagtttctttgcagaaatatgattgtcccttcagagggacatcatttgggggcttctctctctttttgatctgggcaatggctggagatgtaatctacgctgacatcaaaactgttcggacttccccgttagaactcgcgtttccacttcagagaactggttctttcaacttttctactggccataaatcatgtcctgcccaagactggaaggtgcataagggaaaatgttactggattgctgaaactaaaaaatcttggaacaaaaggcaaaatgactgtgccataaacaattcatatctcatggtgattcaagacattactgctatggtgagatttaacatttagaggtgacagcctcccccacactggcagtgaattttttgtgctacaaacttggcaaaagtctgtgaaaagaagtttcaacttcatgtgttattaactatacaaatattagttgaatgaaaagttgaattacatg

SEQ ID NO: 6105 - DNA, 237 bp, Homo sapiens
  SIMILAR (4)..(234): 351254mologous to Homo sapiens p40,accession number U93567,Smith-Waterman Score=141.
atggagatgcaggagtacgttgaaacccaatccaaggaagctaagaatcgcaataaaatgatgcaggaactgagagataaaatagccagtataggaaagaccataactgacctcatagagctgaaaaacacactacaagaatttaataatgtaatcacaagtattaatagcagaatagaccaagcagaggaaagaatctcagagcttgaagactggctttctgatataagacagtaa

SEQ ID NO: 6106 - DNA, 335 bp, Homo sapiens
  SIMILAR (15)..(335): 951254mologous to Homo sapiens PDZ domain protein 3' variant 4,accession number AB044807,Smith-Waterman Score=509.
acgtgtcccattgtccctggaaggaaatgattatagaaatatccaagggacgttcagggcttggtctcagcattgtgtgaggaaaagacacacccttgaatgctatagttatccatgaagtctatgaagaaggggcagcagcagtagatggaagactttgggctggtgaccagatattagaggttaatggggttgacctgaggaactccagccacgaagaagccatcacagccctgatgcagaccccccagaaggtgcggctggtggtgtatagagatgaggcacactaccgggatgaggagaacttggagattttccctgtggatctgcagaag

SEQ ID NO: 6107 - DNA, 5350 bp, Homo sapiens
  SIMILAR (115)..(4686): 1001254mologous to Homo sapiens PDZ domain protein,accession number AJ001306,Smith-Waterman Score=7826.
ctcacttccgcccaggtgaggcagggccgacaccgagcccgcccgacccgggctcccacctgctcctccagcgcaccaggtgtctttaagagtgattgaagagaataattcaaaatgcctgaaaatcctgctacagataaactgcaggtgctgcaggtacttgatcgcctgaaaatgaaattgcaggagaagggtgacacgtcgcagaatgagaagttatctatgttttatgagacactaaagagtcctctcttcaaccagatactcacacttcagcagtccatcaagcaactgaagggtcaactcaaccatataccctcagattgttcagccaactttgatttttctaggaaaggtttgttagtgttcacagatggttccattactaatggaaatgtccacaggccctctaataactcgactgtatctgggttatttccgtggaccccgaagttgggaaatgaagactttaactcagtcattcaacagatggctcagggccggcaaattgaatatatagatatagaacggccttcaactggaggccttggattcagtgtggtggccctcagaagtcaaaatctcggaaaagttgatatcttcgtgaaggatgtccagccagggagtgtagcagacagggatcaaagattaaaggaaaatgatcaaatattggccattaatcacacgccattggatcagaacatttcccatcagcaagcaattgcattattacaacaaaccactggatctttgagactgattgtggccagggaaccagtccacacaaaaagcagtacttctagcagcctaaatgatacaactctgcctgaaacagtttgttggggccatgttgaagaggttgagctcattaatgatggctctggactaggttttggaatagttggaggaaaaacaagtggcgtggttgtgaggactatagttcctggaggattagcagatcgagatggaagactccagacaggggaccacatcttgaagattggtggcacaaacgtgcagggaatgaccagtgagcaagttgcacaagttctaaggaactgtgggaattcagtcaggatgctcgttgctagagatccagctggtgacatttcagtcaccccccctgcccctgcagccttacctgttgccctgcctactgtagccagcaagggccctggttctgacagttctctttttgaaacttataatgttgagcttgtgagaaaagatgggcagagtcttggaattagaattgttggctatgttggaacatctcatacaggggaagcttcagggatttatgtgaaaagtataatacctggcagtgctgcgtaccacaatggccacattcaagtgaatgacaaaatagttgctgtcgatggcgtgaacattcagggttttgccaaccatgatgttgttgaagtattacgaaatgcagggcaggtggtacacctaaccctagttcgaaggaagacatcctcatctacttctccacttgaaccaccttcagacagaggaactgttgtagaaccactgaaaccaccagctctctttctaactggagcagtggaaactgaaactaatgtggatggtgaagatgaggaaattaaagaaagaattgatactttaaaaaatgacaacatacaagccttagaaaaattggaaaaagtcccagactctccagaaaatgagctgaaatccagatgggaaaacctgttgggtcctgattatgaagtaatggttgctactttggacacacagattgcagatgatgctgagttacagaaatattcaaagctgctgcctattcacactctgaggcttggtgtggaagtggattcctttgatgggcaccattatatttcttcaattgtttctggtggtcctgttgatacattgggtctcctacagccagaagatgagctgcttgaggtcaatggcatgcagctttatggaaaatctcgccgagaagcagtctcctttcttaaagaagtgccacccccttttactttggtttgctgtcggaggttgtttgatgatgaagcttctgtagatgaaccaaggcgcactgaaacctctcttcctgagacagaggttgaccacaatatggatgtcaatactgaagaagatgatgatggggaattagcactgtggtcccctgaagtcaagattgttgaactagtaaaagattgtaaaggtttgggattcagcattttggattaccaggaccctttagatcctacaagatcagtgattgtgatccgctccctggtagcagatggtgtagcagaaagaagtgggggactattacctggagaccgcctggtctcagtcaatgaataccgtttggacaacacctcacttgctgaagctgtggaaatattgaaagctgtgccaccaggcctagtacaccttggcatctgtaagcctttggtggaagataatgaagaagaaagttgttatattttacattcaagcagtaatgaagacaagactgaattttcaggaacaattcatgatataaattcatctttaatactcgaagcacccaagggatttagagatgaaccatattttaaagaagaacttgtggatgaaccatttctagatctgggaaagtctttccattcccaacaaaaagagatagagcaaagcaaggaggcctgggagatgcatgaatttctgactcctagattgcaggaaatggatgaagaaagagaaatgcttgttgatgaagaatatgagttatatcaagatccctcaccatccatggagttgtatcccttgtcgcacattcaagaggccactcctgtgccctctgtgaatgaacttcactttggtacacagtggttgcatgataatgaaccatccgagtctcaagaggcaagaaccgggaggactgtctattcccaggaggcacagccgtatggctattgccctgaaaatgtgatgaaagaaaattttgtcatggagtccctaccatctgtaccatcaactgaaggaaacagtcaacaaggcagatttgacgacctggaaaatcttaattcattagcaaaaactagtctggatttaggcatgatcccgaatgatgtccaaggtcctagcttgctcattgaccttcctgttgtggctcaaaggagggagcaagaagatttgcctttatatcaacaccaagcgacacgagttatttccaaggcctcagcatacacaggaatgttgtcttctagatatgccactgatacatgtgagttacctgagagagaagaaggcgaaggagaagaaactccaaattttagccactggggtccaccgagaattgttgagatttttagagaacccaatgtgtctcttgggatcagtattgttggtggacaaactgttataaaacgtctaaagaatggagaggagcttaaaggtatattcatcaaacaagttttagaagacagtccagcagggaagacgaacgcacttaaaactggagataaaatacttgaggtgtctggagtagatttgcagaatgcctcacacagcgaagcagttgaggccattaagaatgcaggaaaccctgtggtgttcattgttcagagtttgtcatccactccacgagtcattcctaacgtacataacaaggccaacaaaatcaccggtaaccagaaccaggacacccaagaaaagaaagaaaagaggcaaggaactgctccaccgccaatgaaacttcctcctccttataaagctctgactgatgacagtgatgaaaatgaagaagaagatgcctttaccgaccaaaaaatcagacaaagatatgcagatctgcctggagaactgcacattattgaacttgaaaaagataagaatggacttggactcagccttgctggtaataaagaccgatcacgcatgagcatatttgtggtgggaattaacccggaaggacctgctgccgcagatggacgaatgcatattggagatgaactcttagagataaacaatcagattctgtatggaagaagtcaccaaaatgcatctgccattattaagactgccccatcaaaggtcaagctggttttcatcagaaacgaggatgcagtcaatcagatggccgttactccctttccagtgccatcaagttctccatcttctattgaggatcagagcggcaccgaacctattagtagtgaggaagatggcagcctcgaagttggtattaaacaattgcctgaaagtgaaagcttcaaactggctgtcagccagatgaaacagcaaaaatatccaacaaaagtctccttcagttcacaagagataccattagcaccagcttcatcataccattcaacagatgcagacttcacaggctatggtggtttccaggctcctctgtcagtggaccccgcaacgtgtcccattgtccctggacaggaaatgattatagaaatatccaagagacgttcagggcttggtctcagcattgtgggaggaaaagacacacccttggttaatggggttgacctgaggaactccagccacgaagaagccatcacagccctgaggcagaccccccagaaggtgcggctggtggtgtatagagatgaggcacactaccgggatgaggagaacttggagattttccctgtggatctgcagaagaaagctggccggggcctgggcctgagcatcgttgggaaacggtaaagacgtgctgtgggagttgggatctgcctttttcatccagagctctgatgcctgtgaacactgaaagagaaagcctaatgtaaagtagtgatgggatttctaaaaataagatatttatgaaaatttgacaacatgggtcatatttctgagcaaggtcttaccagaaaaaattgtcatatcaagatagaactccaagtccaatcaatccagactgatatatttctgtacagagtaagaacaactagcaaggttctttcacttggaattactaagatcggagttttgcagaggttgattaaagcaaccatacccaagaaatagctagcatcaagaatgagatttatccaatgttgggtcaagaacattgcttcgacatggaaattaacatggaacattgcttttcgtgatactgttaatttcatactatgttgaaactagttgagtagacatagttaagagataaacataattcttcacgatagtagttttctattaagaaaaatgtcctgctgggcacagtggcatgtacctgttgtctcagctatgtgggaagatcacttgaggccaggagttcaaggctatagtgtgctatgatcatgcctgtgaatagccactgcacttgagcctcttgggaaacataacaagaccccatctgtaaatt

SEQ ID NO: 6108 - DNA, 4991 bp, Homo sapiens
  SIMILAR (115)..(4860): 1001254mologous to Homo sapiens C-terminal variant of hINADL including 2 amino acid exchanges and an insertion of 58 amino acids in frame,accession number AJ224748,Smith-Waterman Score=8138.
ctcacttccgcccaggtgaggcagggccgacaccgagcccgcccgacccgggctcccacctgctcctccagcgcaccaggtgtctttaagagtgattgaagagaataattcaaaatgcctgaaaatcctgctacagataaactgcaggtgctgcaggtacttgatcgcctgaaaatgaaattgcaggagaagggtgacacgtcgcagaatgagaagttatctatgttttatgagacactaaagagtcctctcttcaaccagatactcacacttcagcagtccatcaagcaactgaagggtcaactcaaccatataccctcagattgttcagccaactttgatttttctaggaaaggtttgttagtgttcacagatggttccattactaatggaaatgtccacaggccctctaataactcgactgtatctgggttatttccgtggaccccgaagttgggaaatgaagactttaactcagtcattcaacagatggctcagggccggcaaattgaatatatagatatagaacggccttcaactggaggccttggattcagtgtggtggccctcagaagtcaaaatctcggaaaagttgatatcttcgtgaaggatgtccagccagggagtgtagcagacagggatcaaagattaaaggaaaatgatcaaatattggccattaatcacacgccattggatcagaacatttcccatcagcaagcaattgcattattacaacaaaccactggatctttgagactgattgtggccagggaaccagtccacacaaaaagcagtacttctagcagcctaaatgatacaactctgcctgaaacagtttgttggggccatgttgaagaggttgagctcattaatgatggctctggactaggttttggaatagttggaggaaaaacaagtggcgtggttgtgaggactatagttcctggaggattagcagatcgagatggaagactccagacaggggaccacatcttgaagattggtggcacaaacgtgcagggaatgaccagtgagcaagttgcacaagttctaaggaactgtgggaattcagtcaggatgctcgttgctagagatccagctggtgacatttcagtcaccccccctgcccctgcagccttacctgttgccctgcctactgtagccagcaagggccctggttctgacagttctctttttgaaacttataatgttgagcttgtgagaaaagatgggcagagtcttggaattagaattgttggctatgttggaacatctcatacaggggaagcttcagggatttatgtgaaaagtataatacctggcagtgctgcgtaccacaatggccacattcaagtgaatgacaaaatagttgctgtcgatggcgtgaacattcagggttttgccaaccatgatgttgttgaagtattacgaaatgcagggcaggtggtacacctaaccctagttcgaaggaagacatcctcatctacttctccacttgaaccaccttcagacagaggaactgttgtagaaccactgaaaccaccagctctctttctaactggagcagtggaaactgaaactaatgtggatggtgaagatgaggaaattaaagaaagaattgatactttaaaaaatgacaacatacaagccttagaaaaattggaaaaagtcccagactctccagaaaatgagctgaaatccagatgggaaaacctgttgggtcctgattatgaagtaatggttgctactttggacacacagattgcagatgatgctgagttacagaaatattcaaagctgctgcctattcacactctgaggcttggtgtggaagtggattcctttgatgggcaccattatatttcttcaattgtttctggtggtcctgttgatacattgggtctcctacagccagaagatgagctgcttgaggtcaatggcatgcagctttatggaaaatctcgccgagaagcagtctcctttcttaaagaagtgccacccccttttactttggtttgctgtcggaggttgtttgatgatgaagcttctgtagatgaaccaaggcgcactgaaacctctcttcctgagacagaggttgaccacaatatggatgtcaatactgaagaagatgatgatggggaattagcactgtggtcccctgaagtcaagattgttgaactagtaaaagattgtaaaggtttgggattcagcattttggattaccaggaccctttagatcctacaagatcagtgattgtgatccgctccctggtagcagatggtgtagcagaaagaagtgggggactattacctggagaccgcctggtctcagtcaatgaataccgtttggacaacacctcacttgctgaagctgtggaaatattgaaagctgtgccaccaggcctagtacaccttggcatctgtaagcctttggtggaagataatgaagaagaaagttgttatattttacattcaagcagtaatgaagacaagactgaattttcaggaacaattcatgatataaattcatctttaatactcgaagcacccaagggatttagagatgaaccatattttaaagaagaacttgtggatgaaccatttctagatctgggaaagtctttccattcccaacaaaaagagatagagcaaagcaaggaggcctgggagatgcatgaatttctgactcctagattgcaggaaatggatgaagaaagagaaatgcttgttgatgaagaatatgagttatatcaagatccctcaccatccatggagttgtatcccttgtcgcacattcaagaggccactcctgtgccctctgtgaatgaacttcactttggtacacagtggttgcatgataatgaaccatccgagtctcaagaggcaagaaccgggaggactgtctattcccaggaggcacagccgtatggctattgccctgaaaatgtgatgaaagaaaattttgtcatggagtccctaccatctgtaccatcaactgaaggaaacagtcaacaaggcagatttgacgacctggaaaatcttaattcattagcaaaaactagtctggatttaggcatgatcccgaatgatgtccaaggtcctagcttgctcattgaccttcctgttgtggctcaaaggagggagcaagaagatttgcctttatatcaacaccaagcgacacgagttatttccaaggcctcagcatacacaggaatgttgtcttctagatatgccactgatacatgtgagttacctgagagagaagaaggcgaaggagaagaaactccaaattttagccactggggtccaccgagaattgttgagatttttagagaacccaatgtgtctcttgggatcagtattgttggtggacaaactgttataaaacgtctaaagaatggagaggagcttaaaggtatattcatcaaacaagttttagaagacagtccagcagggaagacgaacgcacttaaaactggagataaaatacttgaggtgtctggagtagatttgcagaatgcctcacacagcgaagcagttgaggccattaagaatgcaggaaaccctgtggtgttcattgttcagagtttgtcatccactccacgagtcattcctaacgtacataacaaggccaacaaaatcaccggtaaccagaaccaggacacccaagaaaagaaagaaaagaggcaaggaactgctccaccgccaatgaaacttcctcctccttataaagctctgactgatgacagtgatgaaaatgaagaagaagatgcctttaccgaccaaaaaatcagacaaagatatgcagatctgcctggagaactgcacattattgaacttgaaaaagataagaatggacttggactcagccttgctggtaataaagaccgatcacgcatgagcatatttgtggtgggaattaacccggaaggacctgctgccgcagatggacgaatgcgtattggagatgaactcttagagataaacaatcagattctgtatggaagaagtcaccaaaatgcatctgccattattaagactgccccatcaaaggtcaagctggttttcatcagaaacgaggatgcagtcaatcagatggccgttactccctttccagtgccatcaagttctccatcttctattgaggatcagagcggcaccgaacctattagtagtgaggaagatggcagcctcgaagttggtattaaacaattgcctgaaagtgaaagcttcaaactggctgtcagccagatgaaacagcaaaaatatccaacaaaagtctccttcagttcacaagagataccattagcaccagcttcatcataccattcaacagatgcagacttcacaggctatggtggtttccaggctcctctgtcagtggaccccgcaacgtgtcccattgtccctggacaggaaatgattatagaaatatccaagggacgttcagggcttggtctcagcattgtgggaggaaaagacacacccttgttctggaggctgggaagtccaagagcatggagccagcatctggtgagggccttcatgctgcatcatcctgtgacagaagttgaagggcaaaatgctatagttatccatgaagtctatgaagaaggggcagcagccagagatggaagactttgggctggtgaccagatattagaggttaatggggttgacctgaggaactccagccacgaagaagccatcacagccctgaggcagaccccccagaaggtgcggctggtggtgtatagagatgaggcacactaccgggatgaggagaacttggagattttccctgtggatctgcagaagaaagctggccggggcctgggcctgagcatcgttgggaaacgaaatggaagcggagtgtttatttctgacatcgtgaaaggcggagccgcagacctggatgggagattgattcagggagatcagatcttatctgtgaatggggaggacatgagaaatgcctcacaggagacagg

SEQ ID NO: 6109 - DNA, 863 bp, Homo sapiens
  SIMILAR (536)..(670): 1001254mologous to Homo sapiens PDZ domain protein 3' variant 4,accession number AB044807,Smith-Waterman Score=264.
gatattttaagggccatctcctttatattcaaagcagctcatactgcttgtggtcactacctgtttgccttgagattggctggaaatttctagagattctttactggttagatcaaggagattcagcagacagagaaggcagagacctctgccatcagcagcccagctcaggatgcccattgttccaggttaatggggttgacctgaggaactccagccacgaagaagccatcacagccctgaggcagaccccccagaaggtgcggctggtggtgtatagagatgaggcacactaccgggatgaggagaacttggagattttccctgtggatctgcagaagaaagctggccggggcctgggcctgagcatcgttgggaaacgaaatggaagcggagtgtttatttctgacatcgtgaaaggcggagccgcagacctggatgggagattgattcagggagatcagatcttatctgtgaatggggaggacatgagaaatgcctcacaggagacagtggccaccatcctcaagggtagtcagcagagtgcacacagcagctgtcatccctccttcgctcctgtcatcactggcctgcaaaacctggttggcacaaaaagagtttcagatccttcccagaaaaattcaggcacagatatggaaccaaggactgttgagataaacaggaagaaagccaaatcttttttttgttctagctcagaacaatacttccaaggacaccttctaaagagtggcactgctccttatgctgtgttgctgaaagaagacactctaaaaatctgtgagcatctgcttctgtcacagaatccaaaggagactgcacttcttgtgactccgccattgtaa

SEQ ID NO: 6110 - DNA, 1860 bp, Homo sapiens
  SIMILAR (763)..(1479): 301254mologous to Mus musculus Pro-Pol-dUTPase polyprotein,accession number Y12713,Smith-Waterman Score=284.
atgtggccacaacatgggttgtggtacctggtggtagccatgctgcaaggatgggccctagcggaaacctgggtggtggtcgatgggtcacccatgagtgtggaaaatgcgctgaagcagctggaagcacagagcactgagaaggagcgaacctttgccagcagagttggatgggcatttttcactgtgttacgagaagtgcatacccagtccctgagggataaagctcaggtaagggacctccaggcacaggcggggtgcatggagtccccgctacagagcttggagaaaaaattagagtctgacatgaatgcaagcctgggtccgccgtcttggctggaggtccgcactcaatctgatactgaggaggaagaacccctgttgcaggctcacccagtggtttgtcagaaagtagaccatgaacagcctgtgggatcccaagggcgggctcaaggaccccccatcgtaacaaaacacacttcatatattgcctataccccaactgagttgcggaaattaggcaagcagtgccgccagcgtctaggggaacccctgcccgcctggatgctttgtctgtgggacgagggagtagatagtatctcctgttctgcctctgagatggaaaagctggcctctatcatgactcattcctccctcagtcagcggttgcaagtgagcaggcagttagcagcagggcaaggtgaccacatcctgattcaggctgctatgagcagccatatggactgtgtggaacaatgccagggaaatacccaaaattatttagaagcagtggcacccctcttgcagcaacatttggcagcatgtagttgggctgtcaacaaatccaaggtccaagaaatccaaggtccaaggtccaagggcctagattatctgccaaattcttgggagctatctggtcagacaaaagccatcgcagaggctatcattgttaaaattcaggcgtatcctcatcccaccacagtgaacaagttacaaatgtctgtgggccttctgggatattggcgggcatttgtcccccatttagctcaaatgacaaaaccgttgtatcgattaacaaagaagggaactacctgggattgggatgatgcaactgagaccacctttctgacagccaagtgggctattcagctggcacaaaccctacgggtagttgaccaggggcatctgtttgagctggatgtgcatgtggccacagatggtttctgctggggcttatggcagtgcacggggcacttgagaatgtcagtaggcttttggtctccactatgcaaagcagctgagctctggtattccttaatagagaaacagctagcagctgtatatgcagctcttcaagcttgtgagaatgtgacaggacaggcttcagtcatcatgcgtacgacttaccccatagtgggatggctgcccagtgttacacaacaagtgacaatagggtcagtgtccttgacaaggtggcaagtagactacattgggttgctgctgaagttgcaagggtatacgcatgcactaacagctgtggacatggccacaggactgttcttcacctacccttggaggatggctgatcaacagcacaccatctgggccctgcaacacttatgtgccctgtatggttgccctctggctgttgagagtgatagtgttgagacatttcactgtataacaggtacaacaatgggcataacaaatggacataaagtgggaattctatttgccatacaacctgcaagctgcgcgtatgattgggctcttgaagaacgggttacacttgcatgtcacacccccatctttgcaaggctagagttcaagtctggacctgatgctccaaaccttgaatga

SEQ ID NO: 6111 - DNA, 101 bp, Homo sapiens
  SIMILAR (14)..(31): 661254mologous to Zea mays 8.7 kDa FeS protein,accession number X13159,Smith-Waterman Score=27.
cctctagttctgttgcaggggctgttggcatgaccacctctggggagagtgaatcagatgattccgagatgggacgtttgcaaggtaaaaacagttattga

SEQ ID NO: 6112 - DNA, 540 bp, Homo sapiens
  SIMILAR (310)..(477): 581254mologous to Homo sapiens serine/threonine protein kinase PFTAIRE-1,accession number AF119833,Smith-Waterman Score= 160.
atgggagaaggggtttggaggacaattaatgatgcctttctgatcttgaatcttcccactcatactcctccaaaagtcataaatccaacaaggagaacaaataaaaacagacaactcataccttcaagagcattaagagacagcaacaagcctgtgatagcaaagagtgacacaggggaagctgatagaggcttaagaagctgtgaaaaacagtacaggggtgtggaggacttaatcaaatcacaagcaaaattattccagaaagacaaaactgggatgctgtgtagttcattcacagcactggatgcaataaaggaggctgaaagtgactggaattggcagctgttggaaagcattgcctctaggggagagtcaaacggtgcttctcttttaaaaggactaaaacatgctaacatagtgctacttcatgacatcatccataccaaggagacgctgacacttgtgtttgaatatgtggggaggttgtcattcagaaccaagtacagaatgcgaacagatgtaaacattgtggatgactga

SEQ ID NO: 6113 - DNA, 1186 bp, Homo sapiens
  SIMILAR (183)..(242): 501254mologous to Oryctolagus cuniculus cytochrome P-450p- 2,accession number J02818,Smith-Waterman Score=50.
ttttcattttcagtactgacaaggggttttattttatatggttgtcataataaggcaaattcattttgtacactttatattttcaaaccccagcaaactctaaaagggacataaaataacttaaaaattgggaaaagatgggcatgtgtatgatcatgatattcatcccctgccccagaacaaaatgggaggaacacattgccccaaaacctcacggtctggagctctttcaacatgtctccccctggatggaccctgggacagcatcatggaaggtggtcccttcagccaccagggcagccatccaagttggacaggtcaggtggtaaaagggaaggtaattggtttgccaattaactggggtcacccaactaacatggtgttccatcttcccctaattccagtaccctggactcattacctgaaagcagtgttcaaccttagcaaaatctccaaccagcgcatgaacaattttctacatcacaacgacctggttttcaaattcagctctcaaggccaaatcttttctaaatttaaccaagaacttcatcagttcacagagaaagtaatccaggaccggaaggagtctcttaaggataagctaaaacaagatactactcagaaaaggcgctgggattttctggacatacttttgagtgccaaaagcgaaaacaccaaagatttctctgaagcagatctccaggctgaagtgaaaacgttcatgtttgcaggacatgacaccacatccagtgctatctcctggatcctttactgcttggcaaagtaccctgagcatcagcagagatgccgagatgaaatcagggaactcctaggggatgggtcttctattacctgggaacacctgagccagatgccttacaccacgatgtgcatcaaggaatgcctccgcctctacgcaccggtagtaaacatatcccggttactcgacaaacccatcacctttccagatggacgctccttacctgcagactctgtggaacctagggccattcttatttcccagagagggagaaagaggatagagctctcaggactatccaaacaggcacaggattatcaaggtgcaaagctgctgcgggtaactttctgggcttcagacaatgctgttgagatccgcatggatgttggtggaagagctggctccacccggctgactcagttttag

SEQ ID NO: 6114 - DNA, 1506 bp, Homo sapiens
  SIMILAR (1125)..(1244): 701254mologous to Mus musculus Pro-Pol-dUTPase polyprotein,accession number Y12713,Smith-Waterman Score=147.
atgcaggcaggtgtggacgtttggctcctcagaatagggagtccccagacagcgatgccggctcagcctgctcatcctggaaactggcggcccttgcgagggcggcgacagtggaatgcgttgaggactgccctgctaatgagattagttcgtctgaaacgtggaaatggtgcagatcacatcatatatcgtttaggaaccgttctgattactactaacaggacgcacgatggctgcgggatcccagtcatcatgttcacattccaggagtgcagaaaagaaaaaactgcaaacacagccggacatcagaaggaacaaacgggggacacgctgcctttaagaaacataacaggcaccgtgagggtccacggcttcattcttgaagttagtgagaccaagaacccacctaatcccgggcacaaaaccacctcaatctcccaaagaccgaaagccctggtgtcgctgggaccagaggtgagacgtggaacacgtggggaagatgagaaggcgctggagaaggagggtggtggtcgcagatgggaatgtggtgaagccaatgagctgtgcgggagacctccagccttcaccagggtaactgtgcattggggaaagggaaatgatcagacatttcaggacctattggacactggctctgagctgacattgattccaggggacccaaaacgtcattgtggtcctccagttaaaataggggcttatggaggtcagataattaatggagttttagctcaggtccaacttacagtggatgcagtgggtccctggactcatcctgtggtttttcccagtgccagaatgcataattggaatagacatactcagcagctggcagaatcccacattggctccctgactgtccatttatctagtgacccaaaaggctgccattctgagtggggtccagaacaggagaaggctctgcaagaggtccaggctgctgtgcaagctgctctgatacttgagccatatgacccagcaggtccagtggtgcttgaggtgtcactggcagatagggatgctgtttggagcctttggcaggcccccataggtgaatcacagcaaaggcctctaggattttggagcaaggccctgccatcttctgcagccataaagcgtgtcatgcacagcagcattccatcatcaaatggaagtggtatatacatgatcgggctcgagcaggtccggaaggcacaaatagttctgcacgatatgcagccaccatgtgaaaatgggacagcttcagcactacagcctctttctaggaaatccttgaaggacagcagtgaagggaaatcttcccagtgggcagaacttcgagccgtgcacctggctgtgcacgttgcatggaaggagaaatggccagatgtgcgattagatactgattcatgggccgtagcaatggtttggccagatggtcagggacttggaaggagcatgataggaaaattggtgacaaagaagtctggggaagaggtacgcggatag

SEQ ID NO: 6115 - DNA, 1569 bp, Homo sapiens; identical to SEQ ID NO: 5555
  SIMILAR (1282)..(1566): 731254mologous to Mus musculus Pro-Pol-dUTPase polyprotein,accession number Y12713,Smith-Waterman Score=381.

SEQ ID NO: 6116 - DNA, 1101 bp, Homo sapiens; identical to SEQ ID NO: 5648
  SIMILAR (508)..(666): 771254mologous to Mus musculus Pro-Pol-dUTPase polyprotein,accession number Y12713,Smith-Waterman Score=232.

SEQ ID NO: 6117 - DNA, 538 bp, Homo sapiens
  SIMILAR (241)..(537): 641254mologous to Mus musculus Pro-Pol-dUTPase polyprotein,accession number Y12713,Smith-Waterman Score=324.
ggtttctggagttggctgcttaatatgattagacccaaaaatgctaaggactctacttctaatagtatggagaacactgatagtacttggagtaaactgtttggagagttatgcaaaataaatgaatttgatactcctgattcaccactcctgagaggcaaggagtttaatgactctatacttaatacttttgaccatatgtggagaaccagggaacacaatgaagctgtttggttgcttctaagttcagtggacaaagtgatgaaagaaaatgatgaactcagggattctgtgtcccagcttcagaggcagatacctgcgcagaagatagatggatcttggcgaatgacagtgaattattgtaatcttaaccaagtggtgactccaatttcagctgctgtaccagatgcagtttcattgcttgagcaaatgaacacatctcctcgtatctggtatgcagccattgacttggcaaatgccttttattccattcctgtccataaggcccaccagaagcaatttgccttcagctggcaag

SEQ ID NO: 6118 - DNA, 1026 bp, Homo sapiens
  SIMILAR (183)..(28): 551254mologous to Mus musculus MUS MUSCULUS GENOMIC DNA CONTAINING N ALLELE OF FV1 GENE,accession number A67510,Smith- Waterman Score=128.
tcagggaagggatgttgccgctactggggatggggaagctgttccttctggcaaaaaaggttcatcagagtttacaaactcagtgttcccagttccatcagggtcctcccacatgtccccagtccaagttgcagggtcccgttcttttccaatcaatgccctcaccctgccctcactaagcttaacaataaatgctggtatattcagtgcgttagtggcaccatgggaccggaaggcagtgatcccccagacccagctttcactatcttttgtgtgtctattatttctcgacctgccgatccgccttgcttccctgtgttcctgggtattttcctggactcttcccatcttgagttctttctcctccaaacctccttgctgcaggtggatgtcggactggttttggtaactgacgctggttccattttcatttagtgtagtgctaaccccattacccaaaggtaatactattaggtactgaactggcatcttatgaggatggaacttgtcctggaagggaaccttgggtttctctgttacagcccagccctcctccggtactcccagaacagctcttgggtctaggacaacaaagcccttattggtctcattgttgcaagtgtagttggaaacatctgagataaagctgggatggaaaaccgagcaaactgttaaaatccactttttctttctttctctttctttttctttccttttaaaactcacttctttacttcctgctccagccctggaatcagccatttctctgaaaaactgtggttctacagaagttggtttttcaatatgaacaagactagttaccagcttaatgctcttgcctgcagtggttgaacccatctcagtgtgcttggaactaagcatgtaaaaaattcttctgaagctcctcttggttggaagtattggctttaccttcatccagatcctcgtccttatgtgaccccacaataccttgttttgctggtggtagccaaagaggagaagggagcttctgtggctttccttcat

SEQ ID NO: 6119 - DNA, 1428 bp, Homo sapiens
  SIMILAR (886)..(1341): 731254mologous to Mus musculus Pro-Pol-dUTPase polyprotein,accession number Y12713,Smith-Waterman Score=557.
gtctctagtcatttgtcacctaggccagcagtatctgttggaaatgttggccagcttgcaatggatctgattatttctacactgaatatgtctaagattggttacttctataccgattgtcttgtgccaatggttggaaacaatccatatgcgaccacagaaggaaattcaacagaacttagcataaatgctgaaggtattactcccttccggtacctacttacaccttccatgcaaaaaagtgttcaaaataaaataaagagccttaactgggaagaaatggaaaaaagccggtgcattcctgaaatagatgattccgagttttgtatccgcattccgggaggaggtatcacaaaaacactctatgatgaaagaatagggagtccccagacagcgatgccggctcagcctgctcatcctggaaactggcggcccttgcgagggcggcgacagtggaatgcgttgaggactgccctgctaatgagattagttcgtctgaaacgtggaaatggttcctgtttcctagtacttttttcttctgatgtgatacattacgaaagcaacaacaccttttctgtattctgccccaaaacattaaccttttatctaatcaagcctttagagctaactccagttacagaaaacacaggggctagaacaacaagccaagtgacaagaggacgtaatcagacaaatcagaagaaacgatggaaagaactttctaaggaagacttatctcctgcctttgatcattcaccaaacaaaataatgactgaaaaatacaatgggaacagaataggtctagaagaagaaaaactgacaggtgaccgatgtacaggactttcctctaaaatgcaagatacaatggaggagaacagtgagaggagacctccagccttcaccagggtaactgtgcattggggaaagggaaatgatcagacatttcagggactattggacactggctctgagctgacattgattccaggggacccaaaacgtcattgtggtcctccagttaaaataggggcttatggaggtcagataattaatggagttttagctcaggtccaacttacagtggatgcagtgggtccctggactcatcctgtggtttttcccagtgccagaatgcataattggaatagacatactcagcagctggcagaatcccacattggctccctgactggtagggtgagggctactatggtgggaaaggccaaatggaagccattagagctgcctctacctagaaaaatagtaaatcaaaaacaatatcacatccctggagggattgcggagattggtgccaccatcaaggacttgaaggacacgggtggtgattcccacatccccattcaactctcccatttgacctatgcagaagacagatggatcttggagaatgacagtggattatcttaa

SEQ ID NO: 6120 - DNA, 850 bp, Homo sapiens
  SIMILAR (295)..(648): 611254mologous to Mus musculus Pro-Pol-dUTPase polyprotein,accession number Y12713,Smith-Waterman Score=351.
aaagaaaaaactgcaaacacagccggacatcagaaggaacaaacgggggacacgctgcctttaagaaacataacaggcaccgtgagggtccacggcttcattcttgaagttagtgagaccaagaacccacctaatcccgggcacaaaaccacctcaatctcccaaagaccgaaagccctggtgtcgctgggaccagaggtgagacgtggaacacgtggggaagatgagaaggcgctggagaaggagggtggtggtcgcagatgggaatgtggtgaagccaatgagctgtgcgggagacctccagccttcaccagggtaactgtgcattggggaaagggaaatgatcagacatttcaggacctattggacactggctctgagctgacattgattccaggggacccaaaacgtcattgtggtcctccagttaaaataggggcttatggaggtcagataattaatggagttttagctcaggtccaacttacagtggatgcagtgggtccctggactcatcctgtggtttttcccagtgccagaatgcataattggaatagacatactcagcagctggcagaatcccacattggctccctgactgtccatttatctagtgacccaaaaggctgccattctgagtggggtccagaacaggagaaggctctgcaagaggtccaggctgctgtgcaagctgctctgatacttgagccatatgacccagcaggtccagtggtgcttgaggtgtcactggcagatagggatgctgtttggagcctttggcaggcccccataggtgaatcacagcaaaggcctctaggattttggagcaaggccctgccatcttctgcag

SEQ ID NO: 6121 - DNA, 864 bp, Homo sapiens
  SIMILAR (160)..(699): 491254mologous to Mus musculus MUS MUSCULUS GENOMIC DNA CONTAINING THE FV1 GENE,accession number A67508,Smith-Waterman Score=428.
ttcagtaccagagatggttctctgacagtgtggagcaccagaaaccatgagaaggaggcacagcaatctctcctgagcatggagcctgctcttggtgttgttttgctgcagctgctgtttgccattgatgatcgttctcttctttcaggagatatggagaacactgagagtccttggcatgaactgttcagagacttatgcaaaataaatgcatttgacactcctgattcatcactcatgagaggcaaggagtttagtgactctatacataatacctttgaccatatgtggagaaccaaggaacataatgaagctggttggttgttcctaagttcagtggacaaagtgatgacagaaaatgatgaactcaggaattctatcttccggcttcagaagcagatactaagcctcaaatctgctaagattgccctgagtgagagttttatctcctatagagaaagaactgaaattgtggaaaaacagacagaagctcttatcatgcgaatggctgacccgcaaggaaaggtgcatgcgcagcctcaacaggtgtctactgttaaagggaggacattgattggaaaagaatgggaccccgcaacttggaatggggacgtgtgggaggaccctgatgaagctggggacactgagtttgtaaactctgatgaaccttttttgccagaagtaacagcttccccatccccaagagacctctggccttttaccagggtaactttgcactggggaaagggaaatgatcagacattttggggactactggacactggctctgagctggtgatgattccaggggacccaaaatgtcattgtggtcctccagttaaaataggggtttatggtggtcag

SEQ ID NO: 6122 - DNA, 446 bp, Homo sapiens
  SIMILAR (444)..(28): 471254mologous to Mus musculus MUS MUSCULUS GENOMIC DNA CONTAINING N ALLELE OF FV1 GENE,accession number A67510,Smith- Waterman Score=285.
gtccctgacttcccggcaaaaccaatccaaggccctcactttaacagtagatacttggcgaggctgtgcatggtgaggctgtgcatgcacctttcattgcaggtcagccactaacatgataagagcttatgtctatttttccacaatttcagttctttctctacaggagattagactctcactcagggcaatcttggcagatttgaggctcagtatctgcttctgaagctgggagatagaatccccgagttcatcattttctttcatcactttatccactgaacttaggagcaaccaaccagcttcattatgttccttagttctccacatatggtcaaaggtatgatgtatagggtcactaaactccttgcctctcatgagcaatgaatcaggagtgtcaaatgcatttattttgtataactctttaaacagttcacaccaagggc

SEQ ID NO: 6123 - DNA, 3042 bp, Homo sapiens
  SIMILAR (1618)..(2130): 671254mologous to Mus musculus Pro-Pol-dUTPase polyprotein,accession number Y12713,Smith-Waterman Score=553.
atgtttcctactacggacaaccacgctactggtcactacgctgtttcctacttacgggacaccacggctactgagtcaatacgcttggtttcctactacgggacaaccacgctactagagtccactacgtcgtgtttcccatactacgggacacaccacgctactgagtcactacggcttgttatcctactacggacacaccacggctactggagtcactacggctgttttcctactacgggacacaccacggcttacatgagggccacatacagacgaggagtaaccgaggttaaccaaggggaccacgacggactccatgagcaccactaccggagtggatactcccgtaccgggacacaccacctggcaacctggggcaactacggacaggataaatcccgtaacggggacagcaaccaccgggacaacttggagtacacctcacgaggaaagttgaggaccgccaatagttatggaatccaaggagtaagtaccagcctcgtcttctgctacaccatcattgagaggaacaatcgccagatgctgccagtcattaggagtaccactggaggagactcagtgcagacctgcacaaacccactggacaccttcttcccctttgatccctgtgtgctgaagagaacacaaggcgacttcaacacagagaacactccgccaactaacaaaacacaccccatcaaccaagaaccacattcaaaaaccacgaacatgtacaccaaaaaaggggacaagccgccgttccggcagaggtcccagatcacgtcccactctactggacaccccaacaccttcatgtcccgacagagcaccacagcggctccctcccgggaaggagcacaccggcattcgtgccagaccagcaagggtgtcctggacactgcccagatgctgaccccgtcatcaaagcagacactggacactgcccaggtgccgaccccaccatcgaagcagacactaccttgtcccctcccgccccccagcaagaagacgccaagccctgagagatttgcctgtgctcagcactgtgtggaggagcggcatgttttcgtgggcacagagacagctctgaagcagatactgagcctcagatctgctaagattgccctgagtgagagtcttatcagctgtagagaaagagttgaaattgtggaaaaacagacacaagctcttatcatgcgagtggctgacctgcaacaaaaggtgcatgcacagcctcaccaggtgtctactgttaaaatgagggcattgattggaaaagaatgggaccctgcaacttggaatgcagacgtgtggggggaccctgatgaagctggggacactgagtttgtaaactctgatgaatcttttttgccagaagaaaaagcttccccatccccagtagtgacaacatccactccccaacccatgctgccatcagcctttccacctttgtctgaggagataaaccctgcactgcctgaggcaacagtgatggcctcccctgaggcagttgccaggcaagataatgttgattctcctcaggagccacccccaacacccctgtttgcttctagacctacaactagactaaagtcctggcaggcccctagagggccagaatgcataattggcatagacatacttagcagcggacagaacccccacattggctccctgactggtagggtgagggctattatggtgggaaaggccaaacggaagccattagagctgcctctacctagaaaaatattaaatcaaaaacaatatcgcatagctggagggattgaggagattagtgccaccatcaaggacctgaaagacgcaggggtggtgattcctaccacatccctgttcgactctcccatttggcctgtgcagaagacagatggatcttggagaatgacagtggattatcgtcagattaatcaagtggcaactccaattgcagctgctataccagatgtggcttcattgcttaagcaaattaacacatctcctgacacctggccatacgaccccccatatccaatggtgattgaggtgtcagtggcagataggcatgctgtttggagcctttggcaggcccccataggtgaatcacatcagaggcctctaggattttggaacaaggccctgccatcttctgcagataactactctccttttgagagacagctcttggcctgttactgggctttggtggaaattgaacgtttgattatacccaatggtttggctggatggtcagggacttggaagaagcatgactggaaaattggtgacaaagaaatttggggaagaggtgtatggatgaaactctctgagtggtcaacaactgtgaagatatttgtattccatgtgagtgctcaccaatgggtgacctcagcagaggaggattttaataatcaagtggataggatgacctgttctgtggacaccattcagcctctttccccagccacccctgtcatcgcccagtgggcccacgaacaaaggggccatagtggcacagatggaggttatggatgggctcagcaacatggacttccactcaccaaggctgacctggctatggccactgctaagtgcccaatttgccagcacttatgggggaatggccttttgaagtcacaattacaacgtaaacaaggtaacaatagtttgcagggctggggcaaagttctccagacggccgtgaatgctctgaatcagcatgcaatatatggtactctttctcccatagccagaattcatgggtccaggcatcaagggttggatgtagaagtggctccactcaccatcatccctagtgatccactagcaaaatttttgcttcctgttcctgcaacattacgttctgttgacctagaggtcttagttccagagacaggaatgctgccaccaggagacacaacaatgattccattaaactggaagttaaggttgctacctggacactttgggctccttctacctttaactcaacaggctaagaagggagttacagtgttggctggggtgattgacccagactaa

SEQ ID NO: 6124 - DNA, 2259 bp, Homo sapiens
  SIMILAR (1456)..(2256): 1001254mologous to Homo sapiens calcium-dependent chloride channel-1,accession number AF039400,Smith-Waterman Score=1413.
atgattatctcaatagatgcagaaaaggccttcgataaaattcaacagcctttcatgctaaaaacactcagtaaactagaagaaacagcatccccatccccagtagtggcaacatacactccgcaacctatgctaccatcagcctttccacctttgtctgaggagataaatcctgtgctgcctgagacaacagtgatggcctcccctgaggcagttaccaggcaagataatgttgattctcctcagaagccaccccctacacccatgtttgcttctagacctataactagactaaagccccggagagcccctagtgaggaagggatccaaaggcttaaaaagattgggatggtggagtggattagtcactttagacctactcctctcagcatggaaggtccagaacatatactcttgaccaacaccttgttaaatagatatgtgaaggcagcacctgcatctttgaagagccctttaactgctcttctctttatgtcagatctaactgtgggaaccacattctctcaactacaaaatttaaatacaatgggaatatttgggtcctcatgtgacaggagccaagtggcagcactcaaccatcaaaggcaagtgccagaattaataattggcatagacatacttagcagctggcagaacccccacattggctccctgaatggtaggggatatatcaactctctggctttgtgtcataatcttattcggcgagatcttgatcgctttttgcttccacaagatatcacactagtccattacattgatcacattatgcgattggattcagtgaaggataagtggctgcatttggcccctcctacaaccaagaaagaggcacaatgcctagtgggcctattggattttggaggcaacacatttctcatttggagacagcccttggcctgttactgggctttggtggaaactgaacatttgactatgggccatcaagtcaccatgcaacctgaattgcctatcatgaactggctgctttctgatccatctagttataaacctgcaccaatggcctcatggggagttccctatggtcaacttacagaggaagagaagactagggcctggttcacagatggttctgcaagatacacagaaaccacccgaaagtggacagctgtagcaatacagcccctctctaggacatccttgaaagacagcaatgaagggaaatcttcccatcaacaggctaagaatggaattacagtgttggctggggtgattgacccggactatcaagatgaaattagtctactactccacaatggaggtgtcatcctgggagcagtgtgtggagggcttcttcgcttggcatctcccatccaccctgatgtggttatgttaatagccttcccaggggatatactcatgaggatgctaagaatgctcattctccctctaatcatctccagcttaatcacaggtgctgatgctactaaggatgacggtgtctactcaaggtatttcacaacttatgacacgaatggtagatacagtgtaaaagtgcgggctctgggaggagttaacgcagccagacggagagtgataccccagcagagtggagcactgtacatacctggctggattgagaatgatgaaatacaatggaatccaccaagacctgaaattaataaggatgatgttcaacacaagcaagtgtgtttcagcagaacatcctcgggaggctcatttgtggcttctgatgtcccaaatgctcccatacctgatctcttcccacctggccaaatcaccgacctgaaggcggaaattcacgggggcagtctcattaatctgacttggacagctcctggggatgattatgaccatggaacagctcacaagtatatcattcgaataagtacaagtattcttgatctcagagacaagttcaatgaatctcttcaagtgaatactactgctctcatcccaaaggaagccaactctgaggaagtctttttgtttaaaccagaaaacattacttttgaaaatggcacagatcttttcattgctattcaggctgttgataaggtcgatctgaaatcagaaatatccaacattgcacgagtatctttgtttattcctccacagactccgccagagacacctagtcctgatgaaacgtctgctccttgtcctaatattcatatcaacagcaccattcctggcattcacattttaaaaattatgtggaagtggataggagaactgcagctgtcaatagcctag

SEQ ID NO: 6125 - DNA, 2093 bp, Homo sapiens
  SIMILAR (1077)..(1454): 631254mologous to Mus musculus Pro-Pol-dUTPase polyprotein,accession number Y12713,Smith-Waterman Score=418.
tccaagtcccaaaactgaagaaccctgactaatacagattttggtattgggagtggttctagaggaacagaatattaaggatggagttcttttgttggttttggggtttctgaagttggctgcttaatatgattagaccccaaaatgctaaggactctacttttaatagtatggagaacactgatagtccttggtgtgaactgtttagagagttatgcaaaataaatgcatttgacactcctgattcatcactcctgagaggcaaggagtttagtgactctatatataatacctttgatcatgtgtggagaaccaaggaacataatgaagctggttgtttgctcctaagttcagtggacaaagtgatgaaagaaaatgatgaactcagggattctgtctcccagcttcagaagcagatactgaccctcaaatattctaagattgccctgagtgagagtcttatctcctgtagagaaagagctgaaattgtggaaaaacagacacaagctcgtatcatgcaagtggctgacctgcaaggaaaggtgcatgcacagcctcaccaggtgtctactgttaaagtgagggcactgattggaaaagaatgggaccctgcaacttggaatggggatgtgtgggaggaccctgatgaagctggggatactgagtttgtaaactctgatgaactttttttgccagaagagacagcttccccatccccagtagtggcaacatcacctccccaacccatgctgccatcagcctttcaacctttgtctgaggagataaaccctacgctgcctgaagcaacagtgatggcctcccctgaggcagttgccaggcaagataatgttgattctcctcaggagccacccctaacacccatgtttgcttctagatctataactagactaaagttcctgcagacccctagaggtgtggttgagagtgtgacccatgaggtgggaaatgatcagacatttgggggactactggacactggctctgagctgacgttgataccagcggaccctaaacgttattgtggtcctccagttaaagtagaagcttatggaggtcaggggaggcctctaggattttggaacaaggccctgccatcttctgcagataactactctccttttgagagacaactcttggcctgttactgggctttggtggaaactgaacatttgactacgggtcatcaagtcaccatgcgacctgaactgcctaccacgaactgggtgttttctgacccatctaaccataaagtaggtcatgcacagcagtattccatcatcgaatggaagtggtatatacatggttgggctcgagcaggtcctgaaggcacaacttcatggggagttccctatgaacagttgacagaggaagagaagactacggccttgtacacagatggttctgcacaatatgcaggcaccacccgaaagtggacagctacagcagtacagcccctttctaggacatccctgaaggcagcagtgaagagaaatcttcccaggcagaggtttgtcctcattggaataaacacttactacgggtattggtttacctatcctgaatgcagtgcttctgccaagtctgccatccgtggactcatggaatgccttatccgccatcatggtattccacacagcattgcgtctgacaaaggccctcactttaaggctaaagaagtgcagcagtgggctcatgctcatgggattcactggtcttaccatgtttcccatcaccctgaagcagctgaattgatagaacagtggaatggcctcttggggtcagaattacaatgccaagtcaatgggaatctacaacagcccaatccaggcaggactacaagttacccagtcccttctggaatgaagttttgggtcactccaccaggaaaaataccacaacctgttgaggtgcttgctgaaggcaaagggaatacagaatgggtaggagaagaagttagtcatcaataccagctatgaccacatgaccagctgcagaaacgaggactgtaattgtcatgagtatttcctccttctgttcttaaagacatgtttgtgcatgtgtacacttctact

SEQ ID NO: 6126 - DNA, 1107 bp, Homo sapiens
  SIMILAR (1019)..(1105): 931254mologous to Homo sapiens unknown protein,accession number M22334,Smith-Waterman Score=138.
atggggagaaaccagaacagaaaggctgaaaattccaaaaactggaacgcctcttctcctccaaaggaacacaactcctcgccagcaagggaacaaaactggagggaggatgagtttaacgagttgacagaagtaggcttcagaaggtcggtaataacaaacttctccgacctaaaggagcatgttctaacccattgcaaggaagctaaaatccttgaaaaaaggttagacaaatggctaactaaaataaccagtgtagagaagagcttaaatgacctgatggagctgaaaaccacagtacgagaacttcatgaagcatacacaagcttcaatagccgatttgatcaagcggaaaaaaagatatcagtgattgaagatcaaattaatgaaataaagcaagaagacaagatgagagaaaaaaaaatacaaactaccatcagagaatactacaaacacctctatgcaaatatactagaaaatctagaagaaatggataaattcctggacacatacactctcccaagactaaaccaggaagaagttgaatctctgaatagaccaataacaggatctgaaattgtggcaataatcaatagcttaccaaccaaaaagagtccaggaccagatggattcacagccaaattctacagagctgataagcaacttcagcaaactctcaggatcaaaatcaatgtacaaaaatcacaagcattcttatacaccaataacagacaaacagagagccaaatcatgagtgaactcccattcacaattgcttcaaagagaataaaatacttaggaatccaacttacaagggacgtgaatgacctcttcaaggagaactacaaaccactgctcaatgaaataaaagaggatacaaacaaatggaagaacattccatgctcatgggtaggaagaatcaatatcgtgaaaatggccatgctgcccaaggtaatttatagattcaatgccatccccatcaaactaccaatgactttcttcacagaattggaaaaaactaaagttcatgtggaaccaaaaaagagcccacatcgccaagtcaatcctaagccaaaagaacaaagctggaggcatcacgctacctga

SEQ ID NO: 6127 - DNA, 1395 bp, Homo sapiens
  SIMILAR (795)..(4): 921254mologous to Homo sapiens putative p150,accession number U93570,Smith-Waterman Score=1253.
ctatatgaactttaaagtagttttttccaattctgtgaagaaagtcattggtagcttgatggggacggcattgaatctataaattaccttgggcagtatggccattttcataatattgattcttcttatccatgagcatggaatgttcttccatttgtttgtatcctcttttatttcattgagcagtggtttgtagttctccttgaagaggtccttgacgtcccttgtaaattggattcctaagtattttattctctttgaagcaattgcgaatgggagttcactcatgatttggctctgtgtttgtctgtttttggtgtataagaatgcttgtgatttttgtacattgattttgtatcctgagactttgctgaggttacttatcagcttaaggagattttgggctgagacaatcgggttttctagatatacaatcatgtcatctgcaaagagggacaatttgacttcctgttttcctaattgaataccctttatttccttctcctgcctaattgccctggccagaacttctaacactatgttgaataggagtggtgagagagggcatccctgtcttgtgcccgttttcaaagggaatgcttctagtttttgcccattcagtatgatattggctgtgggtttgtcatagatagccctcattattttgagatacgtcccatcaatacctaatttattgagagtttttagcatgaagcgttgttgaattttgtcaaagaccttttctgcatctattgagataatcatgtggtttttgtctttggtcctgtttatatgcagttcctccttgtacctctggtagaatttggctgtgaatccatctggtccaggactctttttggttggtaagctattgattattgccacaatttcagatcctgttattggtctattcagagattcaacttctccctggtttagtcttgggagagtgtatgtgtggcggaatttatccatttcttctagattttctagtttatttgcatagaggtgtttgtagtattctctgatggtagtttgtatttctttctctctggctgcctttaacattttttccttcatttcaactttggtgaatctgacaattatgtgtcttggagttgctgttctcgaggagtatctttgtggcattctctgtatttcctgaatctgaatgttggcctgctttgctgaattggggaagttctcctggataatatcctgcagagtgttttccaacttggttccattcttcccgtcacttttaggtacaccaatcagacacagatttggtcttttcacatagtcccatatttcttggaggctttgttcatttctttttattcttttttctctaaacttctcttcatgcttcttttcattcatttcatctttcat

SEQ ID NO: 6128 - DNA, 1995 bp, Homo sapiens
  SIMILAR (1078)..(1989): 901254mologous to Homo sapiens putative p150,accession number U93563,Smith-Waterman Score=1499.
atggcacgagaactacgtgacgaatgcacaagcttcagtagccaattccatcaactggaagaaagggtatcagtgattgaagatcaaatgaatgaaatgaagcaagaagagaagtttagagaaaaaggaataaaaagaagtgaacaaagcctccaagaaatatgggactatatggaaagaccaaatctatgtctgattggtgtacctgaaagtgacggggagaatggaatcaagttggaagacactctgcaggatattatccagaaggacttccccaacctaggaaggcaagccaacattcagattcaggaaatacagagaatgccacaaagatactcctcgagaagagcaactccaagacacataattgtcagattcaccaaagaaatacaaactaccatcagagaatattataaacacctctatgcaaataaactagaaaatctagaagaaatggataaattcctcgacacatacaccctcccaagactaaaccaggaagaagttgaatctctgaatagaccaataacaggctctgaaattgaggcaataattaatagcttaccaaccaaaaaaagtccaagaccagacggattcacagccgaattctaccagaggtacaaggaggagctggtaccattccttctgaaactattccaatcaatagaaaaagagggaatcctccctaactcattttatgaggccagcatcatcctgataccaaagctgggcagagacacaacaaaaaaagagaattttagaccaatatccctgatgaacatcgatgcaaaaatcctcaataaaatactggcaaaccaaatgcagcagaacatcaaaaaccttatccgccatgatcaagctggcttcattcctgggatgcaatgctggttcaacatacgcaaatcaataaatgtaatccagcatataaacagaaccaaagacaaaaaccacatgattatctcaatagatgcagaaaaggccttctacaaaattcaacagcccttcattctaaaaactctcaataaattagagaataaaatacctaggaatccaacttacaagggatgtgaaggacctctcttcaaggagaactacaaactaatgctcaaggaaataaaagaggacacaagcaaatggaagaacattccatggtcatggataggaagaatcaatatcgtgaaaatggccatactgcccaaggtaatttatagactcagtgccatccccatcaagctaccaatgattttcttcacagaattggaaaaaactactttaaagttcatatggaaccaaaaaagagcctgcattgccaagtcaatcctaagccaaaagaacaaagctggaggcatcatgctacctgacttcaaactatactacaaggctacagtaaccaaagcagcatggtactggtaccaaaacagagatatagaccaatggaacagaacagagccctcagaaacaataccacacatctacagccatctgatctttgacaaacctgacaaaaacaagaaatggggaaaggatttcctatttaataaatggtgctgggaaaactggctagccatatgtagaaaactgaaactggatcccttccttacaccttacacaaaaattaattcaagatggattaaagacttaaacgttagacctaaaaccataaaaaccctagaagaaaacctaggcaataccattcaggacataggcatgggcaaggacttcatgtgtaaaacaccaaaagcaatggtaaccaaagccaaaattgacaaatgggatctaattaaactaaagagcttctgcacagcaaaagaaactactgtcagagtgaacaggcaacctacagaatgggagaaaatttttgcaatctactcatctgacaaaaggctaatatccagaatctacaaagaactcaaactaatttacaagaaaaaaacaaacaaccccatcaaaaagtgggcaaaggatatgaacagacacttctcaaaagacacatga

SEQ ID NO: 6129 - DNA, 1162 bp, Homo sapiens
  SIMILAR (1)..(543): 911254mologous to Homo sapiens ORF1, encodes a 40 kDa product,accession number U09116,Smith-Waterman Score=856.
  misc_feature (1)...(1162): n = a,t,c or g
atggagaatgactttgatgagctgagagaaggcggcttcagaagatcgaattattctgagctacgggaggacattcaaaccaaaggcaaagaagttgaaaactttgaaaaaaatttagaagaatgtataactagaataaccaatacagagaagtgcttaaaggagctgatggagctgaaaaccaaggctcaagaactacgtgaagaatgcagaagcctcaagagccaatgcaatcaactggaagaaagtgtatcagcaatggaagatgaaatgaatgaaatgaagcgagaagggaagtttagagaaaaaagaataaaaagaaatgaccaaagcctccaagaaatatgggactatgtgaaaagaccaaatctacgtctgattggtgtacctgaaagtgatggggagaatggaaccaagttggaaaacacgctgcaggatattatccaggagaacttccccaatctagcaacgcaggccaacgttcagattcaggaaatacagaaaacgccacaaagatactcctcgagaagnagcaactccaagacacataatgaaatacaaactaccatcagagaatactacaaacacctctacgcaaataaactagaaaatctagaagaaatggataaattcctcgacacatacactctcccaagactaaaccaggaagaagttgaatctctgaatagaccaataacaggagctgaaattgtggcaataatcaatagcttaccaaccaaaaaagagtccaggaccagatggatccacagccgaattctaccagaggtacaaggaggaactggctggagcttttggacattccctgggttacacaggggccagcccctgaagcaagagcttctccaaccagccatttaccccattccacttgtctcatctaaggagtatcataggccaggcttcattgcagttgggctagaactagtagctcctgtgaggactcaaagagatgatgcttatgaagtgcccagcacagggcagcatgtggacgtggtggctgttcatgtgtgccctgcttgggtgaccaccaagttcaggtcacggtccccacccctgccagagcccctcgactngaatatggggcccaaccccatttggcttagcagggatgctgactgtgggagcaggggcatgcgctcag

SEQ ID NO: 6130 - DNA, 2025 bp, Homo sapiens
  SIMILAR (493)..(1203): 901254mologous to Homo sapiens p40,accession number U93566,Smith-Waterman Score=1100.
atgaccaacacctaccactaccctcagcagacatccattagagaagtcggacctggacaactttgccaggtagcattaggcctgacccatggtggttccattggtggtaaccacagtggtgcttgtgtcacccaaccatcagctccagatggctcagcaaagacacagaggagactcagttattttgggagaaggaagagtgacatgggtttgataagtaacatgctcatgggagaggctgaggcagagggtcccaagtatagaccaggccatgcagatgtttgtcagcaaccacccatggcaccacccaatcagccagacacattaagcccttccttgaccccagacaccatcctacacaccagggataaaaatgacctgcagctgagggtcctattagaaggaaaattaacaaacagaaaggacatccacaccaaaaacccatctgtacatcaccatcatcaaagaccaaaagtagataaaaccacaaagatggggaaaaaacagagcagaaaaactggaaactctaaaaatcagagcgcctctcctcctccaaaggaatgcaattcctcaccagcaacaaaacaaagctggaccgaaaatgactttgaggagctgagagaggaaggcttcagacgatcaaattactctgagctatgggaggacattcaaaccaatggcaaagaagttaaaaactttgaaaaaaatttagaagaatggataactagaataaccaaggcagagaagtgcttaaaggacctgatggagctgaaagccaaggctccagaactacgtgacaaatgcagaagcctcaggagccgatgcgatcaactggaagaaagggtatcagcgatggaagacaaaatgaatgaaatgaagcgagaagagaagtttagagaaaaaagaataaaaagaaacgaacaaagcctccaagaaatatgggactatgtgaaaagaccaaatctacgtctgattggtgtacctgaaagtgatggggagaatggaaccaagttggaaaacactctgcaggatattatccaggagaatttccccaatctagcaaggcaggccaatgttcagattcaggaaatacagagaacgccacaaagatcctcctcgagaagagcaactccaagacacataattgtcagattcaccaaagttgaaatgaaggaaaaaatgttaagggcagccagagagaaagaaatacaaactaccatcagagaatactacaaacacctctacacaaataaactagaaaatctagaagaaatggataaattcctcgacacatacactctcccaagactaaaccaggaagaagttgaatctctgaatagaccaataacaggatctgaaattgtggcaataatcaatagcttaccaaccaaaaagagtccaggaccagatggattcacagccgaattctaccagaggtacaaggaggaactgaagacatttatgcagtgtctccaggcttttcagttaccaacccctcccctcgggcaagtcacacaggcacccacggctgctggaaacgattgtggtcagtggatatgggcagttatgatgtcgtctctttgtggggcactcacagtatccaaggtggccactagcatgcctcttctccatgcatttgatctcatcataattctgtcacaccatgttgggagcttggccccctgcccacaatgcagatcagcagtccagcagagcttcctctactgcttcaggggtgagacagcagtagctgtgtcaaggaatcccagctggtgcctagaaggtgaaggagagtcgcaggctctggagctttgggctgagcaggcccacacagatgttgtcagaaacaggaaatataaaatttcgagcaaactgcatgttaagtacatgaaggataagaacaatagcaagcctttaggccgttggggagtaccaatgggcgccttgctggatcagaaacgcagcagacacagatctggaggggtggaagtcaatggcgtgtctgccatggcggcaaacagctga

SEQ ID NO: 6131 - DNA, 885 bp, Homo sapiens
  SIMILAR (610)..(876): 611254mologous to Homo sapiens PRO2221,accession number AF116695,Smith-Waterman Score=261.
atgagaaacctaaggaatattcagaaggcaaaagcaactataaacttgggaatatcctttgatgaaggcttgaaggggtttatgtggtccagaatagaggcagctcctcttccaaacaccaggtggtgtctgccacatggctactcaggtcctgcgaactctggtggctgctactacatcactacagggatgtcctgctggctctcagatctctatccaagacatgatggtgtccatgttggactccaaggcaaggacctggagcatgacattccagtggacctagggtccaggcccacctctgtggacccagtttccaggtctgccccagggccccagggccccaaggctccagtggactcagggtccaggaccactccagcaaaccctggtgctggaccatcccctgtagacccaagctcccggccagcccctgtggcttcaggctttagactcatcatgatagaccaaaacaccaagctaattccagtgccaggttggcccctgcgactcaggctcaagatctacctcagcagtaggtcagcctctttggactcaggctccaggtttgcccctgtggacacaaattttatacctgtccccacagaccgaggccatagccatgcccctgaagacccagttgacaggctaacctcagtggacccaacaaaggaaaaaaactggatggagaatgagtttgacaagttgacagaagtaggcttcagaaggtcggtaataacaaacttctctgagctaaaggagcatgttctaacccatcgcaaggaagctaaaaaccttgaaaaaaggttagatgaatggctaagtagaataacttgtgcagagaagagcttaaatgacctgatggagctgaaaaccacagtatga

SEQ ID NO: 6132 - DNA, 1935 bp, Homo sapiens
  SIMILAR (1603)..(1932): 531254mologous to Homo sapiens p40,accession number U93571,Smith-Waterman Score=285.
atgagccctgtgacactttgggtgagaacctccagcagaggtgaggaccggtgtggaatgtgcacccctggccgtgacacaggatttgcacccataagtggaatgtgtagtaaatatcgcagctgcacgattaatgaagatacaggtcttggactggccttcaccatgcccatgagtctggacacaaagcacatccccaactttggaaaggtgcacgggtacatcatgcgacatcataaaaacgaagatacaattccttggaggaggaacaccaaaaaggaggaagctagaggaacacagcccctggaggctgatgatcaaaatcctggctgggaagatgggaagccaggatccctagagaatgaaggaagacgcagccataggggcaatccagccccagacatgccccagcctcccaaggaagacctcttcatcttgccagatgagtataagtcttgcttacggcataagcgctctcttctgaggtcccatagaaatgaagaactgaacgtggagaccttggtggtggtcgacaaaaagatgatgcaaaaccatggccatgaaaatatcaccacctacgtgctcacgatactcaacatggaaagaattcttaaaaagacatcatttaccattatccatccatctgccatggagagatgtcccgtgctgaacttacagataagggactctctctggaatcattgcttcagtttagcaacgacagtccatagatttcaccccgtgggcagacatgctttgaagaaaatgtacaagcttccatcagcttacataaatgtcagcatcactaaatacacacaaagattcgcccttacatacatttcttgcgtcttccacagaaatgctgcttttgtggcagtcccaggcgaaggtcgctgctgtgcaggggttgatgtgccagctcccatgtccttgaggtcaccaggacctcactggccccaggagcatggggctctgtggatctcttgtacagtacgtgggatggcgagctgccttgggcagctctgccgagtttccatgagagtgagagcgaacattggaaaggttcaaaaaccccggctgagaattagcaatgggaaaggcctccacacacagtctgagctctctggctctgcatacctggagaaaggctggcgtggagctgctccaggactggactccaggaatgagaaagggacagagggggcccgggactcgggaacacccgggcgccagtcccagacgctccaaaggggcccaccgggaccggtgcctggaagcagtaagattgctccacaaaccctcactagacaaggctcaatgacagcttccaggaaactggtcctgcttctgcctgaattttgtgaaagaaccggagagcagagcggacaactctacccaccctccccactcctagttgaatgggtcatgcctgctgggacttccagcacagtggacccacttctgcctgaactctgcagacgttgggaaagacaggcactaagtctgtgcagactttaccgccagaggacttctgtttctatcaaggctctttgcgatcacacagaaactcgctcagtggccctttcaacctgccaaggcttggaatgcaactcctcaccagcaaggaaacaaaactggatggagaatgagtttgaagagttgacagaagtaggcttcagaaagtcagtaataacaaaattctccaagctaaaggagcatattctaacccatcgcaaggaagctaaaaaccttgaaaaaaggttagacgaatggctaactagaataaccagtgtagagaagagcttaaatgacctgatggagctgaaaaccacactacgagaacttcatgaagcatacacaagcttcaatagccgatttgatcaagtggaagaaagaatattagtgattgaacatcaaattaatgaaataaagtga

SEQ ID NO: 6133 - DNA, 1158 bp, Homo sapiens
  SIMILAR (1)..(540): 1001254mologous to Homo sapiens serine-threonine protein kinase NKIAMRE,accession number AF130372,Smith-Waterman Score=948.
atggagatgtatgaaacccttggaaaagtgggagagggaagttacggaacagtcatgaaatgtaaacataagaatactgggcagatagtggccattaagatattttatgagagaccagaacaatctgtcaacaaaattgcgatgagagaaataaagtttctaaagcaatttcatcacgaaaacctggtcaatctgattgaagtttttagacagaaaaagaaaattcatttggtatttgaatttattgaccacacagtattagatgagttacaacattattgtcatggactagagagtaagcgacttagaaaatacctcttccagatccttcgagcaattgactatcttcacagtaataatatcattcatcgagatataaaacctgagaatattttagtatcccagtcaggaattactaagctctgtgattttggttttgcacgaacactagcagctcctggggacatttatacggactatgtggccacacgctggtatagagctcccgaattagtattaaaagatacttcttatggaaagttggggctaagaagagggacacctttaaaggaacacaactcctcaccagcaagggaacaaaactggatggagaatgagtttgacaagttgacagaagtaggctctcagaaggtcggtaataacaaacttctctgagctaaaggagcatgttgtaacccattgccaggaagctaaaaaccttgaaaaaaggttagacgaatggctaactagaataaccagtatagagaagagcttaaatgacctgatggagctgaaaaccacagtacgaaaaacttcatgaagcatacacaagcttcaatagccgatttgatcaagcggaaaaaaagatatcagtgattgaagatcaaattaatgaaataaagcaagaagacaagatgagagaaaaaaaaatacaaactaccatcagagaatactacaaacacctctatgcaaatatactagaaaatctagaagaaatggataaattcctggacacatacactctcccaagactaaaccaggaagaagttgaatctctgaatagaccaataacaggatctgaaattgtggcaataatcaatagcttaccaaccaaaaagagtccaggaccagatggattcacagccaaattctacagag

SEQ ID NO: 6134 - DNA, 2199 bp, Homo sapiens
  SIMILAR (2103)..(2198): 841254mologous to Homo sapiens putative p150,accession number U93568,Smith-Waterman Score=130.
agttttggaggctggaaaggcaaatgttattttaccaaaaagttcaccaagtggaataactcatgtgattgccagtaatgcaagaattaaagctgagaaagaaaaagataactttaaggctccattttatccaattcagtatctaggggattttcttttagagaaagaaattcagaatgatgaagattcccaaaccaattctgtttggactgaacatagcaatgaagaaacaaacaaagatttcaggaaagatgcaggatttcttgaaatgaaaggtgccttaagagagaccatgtatagaacccagaaagaaatgaagaattctatttttgctgaatatgccaaagaatcaaaagccatggctattaagacagatgtggatgttgttgaaataaaaaataccttaaggaagcacatatatagagctcaggctgtcagatacaactgcattagaatagataaacaaccagtgtacaacgtagaggttaaaaatgctgaatttcccagaggtgtattaaatttaattgaaagcctcatagaaggacatttttttaaagaagcaattgaggaactttccactttgcaggcacattatatccctcctgtatgcgttcttcatgcccttctagagaacgttctacaggaacacaactcttcaccagcaaaggaacaaaactggatggagaatgagtttgaggagttgacagaagtaggcttcagaaggttggtaataacaaacttctccgaggtaaaggaagaaagtcgaacccaacccaaagaagctaaaaaccttgcaagaagagacacacataggctcaaaataaaaggatggaggaagatctatgaagaaaatggaaaacaaaaaaaggcaggggttccaatcctagtctctgataaaacagacttcaaaccaacaaagatcaaaagagacaaagaaggccattacacaatggtaaagggatcaattcaacaagaagagctaactatcctaaatatatatgcacccaatacaggagcacccaggttcataaagcaagtccttagagacctacaaagagacttagactcccacacaataataatggaagactttaacaccccactgtcaacattagacagatcaacaagacagaaagttaacaaggatatccaggaattgaactcagctctgcaacaagtggacctaatagacatctgcagaatgctccaccccaaatcaacagaatatacattcttctcagcaccacatcacacttattccaaaattgaccacagagttggaagtaaagcacttctcagcaaatgtaaaagaacagaaattataacaaactgtctctcagaccacagtgcaatcaaactagaactcaggattaagaaactcactgaaaaccgctcaactgcatataatctgaacaacctgctcctgaatgactatggggttcataacgaaatgaagtcagaaatcaagatgttctttgaaaccaacgagaacaaagacacaacataccagaatctctgggacacatttaaggcagtggaaatacaaactacccatccagagaatactacaaacacctctatacaaataaactagaaaatctaggagaaataaggattaattccttgacacatacaccctccccaagactaaacccaggaagaaattgaatctctgaatagaccaataacagggctctgaaattgaggcaataattaatagcttaccaaccaaaaaaagtccaggaccagatggattcacagccaaattctaccagaggtacaaggaggagcttgtacccattccttctgaaactattccaattaatagaaaaagagggaatcctccctaactcattttatgaggccagcatcatcctgataccaaagcctggcagagacacaacaacaacaaaaaaagaattttagaccaatatccctgatgaacattgatgcaaaaatcatgaataaaatactggctaaccaaatccagcagcacatcaaaaagcttatccaccatgatcaagtgggcttcatccctgggatgcaagtctggttcaacataggcaaatcaataaatgtaatccagcatataaacagaaccaaagaccaaaaaaaaccacaggattatctcaatagatgcagaaaaggccttctacaaaattcaacagcccttcattctaaaaactctcaataaattag

SEQ ID NO: 6135 - DNA, 485 bp, Homo sapiens
  SIMILAR (71)..(352): 961254mologous to Homo sapiens cap-binding protein 4EHP,accession number AF047695,Smith-Waterman Score=489.
atgacgccgtggcaccggcccttgatccccgtcgacccacgcgtccggtggcgacagcggcggcgagaggatgaacaacaagttcgacgctttgaaagatgatgacagtggggaccatgatcagaatgaagaaaacagcacacagaaagatggtgagaaggaaaaaacggaacgagacaagaatcagagcagtagcaagagaaaggctgttgtccctggaccggcagagcatcccctgcagtacaactacactttttggtactccaggagaacccccggccgtcccacgagctcacagagctatgaacagaatatcaaacagattggcacctttgcctctgtgagttcttggtgaattaatggagtgtgccttgatagttcgttcatgcctgtattgatatgatgtttatttactttcctagtaacctatttaagattctggttttcttaattgactgacctgagtctccggagtcagatttgtt

SEQ ID NO: 6136 - DNA, 747 bp, Homo sapiens
  SIMILAR (291)..(746): 511254mologous to Homo sapiens cap-binding protein 4EHP,accession number AF047695,Smith-Waterman Score=341.
ccagctttccccacacactccctctcccctctgagcctcagttttctcatctgcagagtggggacggtaacaccctttgtcgtagagtttggaggatgcaatgagtttgaaagatgatgacagtggggaccatgatcagaatgaagaaaacagcacacagaaagatggtgagaaggaaaaaacggaacgagacaagaatcagagcagtagcaagagaaaggctgttgtccctggaccggcagagcatcccctgcagtacaactacactttttggtactccaggagaacccccggccgtcccacgagctcacagagctatgaacagaatatcaaacagattggcacctttgcctcctgtggagcagttctggaggttttatagccacatggtacgtcctggggacctgacaggccacagtgacttccatctcttcaaagaaggaattaaacccatgtgggaaggatgatgcaaataaaaatgggtggcaagtggattattcggcttgcggaagggctttggctcccgttgcctgggagaatctcattttggccatgctgggggaacagtttcatggttggggaggagatctgtgggggctgtggtgtctgtcccgcttttcaggaagacattatttcaaatatggaataagactgccagtgaccaagcaaccacagcccgaatccgggacacactttcggcgagtgctttaacctacctgccaacaccattatggaatacaaaaactt

SEQ ID NO: 6137 - DNA, 240 bp, Homo sapiens
  SIMILAR (84)..(185): 451254mologous to Xenopus laevis fork head protein,accession number X74316,Smith-Waterman Score=69.
ctgagtttccttagcagactaacctcccagcatgccttattggctccatgcaccaggtgaaccaaactgtcaaaatgtgaaccccattttcatattctgctcttttgcttcagaaaacagcagataaaaatctgctggcagagctgtaccagtattccaacttcaacagctccaagccaaacaagcttccgaatggcgtggacttctgtgacatggtgggcaacgtggtccgggctgaga

SEQ ID NO: 6138 - DNA, 419 bp, Homo sapiens
  SIMILAR (283)..(414): 281254mologous to Ovis aries small proline-rich protein with paired repeat,accession number L77967,Smith-Waterman Score=40.
ggaagttttagatttcattcagcaaatagatgaagtctggcgtgaaatgagatggatcatggatgctctacagtatgcaagatacaaacaaccagtttctggcttgcccatcactaagctgatagacccctcagatgagcagagcctaaagaagatcaattctacatcatcatcacatatacactgtcttccatccccacccccatccccagagatgcacagaagaaagacagtgagtgattcacagccctgctctgatgaagaagcctgctcagaagtcttcctccccaccaacagtgactacgactccagcgatgccctgagccccagagacctggacctggtctacctatcatctcacgacattgcgcagcagacccttagcggcctaagcggcagcgcccccgacgtcctgcaag

SEQ ID NO: 6139 - DNA, 717 bp, Homo sapiens
  SIMILAR (1)..(189): 381254mologous to Caenorhabditis elegans weak similarity to 50K type I epidermal keratin (PIR:C26135),accession number U39652,Smith-Waterman Score=123.
gatattctatcctatcacaaaaggagtcatcagcgtctctttcctggattatatctgggttacctaaagctctgtagctctgtggatcaaatcaaagttcttgttacccaaaagttgcccaacattctctgccacgtgaagatccgtgaaaacaataatatttctagactaactgtaacctggttagaatgtgggctttttcttcgattaactgttgtattttttaatgagcaaggtagtccttcagaatatggaggtggacggcagctaggatttgaaaccagttcaaaatgtgtcagcatttcaggaggtgacagcagggcattaaacgaagcacaggccccttctaagtgcggggtcaaatgcactgttcctatgcctgtgaagcaggctctagctaagactatatttttcctaacctcagtttctggcttcgcagattcacagccctgctctgatgaagaagcctgctcagaagtcttcctccccaccaacagtgactacgactccagcgatgccctgagccccagagacctggacctggtctacctatcatctcacgacattgcgcagcagacccttaacgggcctaagcgggagcgcccccgacgtcctgcaagtgcacgacgtgaaaacccctctgggggccggccaagaatccccaaggcgagggcccaaatcccgatcactcatgtgcccaggttctccttaacctga

SEQ ID NO: 6140 - DNA, 1317 bp, Homo sapiens
  SIMILAR (879)..(589): 791254mologous to synthetic construct Pax3-forkhead fusion protein,accession number AF178854,Smith-Waterman Score=407.
ttattctgtcaagcttaggctgttttcttcttcttcttcttcttcttcttcttcttcttcttcttcttcttcttcttcttcttcttcttcttcttcttcctcctcctcctcctccttcttcttcttctctttcttcctcttcttcttttttaagctaaaggaactacgtttggtaatatagccattgaatccagaaaactgagaatcctgcccacttttctctccagttaaccttgatatgccataaaccttcaaggataagagatggaaagtgaactgggccaggtctacttcacgacagcagttactggaaagtgccagaactaaatcatgggcagagagggaaggaggcactaggtggagggcatggtaaaacagaacctgatgtctcagattccccaagatcttaatcagagtcactctgtgctgttttactgtctgcattcctacctttctccagccacttcccattactttatctcccacttgaaaaggtttcgttttttcataatctgaagcagttatcttgagcatatggtagtacttcctcggtactccatattccaaggcagcattcctttttcctcctgcatgtgtaggaaggtgctggtaatgtactctctgaggtgagaggccattgccaatggtggggttcatggggttggagggccccgacggaggcacaaagctgtctgtatagctggaaaatccatgcctggtgctggggaggcagtaggcagagctgctgtctgggttggaaggaatcgtgctttggtgtacagtgcttggaggaagcggttgaggtctgtgaacggtgctgctgggatctgacacagctctcttctctgctgatttttgtgtgtgtgtgtgtgatactttcagaataagattatcctggaccccatgacgttcagcgaggccaggttccggccgtccctggaggagaggctggagagcatcatcagcggcgcagcgctgatggccgactcctcctgcacgcgagacgaccggcgcgagaggatcgtggcggagtgcaacgccgtgcggcaggcgctccaggacctgctcagcgagtacatgaataatgtaagtcttgggatctccattctcatgtcttggtggattctgttctgcaatcgtgttgctctggtgattagtgatgataggagtggtggtgcttctagcagcagcagcagcagcagcagcctcaatgcaaagccatagcaataatgcagcttcccctggcccataggtaccactgggcctacacaatgggcactgtgcctcagaaatccaggaccatattcgggacaccat

SEQ ID NO: 6141 - DNA, 420 bp, Homo sapiens
  SIMILAR (297)..(395): 421254mologous to Homo sapiens Human secreted protein, SEQ ID NO: 7157,accession number G03076,Smith-Waterman Score=63.
ttaactagggggcagtgcccaactgtccccaagccagaagtaagaggtatgcatcttcacgacctcaatgacaaacttgatcatataaaataggcagcattcattgacctggttcaggctacgccggaggtggactaccaccataatagtaactgaaggaccttgcatggaaatattggcttcattctggtgaacaataatttcttccaagtaagtccagtggtaaaagaatttcctgccaaattgttctgcaaaggagcttttcttcttcttcttcttcttcttcttcttcttcttattattattattattattattatactttaagtttagatctgatggttttataagcatctggcatttccgctgcttgcattcattctctctcccactgccctgtgaagaggtgtcttccaccat

SEQ ID NO: 6142 - DNA, 582 bp, Homo sapiens
  SIMILAR (552)..(181): 511254mologous to Homo sapiens phosphoinositol 3-phosphate- binding protein-2,accession number AF302150,Smith-Waterman Score= 279.
tcatttatcttcactgagtaggaactgattcttcccagatatcatatcccctgctgacctggaatgtaagctccaccaagacagggatctttgtcgtttttgttcaccctgaatgtcctgctgtactccaagtgcctcaagtcctcctcccaggcaggatccattgatggcagccacaataggctttgtggacttttcaagtttctcaactattctctgtgcttcttgtgatagctgtgttacttctgccattgtttgatttcctctagaaacctcaggagttgattcgtaagaaataacagtttcttcctgttcgtcaacactgttctttgtattttcttcaggatgctcttctggtttatgatttgcggtctgtgtttcatcttgagggctggttaggttcttgtttcttttggtgttttgttgttgttgttgtttatattttttacttctttctcttttctcttctttttttttcttcttttcttcttcttcttcttcttcttcttcttcttcttcttcttcttcttcttcttcttcttcttctttcttctcctcctcctcctccttcttctgtgccat

SEQ ID NO: 6143 - DNA, 1716 bp, Homo sapiens
  SIMILAR (888)..(631): 761254mologous to Homo sapiens Human secreted protein, SEQ ID NO: 4969,accession number G00888,Smith-Waterman Score=354.
ttttttgcggttctgcaaactttttttaattttaattttatttttttacaatgtaccatgaacatcttttccatgcacatgggtgaaaatcctctactaaaatatagagcgctgtagttgggtcaaaaggctgctggtaacgagattgacatctaaagcaaaaatatcagcttaaggttaaagcattggggcctggcaaataccctaccagggaaaagcaggactggcaatattcccatcagagaaatcagaattaaaggccaaaggcattaaacctatgggacattcttataagtctttctggcccctacctccacccctcactcccctgacaccccgttgtccccttggggcgaaatggatcctgtacatctctttgcatcccaatgaaaaccacccattttctgttttttcccttagctccctcttgaacccttgaaaacatctcccacattctctcatcatctcctcactgctcagatgcctttcctgtaagtcctcctgagagtccttgggggaaaatcgtccggtccccctggtccggtttttcttttttgcctttccggggccacataatcttcaagccgggcgcttttcggcggcccgcggctggccctctggctttgcctgggaggctggcttgccctcgccttgtggcttgccctcaccttcggacttgccctgcttttcctggcttcccttatcttccagttgtccctcatcacctggctctccctcagcctttcgctttccctcgcattctgtcttcccctccgcgtctggcttttcttcctcgtctgactttccttcatcatcaggctctacttcatcttctggctttccctcgttttccaggtttccttcatttttattgtagggtttttccatgtcgagatttctctttttcctgtctctcaacccttgtgggcccctgtccatgcagccccctgctttcacggacctgcggggattctggacaggttgctcttcctttgcaggcctcccagagcgctgggaacaacagacgcgcagactgattctctcttcgttcacttcagactcattattgagctgctctaacaagtttttcattacagttgttttccgttcaatggagaaaaggtagtcttttccacaaatgatactggaaatcaactggacttgctgataggcactctccttggaatcttccctcaactgaagttccctaattttcctccttagctctctcatctcctccatgaaccgttccatatcatctccatctccatctatcatatcaatgttatcgacaagcctattgggcacatcctctccaaaacccggggcaggtggagcccaaacccctttaacatttcctccaggctcctggtattcaccacctcctaaagcgggggcttcattctgcactggggccttctccacaactttgttttccttggggacattttccatgttgagtttttttcctgttttttttttttttttcttcatattcattttcttcttcttcttcttcttcttcttcttcttcttcttcttcttcttcttcttcttattattattattattattattatactttaagtttggtgcaaggggtgggctcccaagggcttgtgcaacccttcccctggctttgcagggtgtaacctccatggctgttctcatggtctgaagttgagtgcctatggcttttctaggctcaacgggcat

SEQ ID NO: 6144 - DNA, 369 bp, Homo sapiens; identical to SEQ ID NO: 3742
  SIMILAR (368)..(6): 911254mologous to Homo sapiens p40,accession number U93569,Smith-Waterman Score=577.

SEQ ID NO: 6145 - DNA, 394 bp, Homo sapiens
  SIMILAR (76)..(372): 871254mologous to Homo sapiens p40,accession number U93569,Smith-Waterman Score=438.
acaaacatactccttaagaagagcaaccccaagacacataattgttggattcaccaaggttgaaatgaaggaaaaagtgttaagggcagccataagcccatcagactaacagtggatctctcggcagaaaccctacaagccagaaaagaggggggaccaatattcaacattcttaaagaaaagaattttcaacccagaatttcatatccagccaaactaagcttcataagtgaaggagaaataaaatcctttacagacaagcaaatgctgaaagattttgtcaccactaggcctgccttacaagagctcctgaaggaagcactaaacatggaaagaaacaaccagtaccagccactgcaaaaacatgccaaatggtagagaccatcaatgctat

SEQ ID NO: 6146 - DNA, 381 bp, Homo sapiens
  SIMILAR (1)..(369): 851254mologous to Homo sapiens p40,accession number U93569,Smith-Waterman Score=526.
  misc_feature (1)...(381): n = a,t,c or g
caaagatactcttcgagaagagcaaccccaagacacataattgtcagattcaccaaggttgaaaggaaggaaanaatgttaagggcagccagagagaaaggtcgggttacccacaaagggaagcccatcagactaacagtggatctcttggcagaaactctacaagccagaagagagtgggggccaatattcaacattcttaatgaaaagaattttcaacccagaatttcatatccagccaaactaagcttcataagtgaaggagaaataaaatcctcaaatgctgagagatttgtcaccaccaggcctaccttaagagacctcctgaaggaagcactaaacatggaaaggaacaaccggtacctgcccgggcggccgctc

SEQ ID NO: 6147 - DNA, 762 bp, Homo sapiens
  SIMILAR (1)..(759): 681254mologous to Homo sapiens p40,accession number U93569,Smith-Waterman Score=831.
atggacaaacttctccgagctaaaggaggaagttcgagccatcgcaaagaagttaaaaaccttgaaaaaagattagacgaatggctaactagaattaccaatgtagagaaggccttaaatgacctgatggagctgaaaaccatggcaggagaactatgtgacgaatgcacaagcttcagtagccaatttggtcagctggaagaaagggtatcagtgattgaagatcaaatgaatgaaatgaatgacgaggagaatggaactaagttggaaaacactctgcaggatattatccaggagaacttccccaacctagcaaggcaggccaacattcaaattcaggaaatacagagaatgccacaaagatactcctcgagaagagcaactccaagacacataattgtcagattcaccaaagttgaaatgaaggaaaaaatgttaagggcagccagagaaaaaggttgggttacccacaaagggaagccaatcagactaacagctgatctctcagcagaaattctacaagccagaagagagtgggggccaatattcaacattcttaaagaaaagaattttcaatccagaatttcatatccagccaaactaagcttcataagtgaaggagaaatcaaatcctttacagacaagcaaatgctgagagattttgtcaccaccaggcctgccctacaagagctcctgaaggaagcactaaacatggaaaggaacaaccggtaccagccactgcaaaaacatgccaaattgtaa

SEQ ID NO: 6148 - DNA, 612 bp, Homo sapiens
  SIMILAR (61)..(609): 911254mologous to Homo sapiens p40,accession number U93567,Smith-Waterman Score=858.
atggccgaatacgaacagctccagtctacagctgccagtgtgagcgacgcagaagacggaccaaatctacatctgattggtgtacccgaaagtgatggggagaatggaaccaagttggaaaacactctgcaggatattatccaggagaacttccccagtctagcaaggcaggccaacattcagattcaggaaatacagagaatgccacaaagatactcctcgagaagagcaactccaagacacataattgtcagattcaccgaagttgaaatgaaggaaaaaatgttaagggcagccagagagaaaggtcgggttacccacaaagggaagcccatcagactaacagctgatctattggcagaaactctacaagccagaagtgagtgggggccaatattcaacattcttaaagaaaagaattttcaacccagaatttcatatccagccaaactaagcttcataagagaaggagaaataaaatactttacagacaagcaaatgctgagagattttgtcaccaacaggccgcccctaaaacagctcctgaaggaagcactaaacatggaaaggaacaaccggtaccagccactgcaaaaacatgccaaattgtga

SEQ ID NO: 6149 - DNA, 1180 bp, Homo sapiens
  SIMILAR (479)..(1177): 931254mologous to Homo sapiens p40,accession number U93567,Smith-Waterman Score=1110.
ggcggtctatgaatgtcatcgaaatgtcgataacttatccctagaagaaagaaatcctctaggatatgctgaaccttctgaaaatgattttcttacctctatttacaagtatctcaattttaaaatcacacttctcaaagattcatgtggactcctgcttctgctggtacagtccatcactggcaaatctgtggcaagacgttcagttccagagcctccatgtcaaggccagtctactggcttcaagccaaggctccacctctgggggcagggcacagacgaacaaaaagacagcagtaacctctgcagacttaaatgtccctgtctgacagctttgaagagagtagtgtttctcccagcacgcagctggagatctgagaacgggcagactgcctcctcaagtgggtccctgacccccgagcagcctaaatgggaagcaccccccagtagtgcacgactgacacctcacatggccggaagcctcaagagccaatgcgatcaactggaagaatgggtatcagcgatggaagacgaaatgaatgaaatgaagcgagaagggaagtttagagaaataagaataaaaagaaacggacaaagcctccaagaaatatgggactatgtgaaaagaccaaatctacatctgattggtgtacctgaaagtgacggggagaatggaaccaagttggaaaacactctgcaggatattatccaggagaactttcccaatctggcaaggcaggccaacactcagattcaggaaatacagagaacaccacaaagatactcctcgagaagagcaactccaagacacgtaattatcagattcaccaaagttgaaatgaaggaaaaaatgttaagggcagccagagagaaaggtcgggttacccacaaagggaagcccatcagactaacagcggatctctcggcagaaactctacaagccagaagagagtggggatcaatattcaacatccttaaagaaaagaattttcaacccagaatctcatatccagccaaactaagcttcataagtgaaggagaaataaaatactttacagacaagcaaatgctgagagattttgtcaccaccaggcctgccctaaaagagctcctgaaggaagcactaaacatggaaaggaacaaacgataccagccactgcaaaaacatgccaaaatgtaa

SEQ ID NO: 6150 - DNA, 459 bp, Homo sapiens
  SIMILAR (154)..(435): 441254mologous to Homo sapiens p40,accession number U93571,Smith-Waterman Score=183.
atggatgtgatggaaatgtgcaacttccgtgttgcaatcatggttgtgaatgttaacactctgaagagagcagcagatctcccagcacagcacttgagctctgctaagggacagactgcctcctcaggtgggtcccggacccctgtgcctcctgacagggagacatctcccagcaggggtcaacagacacctcatacaggagagctccagctggcatctgacagggtcacaagggatcaaaactggatagagaatgagtttgacaaattgacagaagtaggcttcagaaggtgggtaataacaaattcctctgagctaaaggagcatgttctaacccaatgcaaggaagttaagaacattgataaaaagttacaggaactgctgactagaataaccagtttagagaagaacatatgtgacctggtggagctgaaaaaacacagcacaagaacttcatga

SEQ ID NO: 6151 - DNA, 1014 bp, Homo sapiens
  SIMILAR (558)..(4): 941254mologous to Homo sapiens p40,accession number U93564,Smith-Waterman Score=887.
ttacattttggcatgattttgcagtggctggtaccggttgttcctttccatgtttagcgcgtccttcaggagctcttttagggcaggcctggtggtgacaaaatctctcagcatttgcttgtctgtaaagtattttatttctccttcgcttatgaagcttagtttggctggatatgaaattctgggttgaaaattcttttctttaaaaatgttgaatattggcctccactctcttctggcttgtagggtttctgctgagagatctgctgttagtctgatgggcttccctttgtgggtaacccgacctttctctctggctgcccttaacattttttccttcatttcaactttggtgaatctgacaattatgtgtcttggagttgctcttctcgaggagtatcttcgtggcgttctctgtatttcctgaatctgaacgttggcccgcctttctagattggggaagttctcctggataatatcctgcagagtgttttccaacttggttccattctccccatcactttcaggtacaccaatgagacgtagatttggttccttgaaggccatgtggactataaggtctaacaccctgttgatgtagccaaattcattgtcataccaggaaatgaggttgacaaagtaagtggtaattgagggcatttcaccagcattgaagagaggaagagcaggtgtcatggaggattccacagcataatcaatgccagcatcaacccatttgattttggtgggatcttgctcctggaagatggtgatagtattgccattggtgacacactttctgttcacagccttgacagtgccatggaacttgccatgggtggaattatactggaacatgtagactatgtagttgagatcaatgaaggagtcattgatggcgacaatatttactttgccagagttaaaagctggtgctgcatgagaagctgcagtaactgcagtcaactgaggacctatgacatggtctactggggggttgattggaggttgcat

SEQ ID NO: 6152 - DNA, 5971 bp, Homo sapiens
  SIMILAR (5360)..(5719): 431254mologous to Homo sapiens p40,accession number U93564,Smith-Waterman Score=217.
  misc_feature (1)...(5971): n = a,t,c or g
ttacattttggcatgattttgcagtggctggtaccggttgttcctttccatgtttagcacttccttcaggagctcttttagggcaggcctggtggtgacaaaatctctgagcatttgcttgtctgtaaagtattttatttctccttcacttatgaagtttagtttggctggatatgaaattctgggttgaaaattattttctttaagaatgttgaatattggcccccactctcttctagcttgtagggtttctgccgagagatcggctgttagtctgatgggcttccctttgagggtaacctgacctttctctctggctgcccttaacattttttccttcatttcaactttggtgaatctgacaattatgtgtcttggagttgctcttctcgaggagtatctttgtggcgttctctgtatttcctgaatctgaatgttggcctgccttgctagattggggaagttctcctggataatatcctgcagagtgttttccaacttggttccattctccccatcactttcaggtacaccaatcagacgtagatttggtcttttcacatagtcccatatttcttggaggttttgctgatttctttttattcttttttctctaaacttcccttctcgcttcatttcattcatttcatcttccatcgctgataccctttcttccagttgatcacgtgggctcctgaggcttctgcattcttcacgtagttctcgagccttggttttcagctctatcagctcctttaagcacttctctgtattcgttattctagttatactttcttctaaatttttttcaaagttttcaacttctttgcctttggtttgcatgtcttcccgtagctcagagtaatttgatcgtctgaagccttcttctctcagcttgtcaaagtcattctccatccagctttgttccgttgctggtgaggagctgcactcttgaattaacaggttttgaattataaatataatctcctctgggctaaaaatataatccattatttgcattagcaggaggatcaaaaagtacagggaaacatccaccagtgcttggccaaaccagtatgcagaagggtagaggcctgaaatccgtagctgggaatgagctttttttttgtagtcaccaatgctgctcattgcaatgtatggagtgaaagaggctgccatcggtatccagaagaaggtgttacttcggtacccatactcataatccatatgctcttcaaaaaatgtgcttctgtcagtctgaatgtgttctgacgaattaaaaattccaagtagtccattgctaatgacatccaggaggacaggaaagcaattcagccgttttgtattacatgctattgaaaatctgtgatccttttcatcacctgacacaatgatagcaccattgtaagatgggtcatctgtgccatttctagttccaaaggcatccacttctatagctatgttctgtcgcctcagtgaatgtaaaaagttatcaatggttgaccctgtcttattgatgaccagtaaatgggtcagaggatcctgtggttgttgtcctggtgagaggaagtatgtatttggagacagttcccacgggtaacttttctgatatgactcgtagaatagatgttccaaaagttgagggataaagctaataccaaaaagcaataatatagtccacaggctttttctttctttctttaactttaggaagcgaacttttgctattgcacagacctgctgcctccagagcgccacgccactgattgttttccttgtttcgtggaaggaagacaaaacttgttccagctcaacaaggcttcctatatcttttgccccatcagtttgtaattgtccccaaattccaatatctgattcatcaatagttgattttccttctaatttcagaaacacctcattcaaagttgttatggaaacaccataatcctcaatggccttggttagaacatctatcaagatccctgtaaagttctggaaatttgtttggtcctttccaaaaggcaaaattatatacaaggtttttcttcactttggggctggtcaaattttgggcatcagagatggtgcctgcttaaaccagtgatgttatactcttctggatcacacctttcattcaggatgcaaaacttaaatggtaggcctatgccccatttcttcttaaggaacagagaagagcctgcacacttcagcttcccattggatatgaacaccttcctgtccgccagaatgtcagcctcatctataaactgggtgctgaagagaattactctgtctgatttcccctctttcaggagattccatattcggtgccttgaaagaggatccaatccagcagtcggttcatccaatagcaaaacttgaggatctcctaaaatggcaatcccaaaagttagtttcctattttgtccaccacttaagttttgagcaaggatgtcttgaatattttccatttctaattcctgtacaactcgttgtacctctttctccacttcatgtggcaaaatcccttttattttagcaaacagcctgaggttttctttcacagtgagaaatccaaattgcacattggattgtggacaaaatccagtgaacttgctgatattttctatatcagccattcttgaaagtgtgtgattatagacagtgactgaacctttcaaagcttctactctctcacacttccctgcatattcttttttaagatttttgattctgatggcttctttcccacagaattctggagacactggttcaaaacagtcattaggtgtaggatcagaatctgtttcattctcaaggaccacatgattagcccttccgtgttgaaaccaaaaacaggatttcaggaaaaacaagggagaacatcgatgtccatattcagcgggcaaaattttgtcaaaatataatgtcaataccaaatacagaagggtgtcaaaaaccaacatgaaaagagtagctattatgaggtatggattttgtgaagaatccaagtgggcattagaattcacatcatagtccaaatgtataagctgggccatcccaacagtgaaggcaaaggggctaagaagacacaaagtccattccaaaaatgcaggaagacgtgtatacaatgctgggaatcccaggatcccccaaaagacaataaggagaaacacaaccaagcccgtaaggaaaggtttctttatcaacacactcatcaggaaagctaaagttatcaaagacaggccatagaggagaaagagggtgaagaccatcacaaaaccagtcaggacgacaatttgtgcagattttacaataagagccattaaagtggccatgataaggatgaagccagcatacatcaaaccccaggaaagccagaatgctgactctcggagtcccatcattgtcatcaatgacgtaatgtattgtctttcttgtgtaacattgactgatacatagtatataaatgtagaaaaagaaataatgcaaaagaaaatgaaaaaatcagttgcaactcctccttgggcaacaaaaggtaatatcttcatatgtacaccagtaactgacatcagctgttccatcactgaatgatttgttgcgatttctatgatagcagcattaatggcagcttgaaaagctacaaagcctttctcccagaactctgaaccttcacacttcattttttcattcactgcttgacagtgagctgaatggtctctgtgctctttcatcatggggattctatgtccccaagaaaacttcaaatggtaggagaaggtatcagtaaagatgactctcactgcgtctattgaatagttcaaatccaattcatccatgcttttttcatcaggccaccccatgattgttcttcgccacattggctgctgagttcttttggcataaccgatcaggtcttgatggctagtctctaagctatcaacaaggtctgtcttttcattctccattttttgagacagttcttgcagagaagagcccatgtttgctgacccacgctcatgcgtctcttgctcattttgacctgtttccttcacagagcccagcaatgtcagatccactagactgaaattctcactgccagcacagcagtctgaagtcgacctggggtgctcgagcttggtgacgggaggggtgtctgccattactgaggcttgaataggtggttttcctctcacagtggnnnnnnnnnnnnnnnnnnnnnnnnnnnnnnnnnnnnnnnnnnnnnnactgcaaagtcactgtagccagactgcctctctatattactcctctctgggcagggcatcactgaaagaaaggtagcagcctcagtcagggacttatagataaaactcccatctccctggggcagagcacctgggggaatggggcggctgtgggtgcagcttcagcgcacttaaacattcctgtcttctggctctgaagagagcagcagatctcccagaaaattgcttgagctctactaagggacagactgactccttaagtgggtccctgacccccgtgcctcctgactgggaggcacctcccagcaggggtaaacagacacctcatacaggagagcaccggctggcatctggtgagtgcccctctgggatgaagcttccagaggaaggagcaggcagcaatctttgctgttctgcagcctccactggtgttacccaggcaaacagagtctggattggacctccagcaaactccagcagacctgcagcagaggggcccgttagaaggaacactaacaaacagaaagcaagaacatcaacatcaacaaaaaggaggcccatgcaaaaaccccatccaaaggaccacaactcttcaccaggaagtgaacaaaactggatggagaatgagtttgacaaattgacagaagtaggcttcagaaggtgggtaataacaaacagctctgagctaaaggagcatgtgctaacccaatgcaaggaagctaagaaccttaataaaaggttacaggaactgctaactggaataaccagtttagagaagaacataaatgacctgatggagctgaaaaacacagcacaagaacttcatgaagcatacacaagtatcaatacccaaatcgatcaagcagaagaaaagatatcagagattgaagatcaactcaatgaaataaaaccaaatctacgtctgattggtgtacctgaaagtgatggggagaatggaaccaagttggaaaacactctgcaggatattatccaggagaacttctccaacctagcaaagcaggccaacattcaaattcaggaaatacagagaacaccacaaagatactcctcgagaagaacaaccccaagacacataattatcagattcaccaaggttggaatgaagggaaaaaatattaagggcagcccagagagaaaggtcggggttacccacaaagggaagcccatcagactaacaacagctgatctctcagcagaaacttctacaagcgagaaaagaatgggggccaacattcaacattcttaaagaaaagaatttttcaacccagaatttcatatccagccaaactaagcttcttcataagtgaaggagaaataaaatcctttacagacaagcaaatgctgagagatttttgtcaccaccaggcctgccttaacaagagctcctgaaggaagcactaaacatggaaaggaaaaaccagtaccagccactgcaaaaacataccaaattgtaaagaccatcgacactatgaagaaactgcatcaacttaacgagcaaaataaacagctaacatcataatgacaggatcaaattcacacataacaatattaaccttaaatgtaaataggctaaatgctcgaattaaaagacacagactggaaaattgcataaagagtcaagacccatcagtgtgctgtatttaggagacccatctcatgtgcagagacacatataggctcaaaataaagggatggagcaatat

SEQ ID NO: 6153 - DNA, 2468 bp, Homo sapiens
  SIMILAR (1)..(792): 771254mologous to Homo sapiens putative p150,accession number U93570,Smith-Waterman Score=1031.
atgggagactttaacaccccactgtcaacattagacagatcaacgacacagaaagtcaacaaggatacccaggaattgaactcagctctgcaacaagcagacctaatagacatctacaaaactctccaccccaaatcaacagaatatacattcttctcagcacctcatcacacttattctaaaattgaccacataattggaagtaaagcactcctcagcaaatgtaaaagaacagaaatcacaacaaactatctctcagatcaccgtgcaatcgaattagaaatcaggattaagaaacttactcaaaaccacacaactacatggaaactgaacaacctgctccggaatgactactgggtaaataatgaaatgaaggcagaaataaagatgttctttgaaaccaacgagaacaaagacacaacgtaccagaatctctgggacacatttaaagcagtgtgtagagggaaatgtacagcactaaatgcccacaagagaaagcaggaaagatctaaaatcaacaccctaacatcacaattaaaagaactagagaagcaagaggaaacaaattcaaaagctagcagaaggcaagaaataactaagatcagagcagaactgaaggagataaagacacaaaaaacccttcaaaaaatcagtgaatccgggaggaggagccaagatggccgaataggaacagctccggtctacagctcccagcgtgagcgacgcagaagacaggtgatttctgcatttccatctgagggcacagacaaacaaaaagacagcagtaacctctgcagacttacgtgtccctgtctgacagctttgaagagagcagtggttctcccagcacgcagctggagatctgagaacgggcagactgcctcctcaaaaggaaaactaacaaccaggaaaggacatctacaccgaaaacccttctgtacattcaccatcattcaaagacccaaaagtaaataaaacccaccaaagatggggaaaaaaaacagaacagaaaaactgggatattctaaagaagcagagcgcctctccttcatccaaagggaatccggttccttcacccagctaccagaacccacgcttgattggagattgatttttgacgcgctgagagaagaaggcttcagccgatcaaaattactctgagcctacggggggacattcatacccaaagggcaacgatgttgaaaactttggaaaaaaattttagcaagaatgtataactagaataaccaataccagagaagtgcttaaaggagcagctgatggagcttgaaagccaaggcctcgagaaactacgtgaaagaatgcagaacgcctcaggatgccgatgcgatcaacttggaagaaagggtatcagcaatggaagatgaaatgaatgaaatgaagcgagaagggaagtttagagaaaaaaagaataaaaagaaatgagcaaagccttgaaggaattatgggactatgtgaaaagaccaaatctatgtctgattggtgtacctgaaagtgacggggagaatggaaccaagttggaaaacactctgcaggatattatccaggagaacttccaccaatactagcaaggcaggccaacattcaaattcggggaaattacagagaacgcccacaaaggttgcctcctcgagaacagcaactccaagatacacaattgtcagattcacccaaagttgaaatgaaggggaaaaaattgttaaggggcagccagagagaaagggtcggggttacccccacaaaaggggaaacccccatcaggacttaccagcagatcctcccggaagaaactcctacaagccagaagacagagtgggggccaatattcaacattcttaaagaaaagaattttcaacccagaatttcatatccagccaaacctaagcttcataagtgaaggagaaattaaaatactttacagacaagcaaatgcttgagagatttttgtcaccacccaggccctgccctaaaaagatctcctgaaggaagaagcactaaacattggaaagggacaacccggtaccagccacttgcaaaaacattgccaaattgtaaagaccatcaagacttaggacgaaactgcattcaacttaacgagcagcataatcacctgcttaacatcataatgacaggattcaaattcacacataacaatattaaccttaaatgtaaatgggctaaatgctccaattaaaagacacagactgggcaaattggataaacagtcaagacccatcagtgtgctgtattcaggaaacccatctcatgtgcagagacacacataggctcaaaataaagggagagaggaagatctaccaaggaaatggaaaacaaaaaaaggcaggggttgcaatcctagtctctgataaaacagactttaaaccaacaaagatcaaaagagacaaggccattacataatggtaaagggatcaattcaacaagaagag

SEQ ID NO: 6154 - DNA, 603 bp, Homo sapiens
  SIMILAR (100)..(579): 241254mologous to Mus musculus HA receptor for hyaluronic acid,accession number X64550,Smith-Waterman Score=128.
tttcgtgcggacgtggcgggcccctcccgccccagtgccgtggcgttctggagccgggacttttctgatgaagaacaatcagtagtatacgttccaggaatttctgctgaaggaaatgtcagatcaagacacaagctgatgagtccaaaagctgatgttaaacttaagacttccagggtgactgatgcttcaatctccatggagtccttaaaaggcacaggagattcagtagatgaacagaattcctgcaggggagaaataaagagtgcatcattgaaggatttatgtcttgaagacaaaagacgcattgcaaacttaattaaagaactggccagagtaagtgaggaaaaggaagtgacagaggaaagactgaaagctgagcaggagtcatttgagaagaagatcaggcagttggaagaacagaatgaactgatcatcaaagaaagggaagctcttcagctacagtatagagaatgccaagaacttctaagcctgtatcagaaatatttatcagaagaacaagagaagctcaccatgtctctctcagaacttggtgctgctagaatgcaggaacagcagctatataacaatccatacatctga

SEQ ID NO: 6155 - DNA, 424 bp, Homo sapiens
  SIMILAR (51)..(293): 961254mologous to Mus musculus histone acetylase complex subunit MRG15-1,accession number AF319620,Smith-Waterman Score=427.
tttcgtgtcgggggtggtggaagaaggaggattcgtttaatcacttataaatggcgccgaagcaggacccgaagcctaaattccaggagggtgagcgagtgctgtgctttcatgggcctcttctttatgaagcaaagcgtgtaaaggttgccataaaggacaaacaagagaaatacttcatacattacagtggttggaataaaaattgggatgaatgggttccggagagcaaagtactcaaatacgtggacaccaatttgcagaaacagcgagaacttcaaaaagccaatcagtaagtttgttttgtgaactgaatattaaggagaaatgcctgtagattaattctggacatggaatgaacaatggagatcatgttggctgccctgcctatataatgatacctcggacctttcagctggtgtgg

SEQ ID NO: 6156 - DNA, 3829 bp, Homo sapiens
  SIMILAR (1820)..(3826): 961254mologous to Homo sapiens Peptide which modulates GDP exchange in the p21-GDP complex,accession number R43578,Smith- Waterman Score=3281.
atgcagaaagccatccgacttaatgatggccacgtcgcgcccctgggactgctggcgcgcaaggacggcacgcgcaaaggctacctgagcaagcggagttcggacaacacaaaatggcaaaccaagtggttcgcgctgctgcagaacctgctcttctacttcgagagcgactcgagctcgcggccctcggggctttacctgctggagggctgcgtctgcgaccgcgcgccctcccccaagccggcgctgtcggccaaggagccgctggagaaacagcattacttcacggtgaacttcagccatgagaaccagaaagccttggagctgaggacagaggacgcaaaagattgtgacgaatgggtggcagccattgcacatgccagctacaggaccctcgccacagagcatgaggcattaatgcagaaatacctgcacctgctgcagatcgtggagacagagaagaccgtggccaagcagcttcggcagcagatcgaggatggggagatcgagatcgagcggctgaaggcagagatcacatccctgctcaaggacaatgagcgcatccagtccacccagactgtcgcccccaacgatgaagacagcgacatcaagaaaattaagaaggtgcagagcttcctgcggggctggctgtgccggcggaagtggaagaccatcatccaggactacatccggtcaccccatgctgacagcatgcgcaagaggaaccaggtggtgttcagcatgctggaggctgaggctgagtacgtgcagcagctgcacatccttgtcaacaatttcctgcgcccgctgcggatggccgccagctccaagaagcctcccatcacacacgacgacgtcagcagcatcttcctgaacagcgaaaccatcatgtttttacatcagatcttttaccaaggcctgaaggcccgcatctccagctggcccacgctggtcctggctgacctacttgacatcctgctgcccatgctcaacatctaccaagagttcgtccgcaaccaccagtacagcctgcagatcctggcccactgcaagcagaaccgtgacttcgacaagctgctgaagcactacgaggccaagcctgactgcgaggagaggacgttggagaccttcctcacctaccccatgttccagatccccaggtacatcctgaccctccatgacgtcctggcccacacgcctcatgagcacgttgagcgcaacatactggactatatccaaggacatactggaggagctgtgcacaataatgcacgacgaagtgagtgaaaaagagaacatccggaaaaacctggccatcgagcgcatgatcatcgaaggctgtgagatcctcctggacaccagccagacctttgtgagacaaggttccctcattcaggtgcccatgtctgaaaagggcaagatcaccagggggcgcctggggtctctctccctaaagaaagagggcgagcgacagtgcttcctgttttctaagcatctgattatctgtaccagaggctctggagggaagcttcacttgaccaagaatggagtcatatccctcattgactgcactttattggaggagccagaaagcacggaggaggaagccaaaggatccggccaagacatatatcacttggattttaaaatcggggtggagccaaaggattccccgccctttacagtcatcctagtggcctctgccagacaggagaaggcagcgtggaccagtgacatcagccagtgtgtggataacatccgatgcaatgggctcatgatgaacgcatttgaagaaaattccaaggtcactgtgccgcagatgatcaagaggaccagggaggggaccagggaagcagaaatgagcaggtccgacgcctccttatattgtgatgatgttgacattcgcttcagcaaaaccatgaactcctgcaaagtgctgcagatccgctacgccagtgtggagcggctgctggagaggctgacggacctgcgcttcctgagcatcgacttcctcaacaccttcctgcactcctaccgcgtcttcaccaccgccatcgtggtcctggacaagctcattaccatctacaagaagcctatcagtgccattcctgccaggtggctgaggtcgctggagctcctgtttgccagtggccagaacaataagctcctgtacggtgaaccccccaagtccccgcgcgccacccgcaagttctcctcgccgccacctctgtccatcaccaagacatcgtcaccgagccgccggcggaagctgatctccctgaacatccccatcatcactggcggcaaggccctggacctggccggatccctcagctgcaactccaatggctacaccagcatgtactcggccatgtcacccttcagcaaggccacgctggacaccagcaagctctatgtgtccagcagcttcaccaacaagattccagatgagggcgatacgacccctgagaagcccgaagacccttcagcgctcagcaagcagagctcagaagtctccatgagagaggagtcagatattgatcaaaaccagagtgatgatggtgatactgaaacatcaccaactaaatctccaacaacacccaaatcagtcaaaaacaaaaattcttcagagttcccactcttttcctataacaatggagtcgtcatgacctcctgtcgtgaactggacaataaccgcagtgccttgtcggccgcctctgcctttgccatagcaaccgccggggccaacgagggcaccccaaacaaggagaagtaccggaggatgtccttagccagtgcagggtttcccccagaccagaggaatggagacaaggagtttgtgatccgcagagcagccaccaatcgtgtcttgaacgtgctccgccactgggtgtccaagcactctcaggactttgagaccaacgatgagctcaaatgcaaggtgatcggcttcctggaagaagtcatgcacgacccggagctcctgacccaggagcggaaagctgcagccaacatcatcaggactctgacccaggaggacccaggtgacaaccagatcacgctggaggagatcacgcagatggctgaaggcgtgaaggctgagccctttgaaaaccactcagccctggagatcgcggagcagctgaccctgctggatcacctcgtcttcaagaagattccttatgaggagttcttcggacaaggatggatgaaactggaaaagaatgaaaggaccccttatatcatgaaaaccactaagcacttcaatgacatcagtaacttgattgcttcagaaatcatccgcaatgaggacatcaacgccagggtgagcgccatcgagaagtgggtggccgtagctgacatatgccgctgcctccacaactacaatgccgtactggagatcacctcgtccatgaaccgcagtgcaatcttccggctcaaaaagacgtggctcaaagtctctaagcagactaaagctttgattgataagctccaaaagcttgtgtcatcagagggcagatttaagaatctcagagaagctctgaaaaattgtgacccaccctgtgtcccttacctggggatgtacctcaccgacctggccttcatcgaggaggggacgcccaattacacggaagacggcctggtcaacttctccaagatgaggatgatatcccatattatccgagagattcgccagtttcaacaaactgcctacaaaatagagcaccaagcaaaggtaacgcaatatttactggaccaatcttttgtaatggatgaagaaagcctctacgagtcttctctccgaatagaaccaaaactccccacctga

SEQ ID NO: 6157 - DNA, 903 bp, Homo sapiens
  SIMILAR (140)..(304): 311254mologous to Rattus rattus P140 RAS-GRF,accession number X67241,Smith-Waterman Score=48.
atgtgggccacgctgccgctgctctgcgccggggcctggctcctgggagtccccgtctgcggtgccgccgaactgtgcgtgaactccttagtgtggcatgtggacatggaatctccatggaaccaggtgagccgcagccgtcaaaggcctggggctgcttgcccagagggtgcccaccaggcctctgccctcctggcagccgttgtggatgccagtgaaggggtcaagtgtgtggataacatccgatgcaatgggctcatgatgaacgcatttgaagaaaattccaaggtcactgtgccgcagatgatcaaccatctggccctgcagagaggcctaaaggagtatcccaggggcacatttgctactgggaaacagaatggacttgtcccactgctgctgccccagcatctcaaccttcaaggctgggtcagaggcaaaggttccctcattcaggtgcccatgtctgaaaagggcaagatcaccagggggcgcctggggtctctctccctaaagaaagagggcgagcgacagtgcttcctgttttctaagcatctgattatctgtaccagagcctctggagggaagcttcacttgaccaagagtaaacccacaaaagtaaacaattatagacagaaaaaagctgaccataattttacacaggtgaaaatgcccttaattaatgctcagattgggatgaatgggttccggagagcagagtactcaaataagtggacaccaatttgcagaaacagcgagaacttcaaaaagccaatcagcaccctcaagcctaatcaggaggtgagtacagcacctccaaatgtctttattccaggacccgaagcccttcaaacatcaccttcaatgccacaagccttttaccatctgactcagaataaacagtaa

SEQ ID NO: 6158 - DNA, 600 bp, Homo sapiens
  SIMILAR (172)..(324): 1001254mologous to Mus musculus histone acetylase complex subunit MRG15-2,accession number AF319621,Smith-Waterman Score=285.
acccacgcgtccgcgcggtgctgtgaggtctgcgggcgctggcaaatccttcccaggatgtagagctggcagtgcctgacggcgcgtctgacgcggagttgggtggggtagagagtagggggcggtagtcgggggtggtgggagaaggaggaggcggcgaatcacttataaatggcgccgaagcaggacccgaagcctaaattccaggagggtgagcgagtgctgtgctttcatgggcctcttctttatgaagcaaagtgtgtaaaggttgccataaaggacaaacaagtgaaatacttcatacattacagtggttggaataaaaattgggatgaatgggttccggagagcagagtactcaaataccgtggacaccaatttgcagaaacagcgaggaacttcaaaaagccaatcagggagcagtatgcagaggggaagatgagaggggctgccccaggaaaagaagacatctgggtctgcaacagaaaaatgttgaagtgaaaacgaaaaagaacaaacagaaaacacctggaaatggagatggtggcagtaccagtgagacccctcagcctcctcggaagaaaagggcccgggtagatg

SEQ ID NO: 6159 - DNA, 1109 bp, Homo sapiens
  SIMILAR (92)..(379): 831254mologous to Homo sapiens preprocathepsin H (AA -22 to 314),accession number X16832,Smith-Waterman Score=423.
gaattcctggtcgaccctcgcgtccgagttgacgctctgggccgccacctccgcggaccctgagcgcaagagccaagccgccagcgctgcgatgtgggccacgctgccgctgctctgcgccggagcctggctcctgggagtccccgtctgcggtgccgccgaactgtgcgcgaactccttagagaagtctcacttcacgtcatggatgtctaagcaccgtaagacctacagtacggaggagtaccaccacaggctgcagacgtttgccagcaactgtaggaagataaacgcccacaacaatgggaaccacacatttaaaattggcactgaaccaattttcagacatgagcttttggctgaaataaaacacaagtatctcttgggtcagagccttcaggaattgcttcagccaccaaaagtaactacctttcggaggtactggtccctacccacctttcgtggactggcggaaaaaaagaaattttgtctcacctgtgaaaaatcagggtgcctgcggcagttgctggactttctccaccactggggccctggagtctgcgatcgccatcgcaaccggaaagatgctgtccttggcggaacagcagctggtggactgcgcccaggacttcaataattacggctgccaagggggtctccccagccaggctttcgagtatatcctgtacaacaaggggatcatgggtgaagacacctacccctaccagggcaaggatggttattgcaagttccaacctggaaaggccatcggctttgtcaaggatgtagccaacatcacaatctatgacgaggaagcgatggtggaggctgtggccctctacaaccctgtgagctttgcctttgaggtgactcaggacttcatgatgtatagaacgggcatctactccagtacttcctgccataaaactccagataaagtaaaccatgcagtactggctgttgggtatggagaaaaaaatgggatcccttactggatcgtgaaaaactcttggggtccccagtggggaatgaacgggtacttcctcatcgagcgcggaaagaacatgtgtggcctggctgcctgcgcctcctaccccatccctctggtgtga

SEQ ID NO: 6160 - DNA, 495 bp, Homo sapiens
  SIMILAR (191)..(400): 1001254mologous to Homo sapiens dJ553F4.3 (novel zinc-finger protein),accession number AL050349,Smith-Waterman Score=397.
aaagctgtgcccagacgttcccaaagctcgacacatttctggagcacatcaagagccaccaggaggagctgagctaccgctgccacctctgcggcaaggacttcccctcgctgtacgacctgggcgtgcaccagtactcccacagcctcctgccacagcacagccccaagaaggacaatgccgtctacaagtgtttccttgtgaacgctacctgcggcgtcatctgcccacccacggcagcgggggcaggttcaagtgccaagtgtgcaagaagttcttccggcgggagcattatctcaaactgcatgctcacatccactcgggtgagaagccctacaaatgctcagtgtgcgagtctgcgttcaaccgcaaggacaaactgaagagacacatgttgatccagtatgatgaagtgcgccaggggcttggcatggtgcccggcacgcagaaagtgctcaataaatgtttttgtcataacgtgaaaaaaaaaaaaaa

SEQ ID NO: 6161 - DNA, 2145 bp, Homo sapiens
  SIMILAR (811)..(2103): 931254mologous to Homo sapiens dJ553F4.3 (novel zinc-finger protein),accession number AL050349,Smith-Waterman Score=2211.
atgaggacatggacgtctttgaaggaccattatcctgcccaccaggaggctactgcaatagtgcaggcaagagatgatggtggctttgaccagagtaaccgcaatgaagatggaatggacaatcagaccgttctggctgtccagtcattattggatggccaaggagcagtccctgatccgacaggccagagtgtcaatgcgccccctgctatccagccattggatgacgaggatgtatttctctgcgggaagtgtaagaagcaattcaactcgctgccagcgtttatgacccacaagcgggaacagtgccaggggaatgcccccgccctggccacagtctcactggccaccaacagcatctacccaccttcggcagcacccacagcggtccagcaggccccaactcctgccaatcgccagatctccacatacatcacagtgcccccgtccccactgatccagaccctggtgcaggggaacatcttggtgagcgatgatgtgctcatgtctgccatgtcagccttcacatccctggaccagcccatgccccagggccccccacctgtgcagagcagcctgaacatgcattccgtgcccagctacctcacccagcctccacctcctcctccacctcctccaccactgcccccaccgccaccaccttaacctctatccacctccattccagagcctgggcccccctgggcgtcccaaccctggtgggaacggggtggtggaggtgtacagtgctgctgcgcccctggctgggagtggaacggtggagatccaggcactggggatgcaaccctacccacccctagaggtgccaaaccagtgggtggagcctccagtatatcccacccccacagtgtacagccctggcaaacaggggattcaaaccccaaaggaccaaaccccgccgcccccatgaccagcgccaccgggggcacggtggccacctttgactctccagcaacgctgaagacccgacgagctaaaggtgccaggggactcccggaagctgcagggaagccaaaggctcagaaactcaagtgctcatactgtgacaagtcattcaccaaaaactttgacctgcagcagcacatccgaaggtacacatgcgtggagggcactgacaagcttgtcttccacagccacaccggtgagaagcccttccagtgcattgcatgtggccgtgcctttgcccagaagtctaatgttaagaaacacatgcagacccacaaggtgtggcctccaggacacagtggtggcaccgtgtctcgaaactctgtgaccgtacaggtcatggccctgaaccccagcaggcaggaggacgaggaaagcacagggttgggccagcccctgccgggtgcgccacagccccaggccttgtccacagctggtgaggaagagggggacaagccggagtccaagcaggtggtcctcatcgacagctcctacctgtgccaattctgccccagcaaattcagcacctacttccagctcaagtctcacatgacccagcataagaatgagcaggtgtacaagtgtgtggtcaaaagctgtgcccagacgttcccaaagctcgacacatttctggagcacatcaagagccaccaggaggagctgagctaccgctgccacctctgcggcaaggacttcccctcgctgtacgacctgggcgtgcaccagtactcccacagcctcctgccacagcacagccccaagaaggacaatgccgtctacaagtgtgtcaaatgtgtcaacaaatactccacccctgaggccctggagcaccacctgcagaccgccactcacaacttcccctgcccacactgccagaaggacacgcaggcagggctcaggggctgctccacagatgacacagtgtctctgcctggccatctcatccatcacattccagatgtggccatgtcggggctgctgctggagccaggctgggtgtttccttgtgaacgctacctgcggcgtcatctgcccacccacggcagcgggggcaggttcaagtgccaagtgtgcaagaagttcttccggcgggagcattatctcaaactgcatgctcacatccactcgggcccctatgggcatttgaatgtgtacccctttctggcccatatcctataa

SEQ ID NO: 6162 - DNA, 399 bp, Homo sapiens
  SIMILAR (46)..(168): 951254mologous to Mus musculus YAP65 (Yes-associated protein of 65 kDa MW),accession number X80508,Smith-Waterman Score=229.
atggggtttcaccatgttgcccaggctggtcttgaattcctgacctcaggtcctcttcctgatggatgggaacaagccatgactcaggatggagaaatttactatataaaccataagaacaagaccacctcttggctagacccaaggcttgaccctcgttttgcgttagcacatgtggaaccccggagccaggaatttacccgcaataaagccaggccctctgtcagtaaaactgatgattacagaagcagggagagtctggctgccattagagaagtaaaatcacttcacacatcacctatggacactgacttcttggctcttctggaggccttgcgccctcatacagaaagcagaaaactagatcccgatggaggggattttctgctatatacataa

SEQ ID NO: 6163 - DNA, 597 bp, Homo sapiens
  SIMILAR (413)..(108): 371254mologous to Chlamydomonas reinhardtii amino acid feature: Rod protein domain, aa 266 .. 468; amino acid feature: globular protein domain, aa 32 .. 265,accession number L29029,Smith -Waterman Score=130.
tcaccaagtgctggaagcaacacaagcgtccttcaatggtgaacggatggcagggcccccagaagaccacaggaaagtcgtgtagagaagacgttcaggtgagctctgggacgaggaatcttcagaggaggcgaagattcctctgaatcctccttcagaggaggcgaagattcctctgaatcctccttcagaggaggcgaagattcctctgaatcctccttcagaggagtctgggggtgggagggcacagggcatggggtatccaggagccaagcaaagtgttggtttccgggagaaggactgaggcaccctcaatgctgcagatggggcgtcagatgtgggggagaacgagctggagatggacacggacatggaggtgtggatggccctggggaggccccctggcagctcggcacgtgtccagctgcacaaagcagggtcattagtaacccactttccccgcaggcgcctctgcagcatgggcctggcagggctaaactgagaatccaggagcgtgaatgctctagtgtgcacctcggccattgtgtgcgtgtgttccggactcaccgtgaatgttctagagtgtacctcggccat

SEQ ID NO: 6164 - DNA, 580 bp, Homo sapiens
  SIMILAR (199)..(579): 581254mologous to Homo sapiens tumor suppressing STF cDNA 1,accession number AF019952,Smith-Waterman Score=316.
cagtttggagtcgtttgctgcggggagggaatgaatgggcgctgggaacacgcccgcgaggtggggacgcgccggccgtagcgaggtccttagcgtgtgagtggccggggtcgggtcgcttccccgcagcatggaggacgatgcaccagtgatctacgggctggagttccaggcacgtgcctttaacacctcaaacctgcagaaacagatgccattcggtttttggttgggacgcagtctcttaaatatgataatcagatccatatcatagattttgacgatgaaaacaacattataaataaaaatgtcctcctccatcaaagccgggtgaaatctggcatattagcgctagccctgcagacagaggtgtgctgacgacctgctacaacagaacttcagacagcaaagtcctgacatgtgcagccgtgtggaggatgccgaaggaattggaatcaggcagccacgagtcccctgatgattcatccagcactgcacagaccctgggagctgctctgtcaccttgacaacacagcccatggcaacatggcctgtgtcgtgtgggagccaatgggagatggga

SEQ ID NO: 6165 - DNA, 936 bp, Homo sapiens
  SIMILAR (268)..(396): 951254mologous to Homo sapiens tumor suppressing STF cDNA 1,accession number AF019952,Smith-Waterman Score=218.
atggtgtgtgctttgatggagctctggagggcagagcaagctggcgccgacaactccgttgccagtggaacagccattgaagtgtgcgctcccgagtctgcaccaggccggcgcctgtcgggttgttgtgggggccattcattcaccggccggttctcggcgccggtggaacctgctacccgcctggagcgcggggaagtgatggagccgagagtgtccagcagggacagcgccttccgtgcagggtcgactctagaggatccccgtgcagccgtgtggaggatgccgatgaagttggaatcaggcagccacgagtcccctgatgattcatccagcactgcacagaccctggagctgctctgtcaccttgacaacacagcccatggcaacatggcctggagtgccgcccgtggagacctgccagagggtaaagggtcaggcactgccactgccctcgagcgctgtgagcctgttcagcttggtcagcacgcacttattcacactcacatggcaattattcaccacttcaggctcctggattctcagtttagccctgccaggcccatgctgcagaggcgcctgcggggaaagtgggttactaatgaccctgctttgtgcagctggacacgtgccgagggtgtgtgtgcccaaacgacagagcacaatcaagagtgtattgcgaccattgactactatgggtccttaggcaccctgattagacatgagtgtacctccggcgaggacagcggcagtgaccgaaaggaagagaggaggaggggcattctgagacctgactgtgctcctcgaactgtctgctggactgagagtaacgactgtgaaggctccagcatggagcgatgtcctggaagtcaagagcagagcatgccgtgtaagtcgacagacaaactctgctctggggacatgctgctggtgtag

SEQ ID NO: 6166 - DNA, 457 bp, Homo sapiens; identical to SEQ ID NO: 5869
  SIMILAR (176)..(403): 1001254mologous to Homo sapiens electron transfer flavoprotein beta subunit,accession number X71129,Smith-Waterman Score=372.
  misc_feature (1)...(457): n = a,t,c or g

SEQ ID NO: 6167 - DNA, 411 bp, Homo sapiens
  SIMILAR (100)..(258): 1001254mologous to Homo sapiens electron transfer flavoprotein beta subunit,accession number X71129,Smith-Waterman Score=256.
atgggatggggccctggactcctgggtctgaggaagacggggctgggacctggactcctgggtcagagagaaaaagaggatggaagtctggacccctgggagacgattcgtaccgccctggccatgggtgcagaccgaggtatccacgtggaggtgcccccagcagaagcagaacgcttgggtcccctgcaggtggctcgggtcctggccaagctggcagagaaggagaaggtggacctggtgctgctgggcaaacaggggcataaaaaaagcaaaacacaccctaatcatatcacggatgtacagctgccccccatctctatgagccccaggaccaaccattatgtggagttaaaaatcactcaaaggctccaggaccatggacccaacatgacctgtcaggaggagtag

SEQ ID NO: 6168 - DNA, 912 bp, Homo sapiens
  SIMILAR (88)..(279): 961254mologous to Homo sapiens electron transfer flavoprotein beta subunit,accession number X71129,Smith-Waterman Score=305.
  misc_feature (1)...(912): n = a,t,c or g
ttggagatcgatatcactagtccangtggtggaattcgagccgctgagggtgcgggctgaccctgtttggtggctgcggcgggatagatggcggacgtgcgcgtgctcgtagctgtcaagagggtcatcgactacgccgtgaagatccgagtgaagcctgacaggaccggtgtggtcacggatggtgtgaagcactccatgaaccccttctgtgagatcgcggtggaggaggctgtgcggctcaaggagaagaagctggtgaaggaggtcatcgccgttcagctgtgggcctgcacagtgccaggagacgatttcgtaccgccctggccagtgggtgcaagaccgaggtatccacgtggaaggtgcccccagcagaagcagaacgctttgggtccccttgcaggtggctcgggtcctgggccagctggccaaaaaaggaaaaggtggacctggtgctgctgggcaaacaggcccatcgcatgcactgactgtaaccagcacagggcagatgacagctggatttcttgactggccacagggcacattttgcctcccaggtgacgctggagggggacaagttgaaagtggagcgggagatcgatgggggcctggagaccctgcgcctgaagctgccagctgtggtgacagctgacctgaggctcaacgagccccggtacgcccacgctgccccaacatcatgaaagccaagaagaagaagatcgaggtgatcaagcctggggacctgggtgtggacctgacctccaagctctctgtgatcagtgtggaggacccgccccagcgcacggccggcgtcaaggtggagaccactgaggacctggtggccaagctgaaggagattgggcggatttgagcccctcccagagatggcaataaaactgactctcaacatct

SEQ ID NO: 6169 - DNA, 1026 bp, Homo sapiens
  SIMILAR (274)..(792): 951254mologous to Mus musculus Ankhzn,accession number AB011370,Smith-Waterman Score=829.
atggtccttaatcgttccagtctattgccgcaggaagacacccgccagctcctgctctgggtggggtcaggctgcagagtacgggctccgtatggcagggactgtgttataatcatctcagtgttcctggcactgcgcatggaaaacagtaccttctcaactgacaaaccttctgaacaaagatataattcacacaatcacttcggcaagtccagtcataagcagcataactatgtttggtcaacaacagactgcagatacgatgatggtcccgacgacctgaggaaggaggatttcagcagcatgagcgctcagttgttatacaaaatgatcaaatccaagacagagtacccgctacataaagccatcaaagtggagagagaagacgtggtcttcctgtatctgattgaaatggattcccagctccctgggaagctgaatgaagcggatcataacggagatctggcattagatctagccctctcacgacgactggagagtattgccaccacgctggttagtcacaaagctgatgtggacatggtggacaagagtggctggagcttgttacacaaaggaatccaaagaggagatctctttgctgccactttcctcattaagaatggggcctttgtcaacgctgctacactgggtgcccaggagacaccactgcaccttgtggccttgtacagttcaaagaaacactcagcagatgtgatgtctgagatggcgcagattgcagaggcccttctgcaggctggtgccaaccccaacatgcaggacagcaaggggagctttatacacagccttgagtcagaggaggtggccaagttggagaagcacttgatgcttctgcggcaggagtatgtcaagctgcagaagaagctggcggagacagagaagcgctgcgctctcttggctgcgcaggcaaacaaggagagcagcagcgagtccttcatcagccgtctgctggccatcgtggcagacctctacgagcaggagcagtacaggtgggagagctcctag

SEQ ID NO: 6170 - DNA, 844 bp, Homo sapiens
  SIMILAR (563)..(300): 401254mologous to porcine adenovirus 3 163R*,accession number AF247039,Smith-Waterman Score=108.
aaataaccctgttcctccgacgtatcccaaatcccacccaacttgtgaactcctacttatctgttgagccccaacgcaagggtcacctcttctatgaagccctccttgattccctcacctgccaccactgttcatcagattttatggccggaagatggtgaatatcttgatggcgaacactaagtttgatgcatttctgaagcaatctctcccatcttacgacttgcagaaggtcatggcggccattaaacagcagggaatagaagataatgatgaacttccctctgccaaaggctgcaaggtgttgaggagtctggtggtgtgtgagaacgggctgcccatcaaggaggggctcagctgcaatggcccaaggctggtggggctgcgctccacactgcagggccgcggggagatggtggagcagctacgggagctgacacggctgctggaggccaaggacttccggtcccggatggaaggcgtggggcagctcctggagctctgcaaggccaagacggagcttgtcactgcccacctggtccagggttttgatgctttcaccccaaggttcagggtttccaacaagaaagtgaaccagtgggcgctggagtctttcgccaacatgatccccctcctcagagagagcttacaccccatgctgctctccatcatcatcactgttgcagacaacctcaactccaagaactcagggatttacgctgctgccgtggctgtgctggatgcgatggttgagagcctgggggattgggtgatagcagcagagagtgcatcaaatcggacggaagagaaggggtatgaagtcttcccaaatcacccaagctga

SEQ ID NO: 6171 - DNA, 269 bp, Homo sapiens
  SIMILAR (1)..(81): 1001254mologous to Bos taurus auxilin,accession number U09237,Smith-Waterman Score=140.
gtgaccaacacacagatattccagcttcagtttcacactggattcataccactggacacaacagttttaaagttcaccaaatcctatcctgtgataacaactggaatgggctggagaaattaagtgagacaatagtggcattttggacctggatcattcacctccttgttgatgaagaaaacctgtccctgaaaggtagatggaaaccaaaagggctctgggttccaggcaagggcctctttacctttcaaccaatgtggagccggtga

SEQ ID NO: 6172 - DNA, 1260 bp, Homo sapiens
  SIMILAR (58)..(645): 1001254mologous to Escherichia coli Formate dehydrogenase, nitrate-inducible, major subunit (EC 1.2.1.2) (Formate dehydrogenase-N a subunit),accession number D90788,Smith-Waterman Score=1033.
atgaatgatgccactgcagttcaggaagggtcccagatgtactcatggcagaaattgacaccaaccgggccgtttatcatgcagccggaagggatgggacgcctgtttgccatcaacaaaatggcggaaggtccgttcccggaacactacgagccgattgaaacgccgctgggcactaacccgctgcatccgaacgtggtgtctaacccggttgttcgtctgtatgaacaagacgcgctgcggatgggtaaaaaagagcagttcccgtatgtgggtacgacctatcgtctgaccgagcacttccacacctggaccaagcacgcattgctcaacgcaattgctcagccggaacagtttgtggaaatcagcgaaacgctggcggcggcgaaaggcattaataatggcgatcgtgtcactgtctccagcaagcgtggctttatccgcgcggtggctgtggtaacgcgtcgtctgaaaccgctgaatgtaaatggtcagcaggttgaaacggtgggtattccaatccactggggctttgagggtgtcgcgcgtaaaggttatatcgctaacactctgacgccgaatgtcggtgatgcaaactcgcaaacgccggaatataaagcgttcttagtcaacatcgagaaggcgtccgcaactaactccatcacgccgccttctcaggtgcgtgattacaaagcagaagtcgcaaaacttatcgacgtttccacctgtatcggctgtaaagcctgtcaggtggcgtgttcggagtggaacgacatccgtgatgaagtggggcactgcgtcggggtttacgataaccccgccgatctgagcgccaagtcctggacggtgatgcgctttagcgaaaccgaacagaacggcaagctggagtggctgatccgtaaagacggctgtatgcactgtgaagatcccggctgcctgaaggcgtgcccgtctgctggtgcaatcattcagtacgctaacgggattgtcgatttccagtcggaaaactgcatcggctgtggttactgcattgccgggtgtccgtttaatattccgcgcctcaacaaagaggataaccgggtatataaatgcacgctctgcgtcgatcgcgtcagcgtcggccaggaaccggcttacttctgccgcatcgtgccagtcctagctgcttaccaagaccgtcacactgactgtgcacagagcacaaagtttgtgcttctacagtgtttccaatatgcacataattcccggaagaacaactga

SEQ ID NO: 6173 - DNA, 949 bp, Homo sapiens
  SIMILAR (943)..(848): 501254mologous to Trypanosoma brucei probable similar to ring -h2 finger protein rha1a,accession number AL359782,Smith-Waterman Score=73.
  misc_feature (1)...(949): n = a,t,c or g
agatgaaaagctacaagtttgaaagacaggtgtacaaatcttcatttagtatctaactagctctgacagaagtctttttacctttttggacctagcttcctttttcagacaatacatctttgatgatcgaaaacaacaacaacctgatacagttccttgcagttctaaaagcccaatagtccagaatacaaaggctctattatgttcttctctggataaaagaacttgtggactttataacataatccaagaatgaagnnnnnnnnnnccacccaaaccctacctttaggaacaaagagggcccatagcaggaagctgaaatacagaacgtcttctgagaacacagagaacatttagcaaaaagtggaaaatctgacaacactgtacagtcgcagtcttcctctccataacaataatatcttctcctctcactaaaatagagcaatttttattgtcacaagcccatgtgtattactggcaataagggatatagctgtataggacacctccttaaacatctcctttattttaagattcagttagggggaaatgactagtttcccagcactttctggttaccatggatacctgtcatccacatccagagcctgcaggttacactcagggactcttgccagctcatgaataatatcgctgcaagcccgctgccgctgcgatatgtacacatgtcttcccactctcatcatcatagttgattatggacggcccctggtgatggctcagaatgatggagcacagaatcctatttccactctggaaaagagagtcaaagaaagcccattatgtacaatccagtgttcttctctgtctaggcatgttaagataaaaatacaaaggaaaaaaaggaaagaaagaaagaaagaaaaaagatgaaaagagaaaaggaaatggaaaaaaaagaataaaaatacactctatctaagctctc

SEQ ID NO: 6174 - DNA, 1072 bp, Homo sapiens
  SIMILAR (88)..(348): 251254mologous to Homo sapiens inversin protein alternative isoform,accession number AF084382,Smith-Waterman Score=96.
atggggaagcagctcagtcttactcctgaccacgacttcgacttcgctgttggaatcaaagtgggctggcttgaaggctgtgtgagtctactcagaaacggtgccaagcacaatatcccagataaaaatgggcgcctgtcactggatgctggcactggtgaagccgaattgaagagtggaaataggattctgtgctccatcattctgagccatcaccaggggccgtccataatcaactatgatgatgagagtgggaagacatgtgtacatatcgcagcggcagcgggcttcagcgatattattcatgagctggcaagagtccctgagtgtaacctgcaggctctggatgtggatgacagtgagaggagaaaaaattattgttatggagaggaagactgcgactgtacagtgttgtcagattttccactttttgctaaatgttctctgtgttctcagaagacgttctgtatttcagcttcctgctatgtgccctctttgttcctaaaggccctgcctaccacctctcgcctcatctggaacatccaaaatcacactaatgatcctggacatgtggagacccaagcccagggcagcatgtttcatttgagcttctgccgcatcttggcactcctagctgctaacaagaccctcacactgactgtgcacagagcacaaagtttgtgcttctacagtgtttccaatatgcacataattcccggaagaacaactgaagagaaagcaggacctggcatttgtcaaggagaaacagagctggacacagtctacggggctaaagacagattctattcagtgcttgtggcaaccagggaaaggagatttcagtatggagctgagctccgctccaaatacaaaaccagcgacgtggatcgccaggagacccggctcaggaaacctcgcctaccggtccgccctgcaccccccagcccctcgcaccggcaaacacgaaagcccaacacgcaacccccgcaaaccaaaccggggacaccggagccagcgaccacccgagcaaaaccgcatcacccccggacacagcgacacgcagccaccatga

SEQ ID NO: 6175 - DNA, 588 bp, Homo sapiens
  SIMILAR (1)..(177): 981254mologous to Homo sapiens Amino acid sequence of a human secreted peptide,accession number Y12916,Smith-Waterman Score=304.
atgggcgctgagtgggagctgggggccgaggctggcggttcgctgctgctgtgcgccgcgctgctggcggcgggctgcgccctgggcctgcgcctgggccgcgggcagggggcggcggaccgcggggcgctcatctggctctgctacgacgcgctggtgcacttcgcgctgagaggagggggcaatgggagagaaatgaaggttggagaaggagctgtacgaagttctggggaagaaaatggagtggtttatgcctggggccacaatggatatagccagcttgggaatgggacgaccaaccaaggcattgctcccgtccaggtctgtaccaatctcttgatcaagcaagtggtggaagtagcttgtggctcacatcattcaatggctctggcagctgatggagagcatttggaaggtgttatggtaggccctgataatgcagctgcaagtaggaccatgttggcccttagtggcccacatcctagtgaggctgaaaaccaggcaaaaaagcactgcattgtaagtgacttggtccaaccagtgaaaaatacaaacaggaccattcatagacaaaaaagtgaagaataa

SEQ ID NO: 6176 - DNA, 933 bp, Homo sapiens
  SIMILAR (1)..(930): 681254mologous to Homo sapiens p40,accession number U93567,Smith-Waterman Score=1054.
gatcacaactcctcgccagcaatggaacaaaactggatggagaatgcgtttgacgaattgacagaagtaggcttcagaaggtgggtaataacaaacttctccaagctaaaggagcatgttctaactcaatgcaaggaagctaagaagcttgaaaaaaggttagaggaattgctaactagaataaccagtttagagaagaacataaatgacctgatggagctgaaaaacacatcacaagaacttcgtgaagcatacacaacggaagaaaggatatcagagattgaagatcaacttaatgaaataaagcatgaagacaggattagagaaaaaaatgaaaaggaacgaacaaagcctccaagaaatatgggactacgtgaaaagaccaaacctacatttgactgtgtacctgaaagtgatggggagaatggaaccaagttggaaaacactctgcaggatattatccaggagaacttccccaacctagcaaggcaggccaacattcaaattcaggaaatacagagaacaccacaaagatactcctcgagaagagcaaccccaagacacataatcatcagattcaccaaagttgaaatgaaggaaaaaatgttaagggcagccagagagaaaggtcaggttacccacaaagggaagcccatcagactaacagctgaccccttggcagaaactctacaagccagaagagagtgggggccaatattcaacattcttaaagaaaagaattttcaacacagaatgtcatatccagccaaactaagcttcataagtgtgggagaaataaaatactttacagacaagcaaatgctgagagattttgtcaccaccaggcctgccctacaagagctcctgaaggacgcgctaaacatggaaaggaacaaccagaaccagtcactgcaaaaacatgccaaattgtaa

SEQ ID NO: 6177 - DNA, 467 bp, Homo sapiens
  SIMILAR (467)..(423): 731254mologous to Homo sapiens p40,accession number U93571,Smith-Waterman Score=62.
ctgcagagaaagaagcactccgggtgagccggagaggtccctcttcagctaccccctgcagcagtttgctctgcatgcttgcagcgacccgcactgtggtggaattcttcattttttctgtaatcttgtcttcacgctttatttcattaagttgatcttcaatctctgatagcctttcttctgcttgattgatccagctattgatacttgtgtatgcttcatgaagttctcgtgctgtgtttttcagctccatcaggtcatttatgttcttctctaagctagttattctagttagcaattcacctaaccttttttcaaggttcttagcttccttgcattgggttagaacatgcttctttagctcagaggagtttgttattacccaccttctgaagcctacttctgtcaattcatcaaactcaattctccatccagttttgttcccttgctggtgaggagctgtgatc

SEQ ID NO: 6178 - DNA, 600 bp, Homo sapiens
  SIMILAR (276)..(4): 511254mologous to Homo sapiens p40,accession number U93571,Smith-Waterman Score=222.
tcagctattgttacttttgtatgcttcatgaagttctcgtgctgtgtttttcagctccatcaggtctttcatgttcttctttaaactggttattctagttagcagttcctgtaaccttttttcaaggttcttagcttccttgcattgggttacaacatgctcctttagctcagaggagtttgttattacccaccttctgaagcctgctcctgtcaattcgtcaaattcattctctgtccagttttgttcccttgctggcaaggagttgtgatcctccaggtctgccttgatctgctttaaatcagagagggagaaggggacatgtacctgggttgggccaaattcccctccccctacagcttgaaggggacataaccgatagcctgggggtttttgtggtcctttggagatttcttggcttatttccttcgacgcagcagcagaaacactagttttcctcccagaccacaagggggactgaggaaggttggatttagtggcccttaccaacacattctcgaaaacctgcacccttgtctgtcctcctagaccacaaagaggactgagaaaaatcggatttagtggccttgaccgacgcat

SEQ ID NO: 6179 - DNA, 1092 bp, Homo sapiens
  SIMILAR (433)..(792): 571254mologous to Leishmania major probable levansucrase precursor,accession number AL160371,Smith-Waterman Score=302.
atggggtggaggccacgctggctcccgtacctttactggggcttccagtctgatctctgcccccattgcaagaggaaggcacaagaggaggactcgctggcagcacaggctgcttctcacccaaggctttcagccaacagcaagaacaactcctgggggaagcagtactcctacgcgctcttcaaggccatgagacacatgctgtgcatcggctacgggcggcaggcgcctgcggcagtgtccgacgtctggctcaccatgctcagcatgagtcgtgggtgccacctgctacgccatgttcattggccacgcactgccctcatccaggtcctggactgctctcggcgccagtaccaggaaaaggtagtgttacccagggagcacccgaacattggttcctcccaagaaggaggcacatggcaccagacagttggcctccagcagacaagcgataagttcgacgccaacgatccgatcctgaaagatcagacgcaagaatggtccggttctgcaacctttacatctgacggaaaaatccgtttattctacactgactattccggtaaacattacggcaaacaaagcctgacaacaagcgcagccaacacgggaacagaaaacggataccaaggcgaagaatctttatttaacaaagcgtactacggcggcggcacgaacttcttccgtaaagaaagccagaagcttcagcagagcgctacaacacgcgatgctgagttagcgaacggcgccctcggtatcatagagttagataatgattccccattgaaaaaaagaggtgcgactcaacgctctagcgaagagaatataaccctaaaagcatacaagagagacgtacggagtctcctcatgttaacacgcaatgaagatgttgcggattccttaaacagcagcaaaaaacgacagaattaccagttgccttccattcgatcagtgacgcgatgtaagaaaattggagtgtgtgcaaaaggcataggttgtggccagggaacccactacttaagtgtatctattctcaatactgccgatcgggaccggaggaaattgggctttaccaggacctccatgtattga

SEQ ID NO: 6180 - DNA, 1140 bp, Homo sapiens
  SIMILAR (295)..(807): 401254mologous to Homo sapiens p40,accession number U93571,Smith-Waterman Score=272.
atgtcaaccgatgttattaggttggtgcaaagcctcactaagcagtcttttgatcacacctttcccatctccaagctcctctacatcttcttccagcagttcaccaccccgctggcttcgaagtcagacaacaagtttggaaaatggcatcatcccaagaagttgagttgcaagtttcctcttgctgagaaaacctccgctggtgatacccaggcaaacagggtctgtagtgtacctccaacaaaccacagcagacctgcagcagacaggcctgttagaaggaaaattaacaagcagaaaacagccacatcaacatcaacaaaaaggacgtccactcagagaccccatccgaaggtcaccaacgtaaaagaccaaaggatcacagctcctcaccagcaagggaacaaaactggatggagaattgagtttgatgaattgacagaagtaggcttcagaaggtgggtaataacaaactcctctgagctaaagaagcatgttctaacccaatgcaaggaagctaagaaccttgaaaaaaggttaggtgaattgctaactagaataactagcttagagaagaacataaatgacctgatggagctgaaaaacacagcacgagaacttcatgaagcatacacaagtatcaatagctggatcaatcaagcagaagaaaggctatcagagattgaagatcaacttaatgaaataaagcgtgaagacaagattacagaaaaaatgaagaattccaccacagtgcttgtgtccacttggggcagccaactagaacaaaataaccttccccacataatttcccctttatttcacagcacccatgacctaaatattagcttttatggaggctgtctgctgcaagcatgcagcagcaaactgctgcaggggttagctgaaggaggacctctccggctcacccggagtgcttctttctttgcagctaaactgtgtttaaccaaacacttccttcctacggaaatgatccttatcaaaagcaggaaaacaacccctgatacacaaccaaggcgattgtacttgttacaaggtgttgtggatcaaactagtagaaaaggccctaccgccttgaatattcggcaaaagaccttcgccgctgctccgccacatcgatga

SEQ ID NO: 6181 - DNA, 1786 bp, Homo sapiens
  SIMILAR (259)..(645): 861254mologous to Macaca fascicularis hypothetical protein,accession number AB047842,Smith-Waterman Score=617.
atggcagtgattatgaacttggactctggtgaccctggctcacgagtgaagctacagaccttcacggtgagtgttacagctcttaaagtggagcgtctggagttgttcgttcctccctttgggctcgtggtctcgctggcttcaggagtgaagctgcagaccttcgcgggcgggaaagcgtggctgttacaaacgcattctgacttgggggagcagaagttaactactttcataccaatctctctctctttaaaagtgatcttttggtgtaattggcctgaagcgaaaaccgcagcctatgatggtgaacaggccacgtgtgagcctgtgctcaaagccatgtttttggctgacacccacttgcttagggaattcctaggtcactggctggacaaattacgaagggaatggcaggtggagagagccttccagacagctctgtggttgctgcagccggaagtcgtcttcatcctggaggatgtctttgatgaagggaagtggagcacctctgaggcctgggtggatgatgtggagcagtttcggaaaatgttcagacacccaagtcatgtgcagctgaaggtagttgctggaaaccatgacactggcttccactatgagacgaacacatacgaagtagaacgttggaggaacagaaacaaccccagtttcattatgggtagcatcacacccacagactatgccctctccaagtgccacctaccacctgaggacgtggtcttgatcatctactgtggagtgaaattaccagatagaatagtagactctaaagcaggactcctgaaactacctgtgttgaagaatgtgatttccacccaactccaattcccatctatcatggaccaacttttggtctacaacttgttcaatgagacgagtccattggtcatgtgcctggatgtcatggcaatgtcaaatcgaggaaaccaccatctggctgcaacacgcctaaggaaggtattggatcacaactccttgccagcaagggaacaaaactggacggagaatgagtttgatgaattgacagaagtagtcttcagaaggtgggtaataacaagctcctctgagctaaaggagcctgttctaacccaatgcaaggaagctaagaaccttgaaaaaaggttagagaaattgctaactggaataaccagtttagagaagaacataaatgacctgatggagctgaaaaacacagcacaagaacttcatgaagcatacacaagtatcaatagccaaattgatcaagtggaagaaaggatatcagagattgaagatcaacttaatgaaataaagtgtgaagacaagattagagaaaaaagaatgaaaaggaacaaacaaaccctccaagaaacatgggactatgtgaaaaagaccaaaactacgtttgattggtgtacctgaaaatgacagggagaatggaaacaagttggaaaacacacttcaggatactattcaggaaaacttccccgaactagcaagataggccaacattcaaattcaggaaatacagagaacaccacaaagatactcctcgagaagagcaaccccaagacacataatcgtaagattcaccaaggttgaaatgaaggaaaaaatgttaagggcagctggagaaaaagaagatgaaactgacaacaatgagttcttcttgtggagccagaaagggaagagggccggaaccctgaacgaccacgtggaggaaagctgtccaccaaccaaaaatgcctgccttggaacacccattcattgctatgtgggcaagaaataa

SEQ ID NO: 6182 - DNA, 1299 bp, Homo sapiens
  SIMILAR (463)..(867): 941254mologous to Mus musculus ion channel BCNG-3,accession number AF064874,Smith-Waterman Score=671.
atgctcagagatattaaggcatcacttgagatgcttcgaccagcaggattggaaatgaagaggggccagcaagctgaggatgccagtgtagaagctgttgccaccttcccctggctaaacccactgaacggggctggcagattttactgggacctgaccatgctgctgctgatggtgggaaacctgattatcattcctgtgggcatcaccttcttcaaggatgagaacaccacaccctggattgtcttcaatgtggtgtcagacacattcttcctcatcgacttgggtgtctataagagcctccagaccaagaatgttctgaataccacaatgcaagctggaagccagctgaagacacagaatgaaatgcacagacatgggctagctagcctcaaatccttgaatatcacgctgctgaagcctgatgagagacctaaaagatctgcaagattgtctcgtatgatcttccacatgacctacgacctggccagcgccgtggtgcgcatcgtgaacctcatcggcatgatgctcctgctctgccactgggacggctgcctgcagttcctggtacccatgctacaggacttccctgacgactgctgggtgtccatcaacaacatggtgaacaactcctgggggaagcagtactcctactcgctcttcaaggccatgagccacatgctgtgcatcggctacgggcggcaggcgcccgtgggcatgtccgacgtctggctcaccatgctcagcatgatcgtgggtgccacctgctacgccatgttcattggccacgccactgccctcatccagtccctggactcctcccggcgccagtaccaggaaaagaaggaaaacaaacaaacagaaaggaatagtatcaacatcaacaaaaaggatgtctactcagagaccccacccaaaggtcaccaacatcaaagaccgaagatagataaatccacgaagatgaggagaaaccagtgcaaaaaggctgaaaattccaaaaaccagaaaacctcttcacctccaaaagatcacaacgcctcgccagcaagggaacaaaactggatggacaatgagtttgatgaactgacagaagcaggcttcagaaggtgggtaataacaaactcctctgagctaaaggagcatgttctaacccaatgcaaggaagctaagaactttgaaaaaaggttagatgaattgctaactagaataacctgtttagaaaagaacagaaatgacctgatggagctgaaaaacacagcacgagaacttcatgaagcatacacaagtatcagtagctga

SEQ ID NO: 6183 - DNA, 1686 bp, Homo sapiens
  SIMILAR (883)..(1494): 431254mologous to Homo sapiens p40,accession number U93570,Smith-Waterman Score=365.
atgaacacagcaagagcaaggggttacagaagacaggctgtggaggaggcaaaatccacagtcattgatgatgcatgggacatgggggaagaaagaaaaagaggactgaagatggttgtcaggcttccagctggcgcaactggttgtgcctctgaaatacagagttcaggagagagctgtgcaatggttcttccacccaccaccacagaccgtcgtgtgaaacccctgcaccgtcgacgcacttacccggttccactctgggccaatcaggcacccggctttgtgctcacacgttggataatatcagtgctgctggagaaaatccagtgtggtggagcaggactctccttcctgccaccggcttcttttcctcctctccttcccctggtgacctccgaggaggagtgtgaggcagcacttttcctccagaggcattcatggggggtcatcacgtcacagttttttcatgatacgttaacaagcaggggagaaagagacaattggcacctgcaccagacccagtgtagaaatgggagccagtgcgaaacagagctcacgaccactggtttagagctgctcctgtcacatgggcagcaagtaagctccagcaccaagagcaacaccaaagcagatgctggcaattgcacacagagctgccttgtgcagccgtggtcagggccaggtgtgtgggcagggaactgccagtgtctgctacagccatctcacctgtcgggtacccagccctcttcatgccagctttctaaccccttctccgtgatgctagcagcatcagagacagcatcacaagtggagagattgcaggaaggtaaattatctgctgtagcttcattcatggccatgaaactaggcaacaacgacagcctgcctgatgactttaatctgatgaggaaggaaggaggaaggaaggaaggaaggagggaaaggagggaggatcacaactcctcgccagcaagggaacaaaactgtatggagaatgagtttgatgaattgacagaagtaggcttcagaaggtgggtaataacaaactcctctgagcagaaggagcatgttctaacccaatgtaaggaagctaagaaccatgataaaaggttacaggaactgctaactagaataaccagtttagagaagaacataaatgacctgatggagctgaaaaacacagcacgagaactttgtggagcatatacaagtatcagtagccaaatcaatcaagtggaagaaaggatatcagagattgtagatcaactgaatgaaagaaatgacagggagaatggaaccaagttggaaaacactctgcaggatattacccaggacaacttcccctacctagcaaggcaggtcaacattcaaattcaggaaacacagagaatgccacaaagatactactcgagaagagtaaccccaagacacataattgtcagattcgccaaagttgaaatgaaggaaaaaatgttaagggcagccagagagaaagacacatcagtgaaacagaaagttaacaaggatatccaggaattgaactcagctctgcaccaagtggacctaatagccatctacagaactctccaccccaaatcaacggaatatacattcttctcagcaccacatcacacttattccaaaactgaccacatagttcattcgatactctgcgactctggttaa

SEQ ID NO: 6184 - DNA, 630 bp, Homo sapiens
  SIMILAR (175)..(477): 621254mologous to Mus musculus T-box 1,accession number AF326960,Smith-Waterman Score=313.
atggcttcctgtctcctcacattcttcagctgggacctgagccgggcaggggctgctctcctcatcttgtcattcacaagacacggacttctgccattggttcagctggctctgtccatgggcgagcactgtccctgcatcacatatgacaagaatgcctggtgcgctctactggggcccaagctgtgccgagcccactggcagggccccaagaacccacgtgtgtccagagtgacagttcagctggagatgaagcctctgtgggaggaattcaaccagctgggcactgagatgatcgtcaccaaggcaggcaggaggatgttcccccccttccaggtgaagatcctgggcatggactccctggccgactacgccctgctcatggacttcatccccctggacgacaagagatacaggggctccaggatgtacggagccgggatccacggggacgcccctccaggaacccgaggtcgatcgtctgtgtgtgagacggtgctgatggacttcgatgcgctggtgcaggcacagacaggcctgggcacagctgcggtgatcgtcatggaccgctcggaccgggagctgcggcccgaggagattgaaggcttaggcagctgtgagctcaaatga

SEQ ID NO: 6185 - DNA, 736 bp, Homo sapiens
  SIMILAR (1)..(276): 891254mologous to Homo sapiens NADH:ubiquinone dehydrogenase 51 kDa subunit,accession number AF053070,Smith-Waterman Score=434.
cccacaatctgccgccgtggaggtacctggtttgctggctttggcagagaacgcaactcaggcaccaaactattcaacatctctggccatgtcaaccacccttgcactgtggaggaggagatgtctgtgcccttgaaagaactgattgagaagcatgctgggggtgtcacgggcggctgggacaacctccttgctgtgatcccttgcggctcgtcttaccccactgatccccaaagtctgtgtgtgaaacgttgcttgatggacttcgatgcgcttggtgcaggcacagacaggcctgggcacagctgcggtgatcgtcatggaccgctcgacggacatcgtgaaagccatcgcccgcctcattgagttctataagcacgagagctgtggccagtgtaccccatgccgtgagggtgtggactggatgaacaaggtgatggcacgtttcgtgaggggggatgcccggccggccgagatcgactcccctgtgggagattcagcaagcagattagaaggccatacgatttgtgctctgggtgacgtggccgcctggcctgtgcagggtctgatccgccactttcggccggagctcgaggagcggatgcagcggtttgcccagcagcatcgaggcgcggcaggctgcctcttagcccaccaccctggcctgctgtcctgcgtctatccatgtggaatgctggacaataaagcgagtgctgcccaccctccaaaaaaaaaa

SEQ ID NO: 6186 - DNA, 406 bp, Homo sapiens
  SIMILAR (6)..(41): 661254mologous to Homo sapiens Human secreted protein, SEQ ID NO: 4488,accession number G00407,Smith-Waterman Score=45.
ctgcaggcgcgtgccgccacgcctgactggttttcgtatttttttggtggagacggggtttcgctgtgttggccgggctggtctccagctcctaaccgcgagtgatccgccagcctcggcctcccgaggtgccgggatggcagacggggtcttgctcactcagtgctcaatcttgcccaggctggagtgcagtggtgtgatctcggctcgctacaacctccacctcccagccgcctgccttggcctcccaaagtgccgagattgcagcctctgcccggccgccaccccgtctgggaagtgaggagcatctctgcctggccgcccatcgtctgggatgtgaggagcccctctgcctggctgcccagtctggaaagtgaggagcgcctcttcccggccgccatcccgt

SEQ ID NO: 6187 - DNA, 1125 bp, Homo sapiens
  SIMILAR (675)..(616): 501254mologous to Homo sapiens A human collagen 1 (alpha2) protein fragment,accession number Y84549,Smith-Waterman Score=51.
ttaagccagcagggaagggcagatgtgggctgctgtttcatgcatgcacagaggcaggccctggctcttgcagcagcggacttcacgaatgtggaatgtggaggttacacagcgatgcctagactgtctgtccttagaccgaagggcagcagaaaggctcagggggcttgctctatattccttagacatctccggagattttctcagcatcagaatcagatcctcccatggcctgcggctacttttaagaaagtttggcaaccttttggatatgtcctcttctcttttttgactttccaggctgtaaaccttcagaagcttccacatgtggtgccagtgggctccttgaaaaatgacttccctgggaaccagaacatccaggttggcctcaaacttgctgccaaacaggaactgtggcaagccggagaggattctgatgcttggaagtgggcgaatgttttgattttcaagcaaagaaaaagctagcttcctggtgaaccctgtgggcatgaaccggtacagcgtggacacctccgcctccacctttaaccacaggggctccttgcacccctcctcctcgctgtactgcaagaggcagaactctggagacagccaccttgggggtggtcctgctgccaccgctggtggtccccgcactagccccatgtcttctggtggcccctcggcacctgggatgaggcctccagcctccagccccaagagaaacacgacctctctattaaactctggcttggaacctacattttcttttcgtatcacctttggattcatgtgaccttgtccgcagtgtgctgacttgcctctctccacctgggaattccccaagtttcgatatgcacaggtatcagctgccttgtgtacattaatacaggaagtgttaggaggcgtttgctcttctggttctatttcattaagcaagctgaagctggatgtagaaccgtagaatcctagagttggggaaaagaggtcttgggggacatctggacggctcccctccagagtagaaccttctcccccgtgggttccacattgctcagcgatgatgagagctcctgttggtccacattctggccagcatttgtcagtattacagatttcgcccat

SEQ ID NO: 6188 - DNA, 805 bp, Homo sapiens
  SIMILAR (677)..(763): 891254mologous to Homo sapiens C3f,accession number U72515,Smith-Waterman Score=148.
gaatttaaagacggctcttcccgggtcccaccgaggaaaggcacgcaaaactgaggtcagcggccgcagagactttccatctccttccccttctgagaggagatggcttcgcagcggagatggcaatcgagtcggcactccaagacccagtcgaattgggactttccagtctaagaaaagctcagcaagatcatccgtgagcccttcagccaaaattacgcatcatggggatcccgattctccccggaacctgcctgccttcgtgtccatgccgccaccagtccttggctgggagcggccagccagcttcagcttgcttaatgaaatagaaccagaagagcaaacgcctcctaacacttcctgtattaatgtacacaaggcagctgatacctgtgcatatcgaaacttggggaattcccaggtggagagaggcaagtcagcacactgcggacaaggtcacatgaatccaaaggtgatacgaaaagaaaatgaagtgaggagcgtctctgcccggctgcccatcgtctgggatgtgaggaaaccctatgcctggctgcccagtctggaaagtgaggagcgcctcttcccggccaccatcccatctaggaaagtgtgggcagcattagagtgtatctggttccccactgacctcaacgtcagggacttgccttctactctggtgcaactgaccatccactggctcatcatgggttactccatgactgccttctgcctcttcacatggggcaaatggcttaaggtagcctacagcaggactggtgcagaaattactcatcacagctag

SEQ ID NO: 6189 - DNA, 1867 bp, Homo sapiens
  SIMILAR (1147)..(1269): 751254mologous to Homo sapiens Human receptor-associated protein from Incyte clone 2906971,accession number Y69987,Smith- Waterman Score=168.
ctacaaggagacctacctcatccacctcttccatacctttacaggcctctcaattgcttattttaactttggaaaccagctctaccactccctgctgtgtattgtgcttcagttcctcatccttcgactaatgggccgcaccatcactgccgtcctcactaccttttgcttccagatggcctaccttctggctggatactattacactgccaccggcaactacgatatcaagtggacaatgccacattgtgttctgactttgaagctgattggtttggctgttgactactttgacggagggaaagatcagaattccttgtcctctgagcaacagaaatatgccatacgtggtgttccttccctgctggaagttgctggtttctcctacttctatggggccttcttggtagggccccagttctcaatgaatcactacatgaagctggtgcagggagagctgattgacataccaggaaagataccaaacagcatcattcctgctctcaagcgcctgagtctgggccttttctacctagtgggctacacactgctcagcccccacatcacagaagactatctcctcactgaagactatgacaaccaccccttctggttccgctgcatgtacatgctgatctggggcaagtttgtgctgtacaaatatgtcacctgttggctggtcacagaaggagtatgcattttgacgggcctgggcttcaatggctttgaagaaaagggcaaggcaaagtgggatgcctgtgccaacatgaaggtgtggctctttgaaacaaacccccgcttcactggcaccattgcctcattcaacatcaacaccaacgcctgggtggcccgctacatcttcaaacgactcaagttccttggaaataaagaactctctcaaggtctctcagatgctattcctgttcctctggcacggcctgcactcaggatacctggtctgcttccagatggaattcctcattgttattgtggaaagacaggctgccaggctcattcaagagagccccaccctgagcaagctggccgccattactgtcctccagcccttctactatttggtgcaacagaccatccactggctcttcatgggttactccatgactgccttctgcctcttcacgtggggacaaatggcttaaggtgtataaatccatctatttccttggccacatcttcttcctgagcctactattcatattgccttatattcacaaaggcaatggtgccaaggaaagagaagttaaagaagatggaataatccatttccctggtggcctgtgcgggactggtgcagaaactactcgtctcccttttcacagcactcctttgccccagagcagagaatggaaaagccagggaggtggaagatcgatgcttccagctgtgcctctgctgccagccaagtcttcatttggggccaaaggggaaacttttttttggagaaggcgtcttgctttgtcacccacgctggaatgcagtggcgggatctcagctcaccgcaacctccacctcctgggttcaagtgattttcctgcctcagcctcccaagtagctgggaatacaggcacgccaccatgcccagctaatttttgtattttcagtagaaacgggatttcaccacgttggccaggctggtctcgaactcctgaccgcaagtgatccacccgcctccgcctcccaaagtgctgggattacaggcgtgggccaccgcgcccagccagaagcgggaagtgaggagcgtctctgcctggccacccatcgtctgggatgtgaggagcccctctgcctggctgcccagtctggaaagtgaggagcgtctctgcccggccgccatcccatctaggaa

SEQ ID NO: 6190 - DNA, 386 bp, Homo sapiens
  SIMILAR (187)..(116): 601254mologous to cercopithicine herpesvirus 15 EBNA2-like protein,accession number AF200187,Smith-Waterman Score=86.
actcaggagcccagatggcttcacctcgtggatcccgcaccggggctgcagatagatggagctgcctgccagtcccgcgttgttcgcccgcactcctcagcccttgggtggtcgatgggactgggcgccatggagcagggggtggcgctcgtcaaggaggctcgggccgcacaggagcccacggagggggtcggaggctcaggcatggcgggctgcaggtcccgagccctgccccgcgggaaggcagctaaggcccgtaaatatagaatggctgtttgctttaattctaacacatacttttggcacattccaggttcttgcttagacttctcaggctctaatttgaaaccccagagtcctttacccagactgatctggggcctatg

SEQ ID NO: 6191 - DNA, 543 bp, Homo sapiens
  SIMILAR (246)..(341): 661254mologous to Homo sapiens Human secreted protein, SEQ ID NO: 6536,accession number G02455,Smith-Waterman Score=104.
atgcggccgtccggagggcgggcggaagggcggtgcaggcggtggccggcgcgctcggccgcggtagctcgatcccgggctcgccgcccccgcaccagcagagctgccgccgaccagccgctgccgcccccgggaagggaacccgcttataaggcggcgctgcccgacgggaggggcttcccagggggcctgctctcccttctacatcttacctatgggacactgttcaccacagttcactggacagaaaggaaagaaaagagaaaagaaaagaggaaaggaaggaaggaagaaagaaaggaaggaaagaaggaaggaaaagaaaaaggaagggagggagggcaggccagcccgagcctccccgacgagcgccgccccctgtccacggcgcccagtcccatcgaccacccaagggctgaggaatgcgagcgcacagcgcgggactggcaggcagctccacctgcagtctcggtgcgggatccactaggtgaagccagctgggctcctgagtctggtggggacgtggagagtctttatatctag

SEQ ID NO: 6192 - DNA, 457 bp, Homo sapiens
  SIMILAR (382)..(456): 641254mologous to Homo sapiens hypothetical protein,accession number AL162044,Smith-Waterman Score=83.
cattcttgatggataaacttaatactgccagtacatacacaaggatgataaagcggtttctcaggtgttccttctgaccgacacactctacatatgtccgggctgcaggtggagctgcctgccagtcccgcgccatgcgctggcactcctcagcccttgggtggtcgatgggactgggcgccgtggagcagagggtggtgctcgtcggggaggctcgggccgcacaggagcccatggagtgggtgggaggctcaggcatggcgggctgcaggtcccgagccctgcccagcgggaaggcagctaaggcccggcaagaaatcgagcacagcgccggtgggccggcactgctgggggacccagtacaccctctgcagccgctggcccgggtgccaagtctctcactgcctgggccggcagggccggccggctgctccgagtgcaggcccaccaagcccat

SEQ ID NO: 6193 - DNA, 942 bp, Homo sapiens
  SIMILAR (819)..(538): 311254mologous to Plasmodium falciparum merozoite surface protein 2,accession number AF217014,Smith-Waterman Score=95.
tcagggacagtcccgcccacatttgtgaggacagtcattcaggcacaaggggctcgtacagtcattcagcaatcgttgattgggagcctctatatattcagacactgtgttaggtgccaggggattgagtctgtctttgtcatcattatttggagcagagtagggtatgatgagaaaggcttctgcctcttcacatctgtcttgggagtttgggggcatgtgagaaccaaaccatgtctcctgattacctggagaaccctgaagtctagaagtggcctggagtagcctgccggcttcagctctagcccaggtaccagcccccaaatcataagaaagcaaaagcgcggggtccctcaacaccccgtctgcgatctgccgggacgcttccggccgcgggctggcacgcccttggctgcgcaaatccaagtgcctggcctgccaccttgtggacaccaggagtaaaaccgccggtgggctggctccagtgccctctgcccaccttatctctgtgcgcgagcgggaaccggggctgtgtgccgtgcttgtgagccagctggagttccgggtgggcgtgggcttggtgggccccacactcggagcacgccgcgagccctgctggccccaggcaatgggggacttagcacccgagccagtggcggcactgcgcttgatttctcgccgggccttacctgccttcccatggggcagggctcgggacctgcagcccgccatgcctgagcctcccacccactccatgggctcctgtgcgcccgagcctccccgatgagcaccaccccctgctccacggcacccagtcccatcgaccacccaagggctgaggaatgtgcgcacggcgcaggactggcaggcagctccacctgcagccccggtgtgggatccactaggtgaagccagctgggctcctgagtctggtggggacat

SEQ ID NO: 6194 - DNA, 444 bp, Homo sapiens
  SIMILAR (46)..(258): 641254mologous to Homo sapiens hypothetical protein,accession number AL162044,Smith-Waterman Score=229.
ctagacataaggactctccacctccccaccagactcaggagcccagctggcttcacccagtggatcccgcaccagggctgcaggtggagctgcctgccagtcacgcgccgtgtgctcgcactcctcagcccttgggtggtcgatgggactgggcgccgtggagcagggggtggtgctcgttggggaggctcgggccgcacaggagcccatggagtgggtgggaggctcaggcatagcaggctgcaggtcccgagccctgccctcctcttcaaatactactactgtgatatatttaaataaggagatccgttcaagaatttccttcattggtttggatttggatttctttgccatggaacatattccaaccacaatctgcctttctggtggtccagtctgccaccctgtgaagaaggtgcctgcttctcctttaccttctgccat

SEQ ID NO: 6195 - DNA, 1608 bp, Homo sapiens
  SIMILAR (1117)..(1581): 1001254mologous to Homo sapiens sperm protein 10,accession number M82968,Smith-Waterman Score=809.
atggaagatgaaatgaatgaaatgaagcatgaagagaagtttagagaaaaaagaataaaaagaaatgaacaaagcctccaagaaatatgggactatgtgaaaagacaaaatctacgtctaattggtgtacctgaaagtgacggggagaatggaaccaagttggaaaacactctgcaggatattatccaggagaacttccccaatctagcaaggcaggccaacattcaaattcaggaaatacagagaacaccacaaagataccccttgagaagagcaactccaagacacataattgtcagattcaccaaaattgaaatgaagaaaaaaatgttaagggcagccagagagaaagcctccccgacgagcaccaccccctgctccagggcgcccagtcccatcgaccacccaagggctgaggaatgcgagcgcacggcatgggactggcaggcagctccacctgcagccccggtgcgggatccactaggtgaagccagctgggctcctgagtctgggctaggagagagccaaagcctgggaaagctggcctttcagtggcagcctgcttccaggacctccttcctgaggacgatggacaagctattggcactgagtgtggctctgctcttcctcctgggcgatgagtcctggaagttgctgcctgaacagggttttaacagtggaggcccccgcatggtctgggaagatggcactcgctcctgtgccctgagctctgaggttgtgagggccagtcagcacaaacttgagaggccttctggtgcccgtgtaggcttcaccagcctccaggaagggatagttcatgcagaatggaccagtggtctgggcctgcggaggtcaggaaaggatttctgctatataaactgcgagaggctaatggaatgggagctcctctctgaagcttgtccagatttctccgaatttcagtccaaggaacatcagcatcacattctgcgggaacaagggccaaaatgcctcattatgggaacatcttcccaggcagcaagccatactgcccagacccgtcctgctcatacctacaagtaccccaacctgtacgaagcagtgggcactggcattaagctagtcccccacctctatcatcaaacttcagttcagcaacttccaggtgagttcttttcacttgaaaacccttctgatgctgaggctttatatgagacttcttcaggcctgaacactttaagtgagcatggttccagtgagcatggttcaagcaagcacactgtggccgagcacacttctggagaacatgctgagagtgagcatgcttcaggtgagcccgctgcgactgaacatgctgaaggtgagcatactgtaggtgagcagccttcaggagaacagccttcaggtgaacacctctccggagaacagcctttgagtgagcttgagtcaggtgaacagccttcagatgaacagccttcaggtgaacatggctccggtgaacagccttctggtgagcaggcctcgggtgaacagccttcaggtgagcacgcttcaggggaacaggcttcaggtgcaccaatttcaagcacatctacaggtacaagtgtgcagtacgtagaaaactactag

SEQ ID NO: 6196 - DNA, 1083 bp, Homo sapiens
  SIMILAR (588)..(475): 461254mologous to Homo sapiens Human secreted protein, SEQ ID NO: 7115,accession number G03034,Smith-Waterman Score=69.
atggagaaacaactgaaccttgaggactctcagcagataaaccagatgaagtggataaagactcgctgtgtggagaaggcagggcagcccacgcagaaaggtgggaggcaagtagacagaggaggtggtagagcggtgatggagtgtgagcatctagataaaaagctgcagtcagcttcccaaaaatcagggaaaataataaccggaaataataaagtagaatgcaagaacaaaccagcaatcctgagaggacccacagaccctctgaaggaagcagactgctactgcaggacccgggagacacctcaaatatactctgggaggcggaaagcgtcggcaagttttcaagcccgtctagccctctgcctggaaacagactcagggctgttttggtggggcaccgtgggagagggggcaggtgtttcttgggaaaacaacaacaacaacaacattatttctcaggccccagcaatggaaaccacatgccaaaataagaaccatccgatcaggagtgtagtggcactgcttccaagtggagctgcaaccttaggagtgaagctgcagaccttcgcagtgagtgttgcagctcttaaggtgtcgcctctggagttgttcgttcctcccggtgggctcgtggtctcgctggcttcaagagtgaagctgcagaccttcgcagtgagtgttacagctcataaaagcagtgtggacccaaagagtggagctgcctgccagtcccgtgccatgcgctcgcactcctcagcccttgggtggtcgatgggactgggcgccgtggagcagggggcggcgctcgtcggggaggctcgggctgcacaggaacccacggagataaacagcaagggacagaagaagtctcagatccattgtgaactggtccccaaaggatcaagaaagctggccaaagtggataaggtcttgactgtgggtgggacccccaaagggcagcacacccctgattatatacttcaggaaccatgtgacttatcaagtgaagctttgaaggacatcctgcttctagaggaagaaggaacaaagaccaggctgtcccagagagttcctccctaa

SEQ ID NO: 6197 - DNA, 1499 bp, Homo sapiens
  SIMILAR (826)..(671): 611254mologous to Homo sapiens Human secreted protein, SEQ ID NO: 7083,accession number G03002,Smith-Waterman Score=144.
agacaaaggagacatgttttatccgtggacccaaaactccggtgccggtcacggactgggaaggcagccttcccttggtgtttaatcactgcagggacacctctgtgattattcacccacgtttcaaaggtgtcagaccacgcagggacgcctgccttggtccttcacccttagcggcaagtcctgcttttctggggaaggggcaagccgagctaggtcccaattcttcctcagcctctgctcctccaccctataatctttttatcgcctcccctcctcacacctggtccggcttacagtttcgttcggtgactagccctcccccacctgcccagcaatttactcttaaaaaggtggctggagccaaaggcatagtcaagcggctgaagactgacactgcccgatcgccttggaagacccctagaccatcacggacgccgagcttcagaaaagcagaacggactaaaggtcttttaaaaatacacctcaccaagctcagccaccaacttaaaaaggactggacaatacttttaccactttcccttctcagaattcaggcctgtcctcggaatgctacaagactggctactggccaattgggatatccttttatcagtcaaagctatgtcctggtcaatggatttcaaactgttgaggatctatgtgaagctgcagaccttcgagtgagtgttgcagaccttcgagtgagtgttacagctcttaaggtggcgcgtctggagttgttcgttcctcccggtgggctcgtggtctcgctggcttcagcagtgaagctgcagaccttcgcggtgttacagctcataaaagcaaaaagatgggactggggcaccttggagcagggggcggcgctcatcggggaggctcgggacgcacaggagcccacggagggggtgggaggctcaggcatggcgggctgcaggtccagagacctgccccgcgggaaggcagctaaggcccggcgagaaatcgagcgcagcgccgggctgacgatcaagaaggaaagatgcatacgaaatggatacagcaaagaaaaaatgaaactcatagttgtttctcatggcctccatgtaaatgacttgcagcataaactgacgcttttcaccaaggaaacatacacatacctagccagggattcagagaagcagaagcaggggtatctagcaggacttgaaggagcccatgccaacagggtgaaccagcagatcagtgacaacttagccatagtctttggacaaaagattcaaggccatctctccactactggacagctgcttatggcaggtcaagaaggaaagctgggccagcttcttttcctgggaatttcgggttggacaattcaactgaatgatgtttattgtctacagacacaatcaacaattgtccacataagatcagaagcagggaattccaatccacgagaatggctgccgcttttacaaggaatcagcagtaaagatgaaacacagccctttatgccttag

SEQ ID NO: 6198 - DNA, 390 bp, Homo sapiens
  SIMILAR (244)..(170): 481254mologous to Mycobacterium avium subsp. paratuberculosis fibronectin-attachment protein FAP-P,accession number AY007557,Smith-Waterman Score=53.
atggcgccaacatctgctgctggtgagggcttcaggaagcttccactcatggtagaagactcaggagcccagctggcttcacctagtggatcccacaacggggctgcaggtggagctgcctgccagtcctgcaccgttcgctcgcatacctcagcccttgggtggtcgatgggactgggcgccgtggagcagggggtggtgctcgtcggggaggctcgggcagcacaggagcccatggagtgggtgactagtgatgatgtgtcctgtacaattaagaaatccaagtatgacagcgacctacctcccagacctgggattactgtagcaacactactagtgatcaaatacattgtccaagcagatgtgaaaagagactcctaccagttctga

SEQ ID NO: 6199 - DNA, 363 bp, Homo sapiens
  SIMILAR (239)..(9): 291254mologous to Homo sapiens Human secreted protein sequence SEQ ID NO:240,accession number Y87201,Smith-Waterman Score =88.
ttattcacagtcatcacccacattaggcacagagtcaggagcccagctggcttcacccagtggatcccgcaccggggctgcaggtggagctgcctgccagtcctgcgccgtgcgctcgcgttcctcagcccttgggtggtcgatgggactgggtgccgtggagcagggggtggtgctcgtcggggaggctcgggccacacaggagcccatggagtgagtgggagactcaggcatggcgggcttcaggtcccgagccatgggctggttgtctcttctaccccagatcctatatgtcatcttcttgcccactccacaccatccactctgacctctttgctgttcttcaaggacgcacaaagtcat

SEQ ID NO: 6200 - DNA, 1513 bp, Homo sapiens
  SIMILAR (1133)..(1378): 981254mologous to Homo sapiens cell recognition molecule Caspr2,accession number AF193613,Smith-Waterman Score=432.
ctaaatgagaaaagctaaattcaagcgagttatgcaaacgaggcgtttggcaacttttacttgcatgcttatggttttctggggaaattcaaatgcgggctccggagccgcagccctgagcgtcccgggggtggccatggcgccaccttggcctcccaaagtgctggaattacaggtgtgagccaccgcccctggcttgggcagctgatttttaaaccatttgatgaagtgactttctttaaaggaaacatacttagcatcgccaccacagtcccatagctcgaattcacagcccgtgcctttgttgttgctggtaacatgcgggttctcaaattctaggatcctcactccttgggttgggctgtattcagtgatgtcagaagattctgtcagaaagttggccaaaacagtttttccactctgtgaaaatgagtgcaaataaaggtctttgcttgggccttcggggctcattaacaccgggctcgcctccactacctcctccgggcagtggttggaatcaaggtctccagaatagggggcagcgggcgagagattccccagcggcgttgcaggagcccacgtggagcccacgtggagcccacgggcttccttgccctgagcagctgcagctgcagcccctgccaccccgagagtccagccccgagggcagctcctgccttgcctgcggttaccgccgccgccagacaaagacaggcttcctttatcatctccagagcctggtttgtggtgtgcaattagcatacactgtgtgtcctgtaaggacggctgttggacaaagcaggaataccacatctccatttccttccggtggcttgggatgtcagcattgaagacgatcaccactccatgagcatccttcatcagggccggccagcaggactcaaaccgagccttagctgccttcccgcggggcagggctcgggacctgcagcccgctatgcctgagcctcccacccactccatgggctcctgtgcggcccgagcctccccgacgagcgccaccccctgctccacagcgcccagtcccatcgaccacccaagggctgaggaatgcgagcgcacggtgcaggactggcgggcagctccacctgcagccccagtgcgggatccactagaaacagggaaaattgaccaagagattcacaaatacaacaccccaggattcactggttgcctctccagagtccagttcaaccagatcgcccctctcaaggccgccttgaggcagacaaacgcctcggctcacgtccacatccagggcgagctggtggagtccaactgcggggcctcgccgctgaccctctcccccatgtcgtccgccaccgacccctggcacctggatcacctggattcagcggtgtttgcagaacagcggtttttcgtgaactgcgaatgctgccatctgatcgttcctctggaagttttgtctcagaggagtacccggccgtgtgaagtgtcagtctgcccctactggggggtgcctcccagttag

SEQ ID NO: 6201 - DNA, 489 bp, Homo sapiens
  SIMILAR (290)..(472): 541254mologous to Homo sapiens Human secreted protein, SEQ ID NO: 7678,accession number G03597,Smith-Waterman Score=118.
ctcctggtgagaggtgacagcgtgctggcagtcctcacagcccccgctccctctcggagcctcttctgcctgggctcccactttggcggcacttgaggagcccttcagtccaccactgcactgtgggagcccctttctgggctggccaaggccggagcccactccctcagcggcgctgcgctcgatttctcgccgggccttagctgccttcccgtggggcaaggctcgggacctgcagcccgccatgcgtgagcctcccacccgctccgtgggctcctgtgcggcccgagcctcctcgacgagcgccaccccctgctccacagcgcccagtcccatcgaccacccaagggctgaggagtgcgggcgcacggcgcgggactggcaggcaactccacctgcagctgcgagggtccgcggcttcattcttgaagtcagtgagaccaagaacccaccaattccggacacattagcatctgcattccagaagac

SEQ ID NO: 6202 - DNA, 826 bp, Homo sapiens
  SIMILAR (458)..(556): 521254mologous to Nicotiana tabacum Pistil extensin like protein, partial CDS only,accession number Z14014,Smith-Waterman Score=84.
atgactgtatttgaagataaggcctttggaaggataggagccagaagcgctggtgcaagtcaagccttcatcgacattttgaccacacacgtaatgggtttttcagctggaagtctgacgatccagccagccagtgcttctcagcccccttgcagtaagaagcagccagtgggagctcagatgaggcaggaatctagctcccgtaggcctgacagtacctcaggcagcgattcgcgaagggccatctgcagatttttgagggtccctgaatccaatttaggaaggtatgaagtcaaaactcttcgtaacaatagtaagacgtttgcctttgtcactgtgttgatatttgtactgatgcccttggctgcaagtaaggcaggggctgtcgagttggcagctgagtgtgcagctaagaagaaaaggagaacgggctctgagagggctcgggacctgcagtctgccatgcctgagcctcccacccactccatgggctcctgtgtggcccgagcctccccgacgagctccaccccctgctccacggcgcccagtcccatcgaccacccaagggctgaggaatgcgagcgcatggcgcaggactggcaggcagctccacctgcagccccggtgcgggatccactaggtgaagccagctgggctcctgagtctgttaagatgtttgtcatgctgcattgtaataaccctttcacctgtctgtctcctctgatcaactgtgagccttttctcaagtgcctaacacattgcaaggaattagcaaatgcttgtttcctctccttcgtgctccctgcaagcacagtccacgagacag

SEQ ID NO: 6203 - DNA, 510 bp, Homo sapiens
  SIMILAR (264)..(163): 521254mologous to Daucus carota glycine rich protein (AA 1 - 96),accession number X15706,Smith-Waterman Score=96.
atgccccaaaggcagctcctggaccagtggattgaaatggatgtatcattatatgacaaatcgcctttgaacgtgcctggagatctgactgtcagcaaagatcatgtcagggcactgaagtacttctttggcttctttaaaacacaggctcgggacctgcggcccgccgtgcctgagcctcccaccccctcggtgggctcctgtgcggcccgagcctcccggatgagcgccgccccctgctccacggtgcctagtcccatcgaccacccaagggctgaggagtgcgagtgcatggcgcgggactggcaggcagctccacctgcagccccaaattcctatgatgcatatgttggtacacttgatggtgtcctacagatccctgggactctgttcattttcttcattctttttttcgttctgctccttagactgaataattttgatggccttaaatttaagttcacggatcctttcttcttcttgctcaagtctgctgtcgaatacctctag

SEQ ID NO: 6204 - DNA, 470 bp, Homo sapiens
  SIMILAR (71)..(319): 391254mologous to Bos taurus SCO-spondin,accession number AJ132106,Smith-Waterman Score=115.
atgaagccacggaccctcgcggtgagtgttacagctcttaaaagcagcgtggacccaaacaactcaggagcccagctagcttcacccagtggatcccgcaccagggctgcaggtggagctgcctgccagtcccgtgccgtgcgctcgcactcctcagcccttgggtggtcgatgggactgggcgccgtggagcagggggtggtgctccttggggaggctcgggccgcacaggagcccatggagtgggtgggaggctcaggcatggcgggctacaggtcccgagccctgccccgcgggaaggcagctaaggcccggccaacaccctttggtcacatgaataaaagtcaagccctttctttgctcattgctcagcctctgggtattaatctgctgagctggtggccacctaaatacaatcgtcctgttcccctcattggtctctccggtctcctgattccagccacattttg

SEQ ID NO: 6205 - DNA, 991 bp, Homo sapiens
  SIMILAR (726)..(628): 421254mologous to Sus scrofa myosin light chain kinase,accession number AF222917,Smith-Waterman Score=67.
taggacctgtatcctcatcacctaagctggcagagcagaaatgcagcaagaaagagaaagtcatgaagaggccaaagacccatccccgctatctcctagggaaggttctcaaaagcagcaacaaaatgttaatacttccacaccttcccattgcccgaggctcccctacgaatgccgccccctgctccacggcgcccagtcccatcgaccacccaagggctgaggaatgcgagcgcaaggcacagcactggcaggcagctccacctgcagccccagtgcgggatccactaggtgaagccagctgggctcctgagtctggtggggacgtggagagtctttatatctagctcagggattgtaaatacaccaatcggcactctgtatctagctcaaggtttgtaaacacaccaatcagcaccctgtgtttagctcaaggtttgtgagtgcaccaatcgacactctgtatctagctgctctggtggggcctcggagaacctttatatctagctcagggattgtaaatacacccatcggcactgtgtatctagctcaaggtttataaacacaccaatcaacaccctgtgtctagctcagggtttgtgagtgcaccaatcaacactctgtatctagctgctctgggtggggggccttgggagaacttttgtgttcaatactctgtatgtaactaatctgatggggactgtggagaacctttgtatctagctcagggattgtaaatgtaccaatcagcaccctgtcaaaacaggccacttcggctctaccaatcagcaggatgtggggtggggccagattaagagaataaaagcagggctgccggagccagccagtggcaacccgctggggtccccttccacagtgtggaagctttgttctttcattctttgcaataaatcttgctgctgctcactctttgggtccacgctgcttttatgagctgtaacactcaccgcgaaggtctgcagcttctctc

SEQ ID NO: 6206 - DNA, 2992 bp, Homo sapiens
  SIMILAR (1431)..(1520): 731254mologous to Homo sapiens putative p150,accession number U93563,Smith-Waterman Score=118.
ttacatcaagcatattacatgagctgctggtaaacagtacagacaatcatggcctacagctgagcagatgctgatgctgatgctgatgctgatgctgatgctggattcttggttcaaggagcagagaaaaggaaaactaaaagctccccgcacactagcactgttgtcaaggaacgtgatcactactgtctttgctccatggagctgaacgcctgaggtatggcctgctgacattccagtggcaaatcctgcccctcgtcctgttgccttttcctgctggctcagcagtatgccatctccacctggatacctgatggcctcgtactgctctacacccaaaatgttcaaagtaggatcaccattcaaaacagatcttccctcaacacccccacttctatcgtgaatgccacaattcttctcccctgcctgggctcccactttggtggcatttgaggagcccttcagcctcccccctgcactgtgggagcccctttctgggctggccaaggctggagcccactccctcagcttgcagggaggtgtggagggagaggcacgagcgggaaccggggctgcgtgcggcgcttgcgggccagctggagttccgggtgggcttgggcttggtgggccccgcactcggagcagccggctggcccgccccaccggccccgggcaatgaggggcttagcacccgggccagcagctgcagagggtatactgggtcccccagcagtggctggcccaccagtgctgcgctcgatttcttgccagggccttagctgccttcccatggggcaggactcgggacctgcagcccgccatgcctgagcctcccaccccctccattgggctcctgtgctgccggagcctccccgaacgagcgccgccccctgctccacggcgcccagtcccatcgaccgggaaggaacaaacaacccaagggctgaggaatgcgagcgcacggcaccgggactggcaggcagctacacctgcagtcccggtgcgggatccactgggtgaagccagctgggctcctgagtctggaactaacatttccattacacctggaaatgccacatttgtgacccgggtgcagggacaggcttggtttgcctcatgtatcactggtcatgatatgtctagtttaaaaacttccagtgtcgtggtattaaggagacaatctgaggcacttctaccagccaatttgacatgcaattggcaagattcttctgcccttgccaccttagaaagtgccctgtcccaggtcagacacaaaagattcacatttacacttatggtctttacaggctcagccatagacattatggcaactgttagcattgctgttgtatctattactgaatcagtacaaacaactgcttttgtagataatctggccaaaaatatatgtgatgaacttctcctacaggacatggatgaagctggaaaccaacattctcagcaaaataacacaagaacagaaaaccaaacaccacatgttctcactcataagtgggagttgaacaatgagaacatacggatacagggaggggaacattacatactggggcctgttggtggcaggttgccaacatccaaactcgctgttgattgccagctcctgctccttgcagcagcccagcatgctctctgctggtgccaaaatacccttccaccaaaccccgctaacttctggaactgtcctagagggtttcctaccctagcaagtgagcttgcctatgtcagccctaaccttgctcttgtcattcagctgagccagaggaaaaaatttgagctattctggggtggtctacagagaaccatcttctttcccttcagtgttctcagaatattgactgttgatgaacaagccaatgatgtgagtgtggctgcagcaaggacccttcaaattttcagagatgacatgattgtatatctagaaaaccccattgtctcagcccaaaatctccttaagctgataagcaacttcagcaaaatctcaggatacaaaatcaatgtacaaaaatcacaagcattcttatacaccaacaacagacaaacagagagccaaatcatgagtgaactcccattcacaactgcttcaaagagaataaaatacctaggaatccaacttacaagggatgtgaaggacctcttcaaggagaactacaaatcactgctcaaggaaataaaagaggatacaaacaaatggaagaacattccatgctcatgggtaggaaaaatcaatatcgtgaaaatggccatactgcccaaggtaatttacagattcagtgccatccccatcaagctaccaatgactttcttcacagaattggaaaaaactactttaaagttcatatggaaccaaaaaagagcccacactgccaagtcaatcctaagtcaaaagaacaaagctggaggcatcacactacctgacttcaaactatactacaaggctacagtaaccaaaacagcatggtactggtaccaaaacagagatatagatcaatggaacagaacagagccctcagaaataacgctgcttatctacaactatctgatctttgacaaacctgagaaaaacaagcaatggggaaaggattccctatttaataaatggtgctgggaaaactggctagccatatgtaggaagctgaaactggatcccttccttataccttatacaaaaatcaattcaagatggattaaagacttaaatgttagacctaaaaccataaaaaccctagaagaaaacctaggcattaccattcaggacataggcatgggcaaggacttcttgtctaaaacaccaaaagcaatggcaacaaaagacaaaattgacaaatgggatctgattaaactaaagagcttctgcacagccaaagaaactaccatcagagtgaacaggcaacctacaaaatgggaaaaaattttcgcaacctactcatgtgaaaaagggctaatatccagaatctacaatgaactcaaataa

SEQ ID NO: 6207 - DNA, 604 bp, Homo sapiens
  SIMILAR (2)..(538): 721254mologous to Mus musculus phosphoprotein p85,accession number M60651,Smith-Waterman Score=644.
ggaagaagtgaatgaacagcttcgagatacagcagacgggacctttttggtacgagatgcgtctactaaaatgcatggtgattatactcttacactaaggaaagggggaaatgtcaaattaatcaaaatatttcatcgagatgggaaatatggcttctctgacccattaaccttcagttctgtggttgaattaataaaccacgaccggaatgaatctctagctcagtataatcccaaattggatgtgaaattactttatccagtatccaaataccaacaggatcaagttgtcaaagaagataatattgaagctgtagggaaaaaattacatgaatataacactcagtttcaagaaaaaagtcgagaatatgatagattatatattctacaacaaaggataaaagtaaaagatgttacattccttctaagtgtgttttcttgcatctacctacggaccattatcattgacattttccagtcttctctctctcacatccaggcagcaactggaaggtttcagagaaaaggaagacaaaggctaaccagcaacagcaactgtagggactgcagcataaatacgacaaggaagagaggagccaaatag

SEQ ID NO: 6208 - DNA, 522 bp, Homo sapiens
  SIMILAR (154)..(363): 911254mologous to Mus musculus putative transcription factor,accession number AF091234,Smith-Waterman Score=316.
atggaccgtgcctcctttgtagataagctgattgagtgtcatcacgtgggcttgggtccacctgatgccgtggttccttccctctctcacacgcgccttaaacagagagtagtcagtcagggaggacccgaaggagtgtccttctgtctgctgtcattcctgtattccatcaaccagacaatctgcttgcggttggatagcattgaagccaaattgcaagccctggaggctacttgtaaatccttagaagaaaagctggatctggtcacgaacaagcagcacagccccatccaggttcccatggttgccggctcccctctcaggacaacccagatgtgcaacaaagtgcgatggttccctggcctggctgtagccttctgcccgtggtgcctctttgagctctcgggcatgccggaagttttggaaacgctacccggccgtcttccgagctccgctgctggtggtggagttggcatctcagttcgcatgcgggagctggggatcgttcacgtgttactctga

SEQ ID NO: 6209 - DNA, 432 bp, Homo sapiens
  SIMILAR (10)..(159): 561254mologous to Drosophila melanogaster rhophilin,accession number AF132025,Smith-Waterman Score=137.
gctcgaccggggttccggtcagccagcagaacctgcctgctggagaaggccagtgtcctgttcaacactggggccctctacacccagattgggacccggtgtgatcggcagacgcaggctgggctggagagtgccatagatgcctttcagagagccgcagatatgtctcctccagggctgaccagacggagccttggccccacccggtggcaccaggggaccccccactgaagagaatctacaggtcatccctcgcaagggccagaccagtctccagctctggtgtaacttcccattaagaaacttgctccggccgggcgcggtggctcacgcctgtaatcccagcacttcgggagaccaaagcgggtggatcacaaggtcaggagatcgaggccagactgcatctcagaaaaaaaaagaaaaaagtcgacg

SEQ ID NO: 6210 - DNA, 966 bp, Homo sapiens
  SIMILAR (836)..(859): 751254mologous to Mus musculus rhophilin,accession number U43194,Smith-Waterman Score=40.
atggctgcgctatggaatacctgtggagcttggaaaaacatgcttatacctgagtgccactctcagcttctgagagtggccgcaaacccaaaggtgcgggagcaagtgcggctggagctgagcttcgtcaactcagacctgcagatgctcaaggaagagctggaggggctgaacatctcagtgggcgtctatcagaacacagatgaagatggctatttatatgaagatgaaatcacagatcttatggatctgagacaagcttgtcggacgcccagccgggatgaggccagggtggaactgctgatgacatacttcatccagctgggctttgttgagaatcgattattcccacccacatggcagatgggattcctgttcacctggtatgactccctcactggggttctggtcagccagcagaacctgctgctggagaaggccagtgtcctgttcaacactggggtcctctacacccagattgggacccggcgctatcggcacacgcaggctgggctgcagagtgccatagatgcctttcagagagctgcaggggttttaaactacctgaaagagacatttacccataatccaagttacgatatgatccctgccatgctcagcgtgcttgtcaaaatgatgcttgcacaaacccaagaaagcgtgtttgagaaaatcagccttcctgggatctggaatgaattcttcatgctggtgaaggtggctcaggaggctgccaaggtgggagaggtctgccgacagctgcacgcagccatgagccaggtgctggtgaaagagaacatcccctactcctgggccagcttggcctgcgtgaaggcccaccactatgcggccctggcccactacttcactgccatcctcctcatcgaccaccagggtaaggcctgtggggttcgggggtttggccagggctgtggtccagctgccccaggggcgattctgagctga

SEQ ID NO: 6211 - DNA, 1330 bp, Homo sapiens
  SIMILAR (4)..(372): 591254mologous to Drosophila melanogaster rhophilin,accession number AF132025,Smith-Waterman Score=380.
atggattttatcctggaacattacagtgaagatggctatttatatgaagatgaaattgcagatcttatggatctgagacaagcttgtcggacgcctagccgggatgaggccggggtggaactgctgatgacatacttcatccagctgggctttgtcgagagtcgattcttcccgcccacacggcagatgggactcctgttcacctggtatgactctctcaccggggttccggtcagccagcagaacctgctgctggagaaggccagtgtcctgttcaacactggggccctctacacccagattgggacccggtgtgatcggcagacgcaggctgggctggagagtgccatagatgcctttcagagagccgcagagccccacgcgcggcgggcgagcatctacttacgaaatgactcctgcggcctctccgaaatcccaggagcatccttgcagcgcgaggagaatggaccggggcctggactcatcagcagatctatccacagccagggaccactccctaaagcccgccgcaggcccagccctcacgctttctcttcgcaatggactttgcagcaaccacgtcggccattggctcagctcggccctcgaccaatcagagctaaggttacttccacaccggtcgttcttggcaaccagtggcataataagagtgccacatactccgtgggaatgcagaaaacgtactccatgatctgcttagccattgatgatgacgacaaaactgataaaaccaagaaaatctccaagaagctttccttcctgagttggggcaccaacaagaacagacagaagtcagccagcaccttgtgcctcccatcggtcggggctgcacggcctcaggtcaagaagaagctgccctccccctttcagctttctcaactcagacagttcttggtactaatgtgaggaaacaaacatgttcaagcccccgaacatttccggtgctgactcggccttaaacgtttgtgccataatggaaaatatctatctatctgttctcaacatcctgtttttctcatagcgtaaactcacatttgatgtgtttttatgaaggaaagtaaccaagaaacctctaggaattaccgaaaaaagaacttttttgaggtgtgttactatactgctgtaagttatttattatataaagtattgtaaatagaatagcgttgaagatatgaaatatggctatttttaatggtgacaattatgacttttagtcactattaaattggggttacctatatcagtacaatttgtagttgtttccaggtttggctaataatcattccttaacctagaattcagatgatcg

SEQ ID NO: 6212 - DNA, 397 bp, Homo sapiens
  SIMILAR (133)..(396): 431254mologous to Murine leukemia virus reverse transcriptase,accession number AF003736,Smith-Waterman Score=183.
ctagatggagtttctaagggttggcccccatgcttaagagccttggcagcaactgtcctgctaggacaagaggcagataagctaactcttgggcaaaacctaaacataaaggcccccccatgctgtgtgtcagagagcccagttgaacataactgtgtagaggtgttggactcagtttattctagcaggcccgacttccgagaccatccttggatgtcactagactgggagctgtacgtggacgggagcaactttgtcaactcacaaggagagaggtgtgtgggatatgcagtggtaaccctggatgctgtcattgaagccaaatcgttgccccagggcacttcagcccagaaggccgaactcattgctttaattcgggcctcagagctaagtgaag

SEQ ID NO: 6213 - DNA, 2628 bp, Homo sapiens
  SIMILAR (1339)..(2028): 471254mologous to Moloney murine leukemia virus Pr180,accession number AF033811,Smith-Waterman Score=545.
atggagcaggccaatcacccagtaaggcttatcaatgtggtttgcaaggacactttaaaaaagattgtccaacaagaaacaagctgccccctcacccacgtccactatgccgaggcaatcactggaaggtgcactgccccagaggacaaaggctctctggaccagaagcccccaacagatgatccaacagggtgcccatggcaagtgccagctcatgtcatcaccctcactgagacctgggtatgtttaaccattgagggccaggaaattgacttcctcctggacactggagtacaaaaaccgaatggtcagtggagactagtgcaagatcttatacccatcaaagaggcagtaattcctttatatccagttgtaccaaacccctataccctgatctctcaaataccagagaaagcagaatggttcatggctctggacctcaaggatgccttcttctgtatctccctgcactctgactcccagtttctttttgcctttgaggatcccacaaaccacacatccaaaattacacggacagtcttgccccaagggtttagggatagccctcctctgtttggtcaggcactggcccaagatctaggccacttctcaagtccaggcactctagtctttcagtatgtggatgatttaattttggctaccagttcagaagcctcatgccagcaggccactctagatctcttgaacttcctagctaatcaaggaaaggtagttcctaatctttgggggaaactcccattaaataccacaaggaaatcatggagttattgcacgcagtgcaaaaacccaaggagatggcagtcttacactgccaaagccatcaaaaagcagctggcagaggcaggtcctgtgacagccatcttgctgctactcatctttgggccctgtatttttaacctccttattaaatttgtttcctccaggattgaggccatcatgctacagatggtcttacaaatggaaccccaaatgagctcaactaacaacttctaccaaggacccctggaccgatgcactgaccctttgtctggcctagagagttcccctagatgctcagaggccccatgcctgatgagtcagtggacaggggacattgaatatgacctgcttctgccacccattccacaccaaacaactctgtgtgacctacaaaatcttaaaggcatcttttcaagatatcacagaaaatggtatggagaaatacttgcattgcttacccccaccgccaacgtatgtggacatagtcaagtaccccatgcttgctcaatctatcacgaccctgtcacgtggaaccctcagggtttattgcctaagtccctgtatggagtcacaaagtggggagataaggaacattttgaatgggggtcccaacagcaacgagctttttatgagttaaaaggaaaactcatttcggccccagccctggggctacctgacctgacaaaaccttttacactatatgtgtcagagagagaaaaaatggcagttgcagttttgacccagactgtggggccctggccgaggccagtggcctacttctctaaacaactagatggggtttctaagggttggcccccatgtttgagggccttggcagcaacagccctgctagcacgagaagtggataagctaactcttgggcaaaacctaaacataaaggccccccatgctgtggtgactttaatgaataccaaaggacaccattggctaatgaatgctagaataactagataccaaagtttgctctgtgacaaaccccatataaccattgaagtttgcaacaccctgaaccccaccaccttgctcctggtatcagagagcccagttgaacataactgtgtagaggtgttggactcagtttattctagcaggcccaacctccgagaccatccttggacatcagtagactgggagctgtatgtggacgggagcagcttcatcaacccacaaggagagagtgtatggggcattatacaaggaaaaaggcctattaaactctgggggaaaagacgtaaagtatcagcaagagatcttgcaattattggaggcagtgtggaagccccaaaactggtgcagcagtgtgtcacctactggcagcacaatgctaggcaaggtccaaatgtcctgcccggcatacaatcttatggagcagccccctttgaagatctccaagtagccctcactgagatgcccaaatgtggaggtaacaagtatttgctagttctagtgtgtgcatacgctgggtgggtggaagtctatccaacacagaccgagaaagctcatgaagtaacctgtgtgcttctccgagatctccttcctaggtttggactgcccttacaaatcagctcagacaacgggctgggatttgtggctgacttggtacagaagacagcaaagaatctcaccgacactggacagctcccactggactatactggatatgtgggcatagagcctacaccaaattacctgaccaatgggattaccctggatgttgtattaagaacagaatgtaaagaagtggaactatctcagggagaattattagtaggccactgcaataacaaagtgaagggaaatggtgacttagagcaggaagatggctga

SEQ ID NO: 6214 - DNA, 384 bp, Homo sapiens
  SIMILAR (23)..(175): 431254mologous to Human endogenous retrovirus W polyprotein,accession number AB021921,Smith-Waterman Score=109.
taaccattgaagtttgcaacacctaaaccccgccaccttcctcccggtgtcaaagagcccagttaaacataactgtgtagaggtattggactcagtttattctagtgggcctaaccaccgagaccatccttaaacatcagtagactgggagctgtacatggatgggagcagcttcaccaacccctgcaaagtgactctgaagaagacgacaagccctgctccagtcacacccggaagctgactggtccacgcacagctgaagcatgaggaaactcatcgcgggactaattttccttaaaatttagacttgcacagtaaggacttcaactgaccttcctcagactgagaactgtttccagtatatacatcaagtcactgaggtag

SEQ ID NO: 6215 - DNA, 1665 bp, Homo sapiens; identical to SEQ ID NO: 4558
  SIMILAR (364)..(1050): 461254mologous to Sus scrofa pol protein,accession number AF038600,Smith-Waterman Score=512.

SEQ ID NO: 6216 - DNA, 897 bp, Homo sapiens
  SIMILAR (635)..(844): 481254mologous to Rauscher murine leukemia virus Pol,accession number U94692,Smith-Waterman Score=180.
atggggtttcaccgtgttggtcaggctggtcttgaactcctgaccgcagctgccctggcagccgactggatggtgcccacccacaatgaggagagcccagttgaacataactgtgtagaggtgttggactcagtttattctagcaggcccgacctccgagaccatctttggacatcagtagactgggagctgtacgtggacgggagcagcttcatcaacccacaaggagagaggtgtgcgggatatgcggtggtaatcctggatgctgtcattgaagccaaatcattgccccagggcacttcagcccagaaggccgaactcattgctttaatttgggccttagagctgagtgaaggtccaaccgtcctgtctggcatacaagcttatggagaagccccctttgaagatctcaatatagacttcaccaagatgcccaaatgtggcagtaacaagtatttgctagttccagtgtgtacatactctgggtgggtggaggcctatccaacacgaaccaagaaagctcgtgttcttctccgagatctcatcgctaggtttggactgcccttatggatcggctcagaaaatgggccggcgtttgtggctgacttggtacagaagacagcaaaggtgatgagtgtggatcaaagactggaacgtagcccccttgcagccacggtggaaaggaccccagactgtcatcttgaccactcccacagctgtgaaggtagagggaatcccagcctgggtccaccacagctgcgtaaaacctgcagcaccggagacctggtaggtgagaccaagcctagacaacccctgcaaagtgactctgaagaagtcgacaagccctgctccagtcacacccggaagccgactggtccactcatggccgaagcatga

SEQ ID NO: 6217 - DNA, 258 bp, Homo sapiens
  SIMILAR (182)..(247): 541254mologous to Rattus norvegicus PR-Vbeta1,accession number X77816,Smith-Waterman Score=72.
atgaggcgggtctacacgagacccaaatcttacatggacgtggcgggtcttacgcgggccctaaatcctacgggggacgtggcagtgtgcacggccagggatgccggggaggacgtgcagagtcagggtctgacacccgctggggaccgcgtccctcacctgctccaggtggaaagagaagccatcgccgccaccggaaccgaagcctccgcgctcgggctccgcactctccccacccctgccgccgcgtcgctctag

SEQ ID NO: 6218 - DNA, 282 bp, Homo sapiens
  SIMILAR (124)..(228): 481254mologous to Homo sapiens NY-ESO-1 protein,accession number AJ003149,Smith-Waterman Score=71.
atggtcaccgggggggctttagagtcgcacccgacagggctgtcaagtctgaatctggaaaataagggtcctgtggctgcttttgcaatcctagtacactttgagaacgtcatgttccagcgtgggaacgccgaggaggaagctggtgcagcgcgacagtcgagcggctacggagggccggagggcccaagccgctgcgacgaagcggggctgggagcctgccggtgcgccccgcaaagagacattgcgcaggcgcagcgcgtcaaggctggccccacctag

SEQ ID NO: 6219 - DNA, 411 bp, Homo sapiens
  SIMILAR (16)..(147): 341254mologous to Homo sapiens KIAA1503 protein,accession number AB040936,Smith-Waterman Score=41.
gcatgtaccgggtgtttcagcacactccacagccggctcctgagtgaccagactcggctgaaggatgacgtggacatgctgaggcgggagaatgggcagctgctgcgggagcgaaacctgctgcagcagtcatgggaggacatgaagcggctccacgaggaggaccagaaggagatcggtgacctccgtgcccagcagcagcaggtaggcccagcccctggagactggccatttctcccaagtagtcctcattccttttaatggagaatagtattgagaagtaaatgctgggccgggcacgttggctcacatctgtgatcccagcgctttggaagaccaaggtgagagattgcttgagatgagcctgggcaacatggcaagatcccatctctacaaaaaaaaaaaagtcga

SEQ ID NO: 6220 - DNA, 642 bp, Homo sapiens
  SIMILAR (178)..(20): 391254mologous to Homo sapiens salivary proline-rich protein 1,accession number K02576,Smith-Waterman Score=70.
atgctggaagagccagcaagggaggttgaaatccttcgaaagcagtgcaaggctctgtgccaggagctgaaggaagccctccagaaggcggatgtggccaagggccggcgggactgggccttccaggagcgagacaagattgtagcagagcgtgacagcatccgccagggcctggaggtggccaggaagtttacctggacatctctctggctcctggaagcacaggcatacagggcctggaagcaaagcatctctgatcagctggctaaagaaaggccctaccacaggctgaatcctgactatgagaggctgaagatccagtgcgtgcgagccatgtcggacctgcagagcctgcagaaccagcacaccaacgccttgaagaggtgtgaggaggtggccaaggagactgacttctaccagccccagtatttggaggcactaggtctgtaccagaggggcctgtctcccttccctggagatacatgtgccctttttggtgtcaggtttgtaagtggtgatttggatgtttctggaattgggctgttagcaggttttggcttgcctctgagtgctacagacctacctgccattggctcctgtccgctgtatctacgggaagtgtggaacctgaggcttgagtaa

SEQ ID NO: 6221 - DNA, 1935 bp, Homo sapiens
  SIMILAR (580)..(1932): 1001254mologous to Cloning vector pBACe3.6 levansucrase,accession number U80929,Smith-Waterman Score=2385.
atggctcaagagctcaagtatggtgacatcgtagagagacacctcatcgatggagatgtggtgctgttcaatcggcagccctcgctgcacaaattgagcattatggctcatctggccagggtcaagccccaccggaccttcagatttaatgagtgtgtctgtacaccctataatgctgactttgatggtgatgaaatgaaccttcatcttcctcaaacagaagaagctaaagcagaggcccttgttctgatgggggtatgcttttcatacctggcagtgctgaccgtggccatccagacctgtttagagatgcagctttctccagcatccacccgctgctcctggtttggctgctggaggccatcaagaacaaatctaatcccttctgacagtcgtattgagagacaagacacctacccattccccagtcattctcttcagcccatgctcaacgccttcagattcttcagagtctctgaaaatgtgataatgaggctactggtcattgccggttctacctacagcgtcctgtccaccatgccctcagactcagaaagcagcagctccctcagcagtgtgggaggagcgactcaagccttcgcgaaagaaaataaccaaaaagcatacaaagaaacgtacggcgtctctcatattacacgccatgatatgctgcagatccctaaacagcagcaaaacgaaaaataccaagtgcctcaattcgatcaatcaacgattaaaaatattgagtctgcaaaaggacttgatgtgtgggacagctggccgctgcaaaacgctgacggaacagtagctgaatacaacggctatcacgttgtgtttgctcttgcgggaagcccgaaagacgctgatgacacatcaatctacatgttttatcaaaaggtcggcgacaactcaatcgacagctggaaaaacgcgggccgtgtctttaaagacagcgataagttcgacgccaacgatccgatcctgaaagatcagacgcaagaatggtccggttctgcaacctttacatctgacggaaaaatccgtttattctacactgactattccggtaaacattacggcaaacaaagcctgacaacagcgcaggtaaatgtgtcaaaatctgatgacacactcaaaatcaacggagtggaagatcacaaaacgatttttgacggagacggaaaaacatatcagaacgttcagcagtttatcgatgaaggcaattatacatccggcgacaaccatacgctgagagaccctcactacgttgaagacaaaggccataaataccttgtattcgaagccaacacgggaacagaaaacggataccaaggcgaagaatctttatttaacaaagcgtactacggcggcggcacgaacttcttccgtaaagaaagccagaagcttcagcagagcgctaaaaaacgcgatgctgagttagcgaacggcgccctcggtatcatagagttaaataatgattacacattgaaaaaagtaatgaagccgctgatcacttcaaacacggtaactgatgaaatcgagcgcgcgaatgttttcaaaatgaacggcaaatggtacttgttcactgattcacgcggttcaaaaatgacgatcgatggtattaactcaaacgatatttacatgcttggttatgtatcaaactctttaaccggcccttacaagccgctgaacaaaacagggcttgtgctgcaaatgggtcttgatccaaacgatgtgacattcacttactctcacttcgcagtgccgcaagccaaaggcaacaatgtggttatcacaagctacatgacaaacagaggcttcttcgaggataaaaaggcaacatttgcgccaagcttcttaatgaacatcaaaggcaataaaacatccgttgtcaaaaacagcatcctggagcaaggacagctgacagtcaactaa

SEQ ID NO: 6222 - DNA, 1645 bp, Homo sapiens
  SIMILAR (770)..(1534): 221254mologous to Cavia porcellus enterophilin-1,accession number AF126833,Smith-Waterman Score=150.
atggcagaagatgaggagcaccaaattaactccaaatttgatggcgaaaccccagaggtagatgacgccgacacctgcccctccgccccatggaagcaaccggccttgaaaggacaccgcttttcatacctggcagtgctgaccgtggccatccagacctgtttagagatgcagctttctccagcatccacccgctgctcctggtttggctgctggaggccatcaagaacaaatctaatcccttctgacagtcgtattgagagacaagacacctacccattccccagtcattctcttcagcccatgctcaacgccttcagattcttcagagtctctgaaaatgtgataatgaggctactggtcattgccggttctacctacagcgtcctgtccaccatgccctcagactcagaaagcagcagctccctcagcagtgtggccatgctcattggttacacagtgtctatgactgctttcctgctacaaaggccctaccacaggctgaatcctgactatgagaggctgaagatccagtgcgtgcgagccatgtcggacctgcagagcctgcagaaccagcacaccaacgccttgaagaggtgtgaggaggtggccaaggagactgacttctaccagtttgtaagtggtgatttggatgtttctggaattgggctgttagcaggttttggcttgcctctgagtgctacagacctacctgccattggctcctgtccgctgtatctacgggaagtgttgcggacctgaggctggtgatgccctgggcacactccacagccggctcctgagtgaccagactcggctgaaggatgacgtggacatgctgaggcgggagaatgggcagctgctgcgggagcgaaacctgctgcagcagtcatgggaggacatgaagcggctccacgaggaggaccagaaggagatcggtgacctccgtgcccagcagcagcaggtgttgaagcacaacgggtcatccgagattctcaacaaactgtatgacacggccatggacaagttggaggtggtcaagaaggactatgacgcccttcggaagaggtacagtgagaaagtcgccatccacaatgcagacctgagccgcctggagcagctgggggaggagaaccagcggttgctgaagcagacagagatgctgacccagcagagggacacggccatccagctgcagcaccagtgcgccctctccctgaggagctggcgggaggcagcagcgcagccggccactgaccgggcagggcccccgcccttcccacatctcgccacctctcttgccaaaaatgaggcgatcaaccatgagctgaacaaggccacggcgcagaacaaggacctgcagtgggagatggagctgctgcagtcagagctgaccgagctgagaaccacgccagcaaaggagtcggagaaatacagggaggagcgggacgctgtgtacagcgagtacaagctcatcatgagtgagcgtgaccaggtcatctctgagctggacaagctgcagaccgaagtggagctggccgagtccaagctcaagagcagcacatctgagaagaaggcggccaatgaggagatggaggcgctgcggcagctcccaggggagagatatcctcgggagctcccctaa

SEQ ID NO: 6223 - DNA, 402 bp, Homo sapiens
  SIMILAR (80)..(205): 381254mologous to Eretmocerus queenslandensis cytochrome oxidase II,accession number AF275287,Smith-Waterman Score=70.
ctctgagcacactgtcattcagcttatattgccaggacgggatatggactgaatgtacttcatggcattgcagaataaatggtcctatagatatttgattttcttttccttctgtacgtttctggatgtaactccattgcagaaccacagcattttacaacaactgtgactcgatgcagcccgaccgtggcctttgtggaatttccctccagcccccagctgaagaatgatgtgtcggaagaaaaagaccagaaggaaaccaggaaaatgaaatgagtgggaaaggtgggagttgggtgctgttcacaaaaggtgaagtgcaggagtggagggaaagcggtttaaaccccaccaagtttaacatgggcccccttatttacagctagctgctgctgtggcagt

SEQ ID NO: 6224 - DNA, 2538 bp, Homo sapiens
  SIMILAR (2191)..(2538): 441254mologous to Homo sapiens HTRM clone 1253545 protein sequence,accession number Y73349,Smith-Waterman Score=252.
cgctctcggcagacgccttcaccagatgtagtcctcaggggaagcagcgatgggagaggaagcgactctgaatccgacttgcctcatcggaagctgccagatgtgaagaaggatgacatgtctgcacggcggacttcccatggtgagccgaaatcagcagtgccttttaaccagtacctcccgaacaaaagcaatcagacggcctacgtccccgcgcctctgagaaagaagaaagcagagagagaggaataccgcaagagctggagtaccgccacctccccgctgggtggggagaggcccttcagatacggtccgagaactcctgtgtctgatgacgcagagagcaccagcatgtttgacatgcggtgtgaggaggaggccgcggtgcagccgcacagcagggcccgccaggagcagctgcagctgataaataaccagctgagggaagaggacgacaaatggcaagatgacctggctcgttggaagagtcgtagaagaagtgtttctcaggacttaatcaagaaagaggaagaaaggaaaaaaatggagaagttactggctggagaagatgggacaagtgaacgaaggaaaagcatcaaaacctacagagaaattgttcaagaaaaagagcggagagagagagagctgcatgaagcatataagaacgctcggtcccaggaggaggcagaggggatccttcaacagtacattgagaggttcaccatcagtgaggctgttctcgaacgcttggagatgccaaaaattctggaaagaagccattcaacagagccaaatttatcctccttcctgaatgaccccaatcccatgaaatacctgcggcaacagtcactgcctccacccaaattcactgccactgttgaaaccaccattgctcgtgccagtgttctggataccagcatgtcagcaggcagtgggtctccaagcaaaactgtcactcccaaagcagtgcctatgctgacacccaagccttactcccagcccaaaaattctcaagatgttctgaagacctttaaggtagacgggaaagtcagtgtgaatggagagacggttcatagagaggaggagaaggaaagagagtgtcccacggtggcacctgcccactccttaaccaaatcccagatgtttgaaggtgtggccagagtgcacgggtctccactggagctgaaacaagacaacggtagcatcgagatcaacataaagaagccaaactctgttccccaagagctcgcagcaaccactgagaaaacggaaccgaatagtcaagaggacaagaatgatggtggaaaatcaagaaaagggaatatagaacttgcctcatcagaaccacagcattttacaacaactgtgactcgatgcagcccgaccgtggcctttgtggaatttccctccagcccccagctgaagaatgatgtgtcggaagaaaaagaccagaagaaaccagaaaatgaaatgagtggaaaggtggagttggtgctgtcacaaaaggtggtaaagccaaaatctccagaacccgaagcaacgctgacatttccatttctggacaaaatgcctgaagccaaccaactacatttgccaaatctcaattctcaagtggattctccaagcagtgagaagtcacctgttacgacaccttttaagttctgggcatgggacccagaagaggagcgcaggcgacaggaaaaatggcaacaggaacaggaacgtttgctccaggagagataccagaaggagcaggacaagctgaaagaagagtgggaaaaggcccaaaaggaggtggaagaggaagaacgcagatactatgaggaggagcgtaagataattgaagacactgtggttccatttactgtttcttcaagttccgctgaccagctgtctacctcttcctccatgactgaaggcagtgggacaatgaataagatagacctgggaaactgtcaagatgaaaaacaagacagaagatggaagaaatcattccagggagatgacagtgacttattgctgaagactagggaaagtgatcgactggaggagaagggcagcctaactgaaggggccttggctcattctgggaaccctgtatcaaaaggagtccatgaagaccatcagctggataccgaggctggggccccacactgtggaacaaacccacagcttgctcaggatccatcccagaatcagcagacatcaaatccaacgcacagttcagaagatgtgaagccaaaaaccctcccgctggataaaagcattaaccatcagatcgagtctcccagtgaaaggcggaagtctataagtggaaagaagctgtgctcttcctgtgggcttcctttgggtaaaggagccgcaatgatcatcgagaccctcaatctctattttcacatccagtgtttcaggtgtggaatttgtaaaggccagcttggagatgcagtgagtgggacggatgttaggattcgaaatggtctcctgaactgtaatgattgctacatgcgatccagaagtgccgggcagcctacaacattg

SEQ ID NO: 6225 - DNA, 474 bp, Homo sapiens
  SIMILAR (413)..(3): 291254mologous to Homo sapiens CTG26 alternate open reading frame,accession number U80761,Smith-Waterman Score=87.
tcacgcctcattggcaggaaatggcagcagcagcagcataacagaaggcatggtccaggcaagaggcaggcccatttgaacgaagcctctgtaagagccaaggatgtggtaaagccaaaatctccagaacccgaagcaacgctgacatttccatttctggacaaaatgcctgaagccaaccaactacatttgccaaatctcaattctcaaggaattttgctgatcatcagtggcttcctcgctgagctgcagcacccagtacagtgcccagcaatggactggaaccaaaccagcagagcaaaaccagaaccacagcattttacaacaactgtgactcgatgcagcccgaccgtggcctttgtggaatttccctccagcccccagctgaagaatgatgtgtcggaagaaaaagaccagaagaaaccagaaaatgaaatgggttcctctagagtcgcactgcaggttgcaacctag

SEQ ID NO: 6226 - DNA, 801 bp, Homo sapiens
  SIMILAR (1)..(168): 1001254mologous to Homo sapiens Neuron-associated protein,accession number B01398,Smith-Waterman Score=298.
atgaagttccagtacaaggaggaccatccctttgagtatcggaaaaaggaaggagaaaagatccggaagaaatatccggacagggtccccgtgattgtagagaaggctccaaaagccagggtgcctgatctggacaagaggaagtacctagtgccctctgaccttactgctgccttcccgcggggcagggctcgggacctgcagcccgccatgcctgagcctcccacccactccatgggcacctgtgcggcccgagcctccccgacgagcaccaccccctgctccacggcgcccagtcccatcgaccgggaaggaacaaacaacccaagggctgaggaatgcgagcgcacggcgcgggactggcaggcagctccacctgcagccccggtgtgggatccactgggtgaagccagctgggctcccgagtctagtgggaatgtggagagtatatctagctcagggattgtaaatataccaatcagcaccctgtgtttagctcaaggtttctcaaggtttgtgaatgcaccaatcgacactctgtatctagctgctctggtggggccttggagaacctttatgtctagctcagggattgtaaatacaccaatcggcactctgtatctagctcaaggtatggtccactaccacaagtcccctttccctacctgtcttgtgcaaatgtcaaaaatagaatctctgcccaaagagaagggagcacagggagttgctgctggactgccatcatctctggccccaacttgtccacctcctgacccatctatgaaactgcacaacaattaa

SEQ ID NO: 6227 - DNA, 1449 bp, Homo sapiens
  SIMILAR (816)..(4): 571254mologous to Homo sapiens ORF2 contains a reverse transcriptase domain.; ORF2,accession number M80341,Smith-Waterman Score=834.
ctatttctttcttctgctgggtttgggtttggtttgttcttgtttctctagttccttgaggtgtgaccttagattgtctatttgtgctctttcagactttttgatgtaagcatttagggctatgaactttcctcttagcaccgcctttgctgtctcccagaggttttgataggttgtgtcactattatcatttggtttgaagaattttaaaatttccatcttgatttcattgttgacccaatgatcactcaggagcaggttatttaatttccatgtatttgtctggttttgaaggttctttttggagttgatttctagttttattccactgtggtcagggagagtacttggtataatttcaattttcttaaatttattaagacttgttttgtgtcctatcatacggtctgtcttggagaaagttccatgctctgatgaatagaatatatattcagcggttgttgggtagaatgttctgtaaatatctgttaagtccatttgttccagggtatagtttaaatccattgtttctttgttgactttctgtcttgatgacctgtttagtgctgtcagtggagtactgaaataccccactattattgtgttgctgtctgtcttatttcttaggtctagtggtaattgttttgtaaatttgggagctccagtgttaggtgcatatatatttatgattgtgatactttccttttggacaaggccttttatcattatataatgtccctctttgtcttttttaactgctcttgctttgaagtctgttttgttcggagcagccagccggccctgctggccccgggcaatgagggacttagcacccaggccagtggctgcggagggtgtgctgggtctccagcggtgccggcccactggcgctgtgctcaatttcttgtccggccttagctgccttcccgcgggtggggctcgggacctgcagcccaccatgcctgagcctcccacccactccatgggctcctgtgcggcctgagcctccccgacgagcaccaccccctgctccacggcgcccagtcccatcgaccacccaagggctgaggagtacgagcgcatggcgcgggactggcaggcagctccacctgcagccctagtgcggaatccactgggtgaagccagctgggctcctgagtcgtgagggtccgcggcttcattcttgaagtcagtgagaccaagaacccaccaattccggacacatttggactgcctcctgggtcctcctctgctgcctccaccctggtccaggtcactaggctctgaatttctgcaataagtcttcctcatttgctgtccaggccctgttccaacacggctcgcgggcccgtgccggctccggtccccggcgcggctgtccgagcccctgcggcgggcggacgatggtgtggcggagcacgcggacgcgggcggcgcggcggcgggcat

SEQ ID NO: 6228 - DNA, 426 bp, Homo sapiens; identical to SEQ ID NO: 3177
  SIMILAR (1)..(87): 1001254mologous to Homo sapiens protein disulfide isomerase- related protein,accession number J05016,Smith-Waterman Score=139.

SEQ ID NO: 6229 - DNA, 682 bp, Homo sapiens
  SIMILAR (209)..(571): 681254mologous to Homo sapiens hypothetical protein,accession number AL162044,Smith-Waterman Score=408.
atgaaacactcaggagcccagctggcttcacctagtggatcccgcactggggccgcaggtggagctgcctgccagtcccgtgccgtgtgcttgcacttctcagcccttgggcggtcgatgggactgggcgccgtggagcagggggtggtgctcgtcggggaggctggggccgcacaggagcccatggagtgggtgggaggctcaggcatggcgggctgcaggtcccgagccctgccccgcgggaaggcagctaaggcccagcgagaaatccagcacagcgccgggccggccggctgctccgagtgcggggcccgccaagcccacgcccacccagaactccagctggcccgcaagcgctgcgcgcagccccggttcctgctcgcgcctctccctccacacctccctgcaagctgagggagtgggctccagccttggccagcctagaaagaggctcccacagtgcagtgtcaggccgaagggctcctcaagtgccgccaaagtgggagcccaggcagaggaggcgctgagagcgagtgagggctgtgaggactgccagcacgctgtcacctctcactactacatacacattagaatgaatattattaaaagaattgacaatgccaagtgttgtcaagaatgtgaagtcactgggattatcataattctgctggtagaaatgtaa

SEQ ID NO: 6230 - DNA, 1743 bp, Homo sapiens
  SIMILAR (172)..(381): 981254mologous to Homo sapiens Human GTPase associated protein-23,accession number Y99672,Smith-Waterman Score=381.
atgcgctcgcacttctcagcccttgggtggtcgatgggactgagcgccctggagcagggggtggtgctcgtcggggaggctcgggctgcacaggagcccatggagtgggtgggaggctcaggcatagcgggctgcaggtcccgagccctgccccgcgggaaggcagctaaggctcggtttgagtcctgctggccggccctgatgaaggatgctcatggagtggtgatcgtcttcaatgctgacatcccaagccaccggaaggaaatggagatgtggtattcctgctttgtccaacagccgtccttacaggacacacagtgtatgctaattgcacaccacaaaccaggctctggagatgataaaggaagcctgtctttgtctggcggcggcggtaaccgcaggcaaggcaggagctgccctcggggctggactctcggggtggcaggggctgcagctgcagctgctcagggcaaggaagcccgtgggctccacgtgggctccacgtgggctcctgcaacgccgctggggaatctctcgcccgctgccccctattctggagaccttgattccaaccactgcccggaggaggtagtggaggcgagcccggtgttaatgagccccgaaggcccaagcaaagacctttatttgcactcattttcacagagtggaaaaactgttttggccaactttctgacagaatcttctgacatcactgaatacagcccaacccaaggagtgaggatcctagaatttgagaacccgcatgttaccagcaacaacaaaggcacgggctgtgaattcgagctatgggactgtggtggcgatgctaagtatgtttcctttaaagaaagtcacttcatcaaatggtttaaaaatcagctgcccaagccaggggcggtggctcacacctgtaattccagcactttgggaggccgaggagtgaagctgcagaccttcacggtgagtattacagctcctaaggcagcacgtctggagttgttcgttcctcccggtgggctcgtggtcttgctggcttcaggagtgaagctgcaaatcttcgcggtgagtgttacagctcataaaagcagtgtggacccaaagacccttgggtggtcgatgggactgggcgccgtggagcaggaggtggtgctcgtcggggaggctccggccgcacaggaaccaatggagtgggtgggaggctcaggcatgggggctgcaggtcccggagccctgccccgcgggaaggcagctaaggcccggcgagaaatcgagcacagcgccggtctgtacaagctgctgccgcactcggagtacagccggcccaaccgggtgcccttcaactcgcagggatccaaccctgtccgcgtctccttcgtaaacctcaacgaccagtctggcaacggcgaccgcctctgcttcaatgtgggccgggagctgtacttctatatctacaagggggtccgcaagcctggtccatcaggctctgacatggccagggagcgggcctgcgagtccccggaagagagacaggatctcatcctgttgcctaggctggagtgcggtggcgtgctcatcgttcactacagcctcaaactcctgggctcaaatgatcttcccacttcagccttcctagtggctggaactacagacacagcaaccatccgatttctcaatcttttccccacctttccccgctttctattccacaaaaccaccattgtcatcatggcccgttctcaatga

SEQ ID NO: 6231 - DNA, 428 bp, Homo sapiens
  SIMILAR (213)..(332): 651254mologous to Rattus norvegicus Nadrin,accession number AB042827,Smith-Waterman Score=122.
ggcacgagggaagaacacctgaagaggagcgggcgcgagattgcgctgcccattgaagcctgtgtcatgctgcttctggagacaggcatgaaggaggagggccttttccgaattggggctggggcctccaagttaaagaagctgaaagctgctttggactgttctacttctcacctgggatgagttctattcagacccccatgctgtagcagggtgctttaaaatcctatttacgggaattgcctgaacctttgatgacttttaatctgtatgaagaatgggacacaagttgcaagtgtgcaggatcaaggacaaaaaactttcaaggacttgtggagaacatgtcagaagttgccaccacaaaattttgttaactttagatatttgatcaagttccttgcaaagcttgctcagaccagcgatgtgaa

SEQ ID NO: 6232 - DNA, 549 bp, Homo sapiens
  SIMILAR (362)..(451): 901254mologous to Homo sapiens Human secreted protein, SEQ ID NO: 7141,accession number G03060,Smith-Waterman Score=139.
ctgcatgacttgcagcttagcaagcctctgagcgatgacacagctttgaccgacgggggccgccactgcctgcccgttggtgggcacagccaggaagactccagcgctgcgctcgatttctcgccgggccttagctgcctttccgcggggcagggctcgagacctgcagcccgccatgcctgagcctcccaccccctccatgggctcctgtgcggcccaagcctccccgatgagcgccgccccctgctccacggcgcccagtcccatcgaccacccaagggtctttgggtccacactgcttttatgagctgtaacactcaccgtgaagatctgcagcttcactcctgaagccagcgagaccatgagcccaccgggaggaacgaacaactccagacgcagtgcattaagagctgtaacactcaccgcgaaggtctgcagcttcactccggaagaaagaaactccgaacacatccgaacatcaaaaggaacaaactccagacgcgccaccttaagagctgtagcactcaccgcgagggtccgcagcttcat

SEQ ID NO: 6233 - DNA, 2234 bp, Homo sapiens; identical to SEQ ID NO: 3179
  SIMILAR (852)..(1361): 451254mologous to Felis silvestris polyprotein,accession number X51929,Smith-Waterman Score=350.

SEQ ID NO: 6234 - DNA, 1242 bp, Homo sapiens
  SIMILAR (157)..(627): 981254mologous to Rattus norvegicus Nadrin,accession number AB042827,Smith-Waterman Score=805.
atgcaggaagaggccaaggaacatgggcagacccaagaagctggaaaaggcaagcatgccctcttgcccgtccaccttccaccatgggatgatgcagcaagaaggccctcaccagatgtgggccccttgaccttggacttcccagcgttgagaactgatcaacttgcagcagacatgtacaactttatggccaaagaaggggagtatggcaaattctttgttacgttattagaagcccaagcagattaccatagaaaagcattagcagtcttagaaaagaccctccccgaaatgcgagcccatcaagataagtgggcggaaaaaccagcctttgggactcccctagaagaacacctgaagaggagcgggcgcgagattgcgctgcccattgaagcctgtgtcatgctgcttctggagacaggcatgaaggaggagggccttttccgaattggggctggggcctccaagttaaagaagctgaaagctgctttggactgttctacttctcacctggatgagttctattcagacccccatgctgtagcaggtgctttaaaatcctatttacgggaattgcctgaacctttgatgacttttaatctgtatgaagaatggacacaagttgcaagatatttgatcaagttccttgcaaagcttgctcagaccagcgatgtgaataaaatgactcccagcaacattgcgattgtgttaggccctaacttgttatgggccagaaatgaaggggctcgggacctgcagcccaccatgcctgagcctcccactccctccgtgggctcctgtgcggcccgagcctccctgacgagcaccaccccctgctccacggcgcccagtcccatcgaccacccaaaggctgagaagtgcgggcgcacggcacgggaccggcaggaaattgactctggtgatcaggttgaagacagactggaaaggaaattacagacaggaaatgtagctcaggaggtgactacaacagtccagggtggaacagaaacagtcaaaaacggggaatgtaactccacacaaatcaatgcaatggaacgcgctttcaatctgccaagagcttggaaaaagcagctttctcactccatcaagaaaaactactggggccaactccccaggcaattcccaagcaaagagaacactgagaactgctgcaaggagaaggttcaggtagcaacagctggcaggtggcagaacgagcagcaggacagactagaagggtag

SEQ ID NO: 6235 - DNA, 477 bp, Homo sapiens
  SIMILAR (297)..(1): 1001254mologous to Homo sapiens microsomal dipeptidase,accession number J05257,Smith-Waterman Score=554.
cagcgtcctccgcacggcgtctttgttctgggtgtcgcagggcgtgtacacggaccagaactggcctcccacaaagccggccctcagcttggggatgttggtgtgtgtgccggccaaggtggtcaggttggccctctcgtcctgcagccggttgttgaacatatccagcagctgccaggggaggtcattgtgcccatcaatgacaggggagtccctcatgatcctctctgcctcgtcccgaaagaagtctgcagtgcagacggccacaaggggccacagccaccatccgctccacatggtggggtccccggggacctgtgtgcactgctgccctggtgcctctgtgctggcctggctggcccgtgcagaaggatgagcttcaggctgtgaggagccactctgccctggcctctgcgatgcagacttgctccctggcagggcccggcctaggcagctcccacgccaggctcacagctg

SEQ ID NO: 6236 - DNA, 1137 bp, Homo sapiens
  SIMILAR (664)..(789): 801254mologous to Homo sapiens copine VII protein,accession number AJ133798,Smith-Waterman Score=178.
atgaaaaagaaaagttttagacaattgaaggaaaatgatttatatggacacaagcgaaggcagagtggctcctcacagcctgaagctcatccttctgcacgggccagccaggccagcacagaggcaccagggcagcagtgcacacaggtccccggggaccccaccatgtggagcggatggtggctgtggccccttgtggccgtctgcactgcagacttctttcgggacgaggcagagaggatcatgagggactcccctgtcattgatgggaggaactggaacagcgcgcggttctgcgggctcgtcacgtgggacctcttcagcaagtccgaccccttcctggagctctacagggtcaacgacgaccagggcttgcagctggtgtacaggacggagggctttggtggctgtggctatggccagaatccaacagggagccgcaggcgcagggccctgggggccgtggctgtggccagaatccagcaggcttgtgtagtcgtggctgtgattatttttagacctaccttccacttcctgcaggtggtgaagaacaacctgaacccggtgtgggaggccttcaaagtctctctgagttccctctgcagctgcgaggagacaaggcctctaaaggtgggggacgggatggaccaagggggcaacagcagtgctgaggaggactgggctccccagtgcctggtctgggattacgactctcgaggaaagcacgacttcatcggagaattctctaccaccttcgaggagatgcacaaagcctttttcgaggggcagggctacctggtaccagggcgtctgtggttccagatgggttgccagaggccctgtttcctcgaggtgctggtggccagggccacctggtacaagggcgtctgtggttccagatgggttgccagaggccctgtttcctcgaggtgctggtggccagggccacctggtaccagggcgtctgtggttccagatgggttgccagaggccctgtttcctcaaggtgctggtggccagggctacctgttcacggcgaagcagctggagaagctggccaagaaggcggggaaggactccaaggcggagcagtccaaagtgaagaaagtgagacccctgggggctgtggggtcatga

SEQ ID NO: 6237 - DNA, 2474 bp, Homo sapiens
  SIMILAR (41)..(994): 1001254mologous to Homo sapiens PRSM1,accession number U58048,Smith-Waterman Score=1791.
agcgactcacaaaaggtcctcggccacggcgtgcgtcaccatggcgaccgccgccggcagccgcgccccgcccctctggcgggaccggccaccatcctctcgcgaggagcatcccgtgcgaccggaagtggggcggcgaccccggaagtccccgccgggtgcagcttggtcggttcgatcgccgccgggacctgacaccgcccggagttggcgtcccttctccctctccgagtgctgctcctgtcattgtggccatggacgataccctgttccagttgaagttcacggcgaagcagctggagaagctggccaagaaggcggagaaggactccaaggcggagcaggccaaagtgaagaaggcccttctgcagaaaaatgtagagtgtgcccgtgtgtatgccgagaacgccatccgcaagaagaacgaaggtgtgaactggcttcggatggcgtcccgcgtagacgcagtggcctccaaggtggacacagctgtgactatgaagggggtgaccaagaatatggcccaggtgaccaaagccctggacaaggccctgagcaccatggacctgcagaaggtctcctcagtgatggacaggttcgagcagcaggtgcagaacctggacgtccatacatcggtgatggaggactccatgagctcggccaccaccctgaccacgccgcaggagcaggtggacagcctcatcatgcagatcgccgaggagaatggcctggaggtgctggaccagctcagccagctgcccgagggcgcctctgccgtgggcgagagctctgtgcgcagccaggaggaccagctgtcacggaggttggccgccttgaggaactagccgtgccccgccggtgtgcaccgcctctgccccgtgatgtgctggaaggctcctgtcctctccccaccgcgtcttgcctttgtgctgaccccgcggggctgcggccggcagccactctgcgtctctcacctgccaggcctgcgtggccttagggttgttcctgttcttttaggttgggcggtgggtctgtgtcctggtgttgagtttctgcaaatttctgggggtgatttctgtgactctgggcccacagcggggaggccaagaggggccctgtggactttcacccagcactgtgggggccttcagactctggggcagcagacatgctgcttcccatcagccagagggggtcagggctgccctgttgccaaacaactccctgaggcctctccgcaccacctcagcgggcaggaggtcccaccatgtggacagacatagcccaaggaggcaccacaggtctatgtgtgctgggggatgtcaggtgccacccaacgctgtcctggtggtatttacaatgacatcctcctcctccatcactccaggggtggtgtctcggccgcccctaccagctggctgagccccctggcctcctgcgctccctcacttccctcagttcccaaagctgcccagtccatggggacagaaccgtcactcagatccacattcaagtgtgcccaccctgcagtcttcatcctcactcagctgctgcctctggaggtgcctttggccacatgtgctgtgctgtttgtctcctcgacagggagcctgtccaccagcaggctgcggtcccagcgggtgcgtctgcagctcctccccttgggcaggctggttctcccggaggacctttccttggggccctgcttcatgacgatgctgcctgtgtcaccctctaccatctgtaaacaactgggtgccttccccgaccacaccccaatgccttcccagcttggaagccaaggcagctgatgaagggagctcaggagagccgtcttcagctgggctggggttggggctgctgtgaggaaaacctgccattgtggccctggagagtcaccagcagctcttgggaaggacttgctgggaggctgagagaggctttgggcacagcctgctgtcttttccatttcctaaagtttacttcattgtcttgaggcttccaggttttgtttttgtttttgccaaagtagaaaaggcaggtggtgggcggctggcagggagtgcgggtccccgcccctcttcagtcctgccctcccctcctcagtcctgcccaccccgtgcagcccatgctgaggctgcagtggtgtcgtgggtgttacgtgcaggaacgtggagaccctgacgtgggctcactgcatttggttttcttttcagaacttgggagcccccagggaggggctagtgttggtaggtcctagacgtggttccctccagcctccccaaaatcaaccctggtgttgagagaacgtccttctgtccatcgtgggtaacagccttggggagggtgcagagctctgcagagccatgggccaggtggggctgcctcagtcctgtccccttgggcactgaggagaggggcccattcacctttctcctagaatgctgttgtaaataaacaaatggatccctgga

SEQ ID NO: 6238 - DNA, 228 bp, Homo sapiens
  SIMILAR (1)..(129): 931254mologous to Homo sapiens Human secreted protein, SEQ ID NO: 6532,accession number G02451,Smith-Waterman Score=203.
atgggcaaggacttcatgtctaaaacaccaaaagcaatggcaacaaaagccaaaattgacaaatgggatctaattaaactaaagagcttctgcacagcaaaagaaactaccatcagagttggttaccagttccagtttaaacccagatatccaaacccagggaccagaacagaggcctcggaaaaagtgccatacatctacaaatatctgatctttgacaaaccttga

SEQ ID NO: 6239 - DNA, 471 bp, Homo sapiens
  SIMILAR (7)..(321): 391254mologous to Homo sapiens p40,accession number U93568,Smith-Waterman Score=200.
atggctgaaatgacagaaacaggcttcagaatgtggataaaaatgaacttcagtgagctaaaggagcatgttgcaaccgaaggcaaggaagccaagaatcatgataaaacaatgcaagagctgacagccaaaatagccagaatagagaggaacataactgacctgatagagctgaaaaacacactacaagaacttcacaatgcaattacaagcattaacagcagaatagaccaagtggagaaaagaatctcagagcttgaagactgtctttctgaaatgacagctagacaggccaaaattcaaattcaggaaatccagagaaccccagtaagatattccatgagaagatcatccccaaggtggaacgagagacttggaaaagaaaaagacacagagacaaagtatagagaaagaaataagggggcccagggaaccagcgttcagcatatggaggataccgccagcctctga

SEQ ID NO: 6240 - DNA, 1826 bp, Homo sapiens
  SIMILAR (920)..(771): 941254mologous to Homo sapiens envelope protein,accession number AF164615,Smith-Waterman Score=237.
tgagttcccttagtatttattgatcatctgtgggtgtttctcaaagagggggatgtgtcagggtcacaagacaattgtggggagagggtcagcagacaaacacgtgaacaaaggtcttggcatcatagacaatgtaaaggattaagtgctgtgcttttggatatgcatacacataaacatctcaatgctttacaaagcagtattgctgcccgcaggtcccacctccagccctaaggcggtttttccctatctcagtagatggagcatacaatcgggttttataccgagacattccattgcccagggacaggcaggagacagatgccttcctcttgtctcaactgcaagaggcattccttcctcttttactaatcctcctcagcacagaccctttacgggtgtcgggctgggggacggtcaggtctttcccttcccacgaggccatatttcagactttcacatggggagaaacgttggacaatacctggctttcctaggcagaggtccctgcggccttccgcagtttttgtgtccctgggtacttgagattagggagtggtgatgactcttaaggagcatgctgccttcaagcatctgtttaacaaagcacatcctgcaccgcccttaatccattcaactctgagtggacacagcacatgtttcagagagcacggggttgggggtaaggtcatagattaacagaatctcaaggcagaagaatttttcttagtacataacaaaatggagtctcctatgtctacttctttctacacagacacagtaacaatctgatctctcttgcttttccccacatttcccccttttcttttcgacaaaaccgccatcgtcatcatggcccgttctcgatggtcgctgtctcttcggagctgttgggtacacctgcagacaccattgatacaatcatcaaggctgcaagcagcatactctctggggtttgtttcacctttgtgttctctagatattttgtagctaactgcgtcagcttctttagttgtgcccaagttggcggctctgccttcttggtggatggcaacttcatctgttcttctgacgtcaccattttgttcatcttgtgagtcaacggtgctcgattgcgatgtctccgtctccgcggaggtgcttttctttgcatctctgatgggttcattgtagaacttcaaatgtcgtaaggctgactgtagatgtactcgggatctctcgtcgacttgtcctcaatgaccacgctcgagcgtaccttcaccctagagaaaagcctccacgttgggcaccagatgtaggggtgggttgccctcctttcacacctgtgggtgtttctcgtaaggtggaacaagagacttaggaaagaaaaagacacagagacaaaagtatagagaaagaaataaggggacccggggaaccagcgttcagcatatggaggatcccgccagcctctgagttccctgagtatttattgatcatttgtgggtgtttctcgaagagggggatgtgtcagggtcacaagacaatagtggggagagggtcagcagacaaacacgtgaacaaaggtctttgcatcatagacgatgtaaacgattaagtgctgtgcttttagatatgcatacacataaacatctcaatgctttacaaagcagtattgctgcccgcaggtcccacctccagccctaaggcggtttttccctatctcagtagatggagcatacaatcgggttttataccgagacattccattgcccagggacgggcaggagacagatgccttcctcttgtctcaactgcaagaggcatgccttcctcttatactaatc

SEQ ID NO: 6241 - DNA, 510 bp, Homo sapiens
  SIMILAR (118)..(276): 851254mologous to Homo sapiens acetyl-CoA carboxylase,accession number X68968,Smith-Waterman Score=234.
atggaggctcgctctgtcaccccagctggagtgcaatggcgcattctcgcgtcacttgaacatccaccttctgggttcaagcaattttgttgcttaagccccccgggagagacatgtgatccccgcagctctgtgttccagataattcagcaggcaggacaggtgtggttcccagactcagcctacaaaaccgcccaggccatcaaggacttcaaccgggagaagttgcccctgatgatctttgccaactggaggttgttctccggtgggatgaaaggtggttcctgtggcactacaggtggagatcagacgtcttccgggggagatgccccaccctgggtcccaggctctcacttggggctacgcgaaccggcatctcccaaagagccagttaaaatgcagagttggggccccacctcagaccctgaagccccacccttggacttccactatgctctgggggaaggacagcccacaggggacacgggcaaagctcaggctttgacctga

SEQ ID NO: 6242 - DNA, 389 bp, Homo sapiens
  SIMILAR (381)..(247): 361254mologous to Ipomoea batatas reverse transcriptase,accession number AF223339,Smith-Waterman Score=72.
acgcgtccgaaatgtagatcatctacctgtaacctgaatgtttactggtgccaaagccctggtattgctgagtacctcatgagcaatgagtgaaaaaatattgcgagaaaacagtgaccaggacagattcactcatatgcatcaactctcaggccgctgagagtaggctgtgtttttttgtcaacgatgagagctcatgggactttcctcataaaagggagctggggtgttgcagacctttggttcgtctgagtctgtgttctgcattgacgtagacagagagttgcttatatttgcataccagaacatcttgctattccttaaaaataaaagagccttaatcttggaaactacatgctttggatgggtaggcactgtaaaaagaacaa

SEQ ID NO: 6243 - DNA, 258 bp, Homo sapiens
  SIMILAR (22)..(144): 601254mologous to Homo sapiens DCHT,accession number AF017635,Smith-Waterman Score=133.
atgttctggtatgcaaatataagcaactctctgtctacgtcaatgcagaacacagactcagacgaaccaaagggcccacccaatgctaatgaagactacagagaagcttcttcttgtgccgtgaacctcgttttgagattaagagcacagctagaagctacacaacagagctggaaggcatcctctagaacagaaacactcaggccccctgcctcacccacccccacaccccctgcagcaggccagaggcagtcttag

SEQ ID NO: 6244 - DNA, 1055 bp, Homo sapiens
  SIMILAR (3)..(647): 881254mologous to Homo sapiens putative p150,accession number U93563,Smith-Waterman Score=975.
aaatacaaattaccatcagagaataccataaacacctctatgcaaataaactaaaaaatctagaagaaatggataaattcctggacacatacaccctcccaagactaaagcaggaagaagttgaatctctgaatagaccaataatgggctctgaaattgaggcaataattaatagcctaccaaccaaaaaaagtccaggaccagatggattcacagccaaattctacgagaggtacaaagaggagttggtatcattccttctgaaactattccaatcaatagaaaaagagggaatcctccctaactcattttatgaggctagcatcatcttgataccaaaacctggcagagacacaacaaaaaaagagaattttagaccaatatccctgaagaacatcgatgcaaaaatcctcaataaaatactggcaaaccgaatccggcagcccatcgaaaagcttatccaccacgatcaagtcggcttcatccctgagatgaaaggctggttcaaaaaatgcaaatcaataaacgtaatccatcacataaaccaaaccaatgacaaaaaccacatgattatctcaatagatgcagaaaaggccttcgacaaaactcaacagcccttcatgctaaaaactctcaataaactagggacaatcaggcaaaagaaagaaataaaaggtattcaattaggaaaagaggaagtcaaattgtctctgtttgcagatgacatgattgtctatttagaaaactccatcgtctcagcccaaaatctccttaagctgataagcaacttcagcaaagtctcaagatacaaaatcaacctgcaaaaatcacaagcattcctatacaccaataacagacacatggagagccaaatcacgagtgaactcccattcacaattgatacaaagagaataaaatacctaggaatccaatttacaagggatgtgaaggacctcttcaaggagaactacaaattactgctcaatgaaataaaagaggacacaaacaaatggaagaacattccatgctcatggatagaagaatcaatatcatga

SEQ ID NO: 6245 - DNA, 1596 bp, Homo sapiens
  SIMILAR (157)..(1596): 891254mologous to Homo sapiens putative p150,accession number U93574,Smith-Waterman Score=2180.
caacattaaagactaaaggtagataaaaccacaaagatggggagaaaccagagcagaaatgctgaaaattctaaaaaccagagagccttttctcctccaaaggattgcatctcctcgccagcaatggaacaaagctggacagagaaggagttggttttttgaaagattgacaaaattgatagactgctagcaagactaataaagaagaaaagagagaagaatcaaatagacgcaataaaaaatgataagggggatatcaccaccgatcccacagaaatacaaactaccattagagaatactacaagcacctctacgcaaataaactagaaaatctagaagaaatggataaattcctcgacacatacaccctcccaagactaaaccaggaagaacttgaatctctgaatagaccaataacaggctctgaaattgaggcaataattagtagcctacgaacaaaaaagagtccaggaccagatggattcacagccgaattctaccagagatacaaggaggagctggtactattccttctgaaactattccaatcaatagaaaaagagggaatcctccctaactcattttatgaggccagcatcatcctgataccaaagcctggcagagacacaacaaaaaaagagaattttaggctaatatccctgatgaatatcgatgtgaaaatcctcaataaaatactggcaaaccgaatccagcagcacatcaaaaagcttgtccaccatgatcaagttggcttcatccctgggatgccagactggttcaacatatgcaaatcaataaacataatccatcacataaacaggaccaacggcaaaaaccatatgattatctcaatagatgcagaaaaggcctttgagaaaattcaacagtgcttcatgctaaaaactctcaataaactaggtattgatggaatgtatctcaaaataataagagctatttttgataaacccacagccaatgtcatactgaatgggcaaaaactggaagcatttcctttgaaaactggcacaacacaggggtgccccctctcaccactcctattcaagatagtgttggaagttctggccagggcaatcaggcaagagaaagaaataaagcgtattcagttaggaaaagaagaagccaaattgtccctgtttgcagatgacatgattgtatatttagaaaacccaattgtctcagcccaaaatctccttcagctgagaagcaacttcagcaaagtcttaggatacaaaatcaatatgcaaaaatcacaagcattcctatacactaagaacaaacaaacagagagccaaatcatgagtgaactcccattcacaattgctacaaagagaataaaatacctaggaatccaacttacaagggatgtgaagtccctcttcaaggagaactacaaaccactgctcagcaaaataaaagaggacacaaacaaatggaagaacattccaagctcatggataggaagaatcagtatcgcgaaaatggccatactgcccaaggtaatttatacattcaatgccatccccatcaagctaccaatgactttcttcacagaattggaaaaaactactttaaag

SEQ ID NO: 6246 - DNA, 1491 bp, Homo sapiens
  SIMILAR (427)..(1488): 921254mologous to Homo sapiens putative p150,accession number U93563,Smith-Waterman Score=1676.
atggcacgagaaatacgtgacgaatgcacaagcttcagtagccgtttcgatcaaccagaagaaagggtatcagtgattgaagatcaaatgaatgaaatgaagcgagaagagaagtttagagaaaaaagagtaaaaagaaacgaacaaagcctccaagaaatatgggactatgtgaaaagaccaaagctacatctgattggtgtacctgaaagtgacggggagaatggaaccaagttggaaaacactctgcaggatattatccaggagaacttccccaacctagcagggcaggccaacgttcaaattcgggaaatacagagaatgccacaaagatactcctggagaagagcaactccaagacacataattgtcagattcaccaaagttgaaatgaaggaaaaaatgttaaggacagccagagagaaagcaccacatcgcacttattccaaaattgaccacatagttggaagtaaagcactcctcagtgaatgtgaaagaacagaaattataacaaactgtctctcagaccacagtgcaatcaaactagaactcaggatgaagaaacccactcaaaactgctcaactacatggaaactgaacaacctgctcctgaatgactactgggtacataacaaaatgaaggcagaaataaagatgttctttgaaaccaatgagaacaaagacacaacataccagaatctctggtacacatttaaagcagtgtgtagagggaaatttatagcactaaatgcccacaagagaaagcaggaaagatctaaaattgacaccctaacatcacaattaaaagaactagagaagcaagaggaaacacattcaaaagctagcagaaggcaagaaataactaagatcagagcagaactgaaggagatagagacacaaaaaacccttcaaaaaatcaatgaatccaggagctggttttttgaaaagatcaacaaaattgatagactgctagcaagactaataaagaagaaaagagagaagaatcaaacaaatgcaataaaaaatgataaaggggatatcgccactgatcccacagaaatacaaacaaccatcagagaatactataaacacctctatgcaaataaactagaaaatctagaagaaatggataaattcctggacacatacactctcccaagactaaaccaggaagaagttgaatccctgaatagaccaataacaggctctgaaattgaggcaataattaatagcctaccaaccaaaaaaaggccaggaccagacagattcgcagccgaattctaccagaggtacaaggaggagctggtaccattccttctgaaactattccaatcaatagaaaaagagggaatcctccctaactcattttatgaggccagcatcatcctgataccaaagcctggcagagacacaacaaaaaaagagaattttagaccaatatccctgatgaatatcgatgcaaaaatcctcaataaaatactgacaaactga

SEQ ID NO: 6247 - DNA, 1404 bp, Homo sapiens
  SIMILAR (364)..(1389): 871254mologous to Homo sapiens putative p150,accession number U93565,Smith-Waterman Score=1524.
atggggagaaaccagagtggaaaggctgaaaattccaaaaaccagaacacctcttctcctccaaaggaacacaactcctcaccagcaagggaacaaaactggatggagaatgaatttgatgagttgacagaagtaggcttcagaagtgacggggagaatgggaccaaattggaaaacactcttcaggatattatccaggagaacttccccaacctagcaaggcaggtcaacattcaaattcaggaaatacagagaacgccacaaagatactccttgagaagagcaaccccaagacacataactgtgagattcatcaaggttgaaatgaaggaaaaaatgttaagggcagtcagagagaaagaaatacaaactaccatcagagaatactataaacacctctacacaaataaactagaaaatctagaagaaactgagaaattcatggacacatacaccctcccaaaactaaaccaggaagaagttgaatctctgaatagactaaaaatagcttctgaaattgaggcaataattaatagcctaccaaccaaaaaaaatccaggaccagatggattcgcagccgaattctaccagaggtacaaagaggagctggtaccattccttctgaaactattccaatcaatagaaaaacagggaatcctcccaaactcattttatgaggccagcatcatcctgataccaaagcctggcagagacacaacaaaaaaagggaattttaggccaatatccctgatgaacattgatgtaaaaatcctcaataaaatactggcaaaccaaatccagcagcaaatcaaaaagcttatccaccacaatcaagtcggcttcatccctgggatgcaagactgcttcaacgtacccaaatcaatagacataatctatcacataaacagaaccaatgataaaaaccacatgattatgtcaatagatgcagaaaaggccttcaacaaaaatcaacagcctttcgtgctaaaaactctcaataaactaggtattgatggaatgtatctcaaaataataagagctatttatgacaaacccacagccaatatcatactgaatgggcaaaaactggaagcattccctttgaaaactggcataagacaaggatgccctctctcaccactcccattcaacatagtaatggaagttctggccaaagcaatcagacaagagaaagaaataaagtgtattcaattaggaaaagaggaggtcaaattgtctttgtttgtggatcacatgattgtatatttagaaaaccccatcatctcagcccaaaatctccttaagctgataagcaacttcagcaaagtctcaggatacaaaatcaatgtgcaaaaatcacaagcattccaatacaccaataacagacagagagccaaatcatga

SEQ ID NO: 6248 - DNA, 1258 bp, Homo sapiens
  SIMILAR (218)..(1243): 871254mologous to Homo sapiens putative p150,accession number U93565,Smith-Waterman Score=1524.
tgacggggagaatgggaccaaattggaaaacactcttcaggatattatccaggagaacttccccaacctagcaaggcaggtcaacattcaaattcaggaaatacagagaacgccacaaagatactccttgagaagagcaaccccaagacacataactgtgagattcatcaaggttgaaatgaaggaaaaaatgttaagggcagtcagagagaaagaaatacaaactaccatcagagaatactataaacacctctacacaaataaactagaaaatctagaagaaactgagaaattcatggacacatacaccctcccaaaactaaaccaggaagaagttgaatctctgaatagactaaaaatagcttctgaaattgaggcaataattaatagcctaccaaccaaaaaaaatccaggaccagatggattcgcagccgaattctaccagaggtacaaagaggagctggtaccattccttctgaaactattccaatcaatagaaaaacagggaatcctcccaaactcattttatgaggccagcatcatcctgataccaaagcctggcagagacacaacaaaaaaagggaattttaggccaatatccctgatgaacattgatgtaaaaatcctcaataaaatactggcaaaccaaatccagcagcaaatcaaaaagcttatccaccacaatcaagtcggcttcatccctgggatgcaagactgcttcaacgtacccaaatcaatagacataatctatcacataaacagaaccaatgataaaaaccacatgattatgtcaatagatgcagaaaaggccttcaacaaaaatcaacagcctttcgtgctaaaaactctcaataaactaggtattgatggaatgtatctcaaaataataagagctatttatgacaaacccacagccaatatcatactgaatgggcaaaaactggaagcattccctttgaaaactggcataagacaaggatgccctctctcaccactcccattcaacatagtaatggaagttctggccaaagcaatcagacaagagaaagaaataaagtgtattcaattaggaaaagaggaggtcaaattgtctttgtttgtggatcacatgattgtatatttagaaaaccccatcatctcagcccaaaatctccttaagctgataagcaacttcagcaaagtctcaggatacaaaatcaatgtgcaaaaatcacaagcattccaatacaccaataacagacagagagccaaatcatga

SEQ ID NO: 6249 - DNA, 955 bp, Homo sapiens
  SIMILAR (245)..(952): 751254mologous to Homo sapiens putative p150,accession number U93563,Smith-Waterman Score=885.
attccctcagaataatcggcccattccagttgttaggacgtggtctttaaagctgagttattcttcaatatcttggaaaataggggctcttcatctcaccaattatgaaatactgcagacatcgtttgccgtcggagagaaagatttatctccaaagataatggaacacagctcctcaccagcaacagaacaaagctggacagagaatgactttgacgagttgagagaagaaggcttcagaagatcaaactactccgagctaaaggaggaagttcgaacccatggcaaagaagttaaaaaccttgaaaaaagattagacgaatggctaattagaataaccaatgtagaaatgtccttaaaggacctgatggagctgaaaaacatggcacgaggaactacgagctggttttttgaaaagatcaacaaaattgatagaccgctagcaagaataataaagaagaagagaagaatcaaagacacaataaaaaatgataaaggggatatcaccaccgatcccacagaaatacaaactaccatcagagaatactataaacacctctacggaaataaactagaaaatctagaagaaatggataaattcctggacacatacaccctcccaagactaaaccaggaagaagttgaatccctgaatagaccaataacaggctctgaaattgaggcaataattaatagcttaccaaccaaaaaaagtccaggaccagacagattcacagccgaattctaccagaggtacaaggaggagctcgtaccaatccttctgaaactattagaatcaatagaaaaagagggaatcctccctaactcagtttatgaggccagcatcatcctgataccaaagcctggcagagacacaacaaaaaaagagaattttagaccaatacccctgatgaacatcgatgcaaaaatcctcaataaaatactggcaaactga

SEQ ID NO: 6250 - DNA, 2718 bp, Homo sapiens
  SIMILAR (891)..(2717): 881254mologous to Homo sapiens putative p150,accession number U93574,Smith-Waterman Score=2780.
aaacctcaactctctatgcagcttcgatcgtaggtatgtgtggggcttctgtaaaagtctgatccagggttactttgcccaattacactctccgctgcctgctggaccccacttgtgatgccccttgtaatgatcatggcatgaacacccgctggatgagccatagatactgtgagatggtgagctcactttctttagagaattttcattgttgcacccaaaggagctccattctcttccctcatgtgcctgttggcagaagacaactcgtatggaaagtggtttttggaatcgatgtgattctacatgaggttctatgcagagtcaatgcctctgcaaggagaagcaggcttgcccacacatggtttgccctgagagcatgtactgtctgtatttatctccctgtctatatgcagcccactgtcttacaacagtgcagtgcaagccctgcagctggtaggatatcaaaacctgaaggcctagatttcaagtgccatccagatatgaaatctttcaacctttcggtggctttgaatctaaagtgtgtctcttgtaaatggcacactgagtttgaagtgcctcacagtgaggtctctgctgtgggcgactgctgggcttcaagcagtccaggacccttcagtcaactgcccaagttcagatggcccagttctccaaaaggagagaagggtgcaccagaatgtcaccagggcagagagcgaaacagatcatggtagcgatccttccccagatccaggccctcccccttcctccttctctctcgttatctcagaattcacatggtattctcagttttgccttttggcctgcaaaacccgaaatatttactatctggctctttgcaggaaaagttcaggacccctggtataaattcccataaaacactggatccaaatagagtaatcattaaggtgaggaggaggctggagaaggagaaagccctgagggcctatgttgggaaatcagaggttcgtaacatgcatttaagagaaagatgcaaactatagaagaaaagagagaagaatcaaatagacacaattaaaaatgataaaggggatatcaccactgatgccacagaaatacaaactaccatcagagaatactataaacacctctatgcaaataaactagaaaacctagaagaaatggataaattcctcgacacatacatcctcccaagactaaaccaggaagaagttgaatctctgaatagaccaataacaggctctgaaattgaggcaataattaatagcttaccaaccaaaagaagtccaggaccagatggattcacagccgaattctaccagacgtacaaagaggagctggtaccattccctctgaaactattccaatcaacagaaaaagagggaatcctccctaactcattttatgaggccagcatcatcctgataccaaagcctggcagagacacaacaaaaaaagagaattttagaccaatatccttgatgaacatcgatgcaaaaatcctcaataaaatactggcaaaccgaatccagcagcacatcaaaaagcttatccactatgatcaagtgggcttcatccctgggatgcaaggctggttcaacaaacgcaaatcaataaatgtaatccagcatataaacagaaccaatgacaaaaaccacatgattatctcaatagatgcagaaaaggcctttgacaaaattcaacaacccttcatgctaaaaactctcaataaattaggtattgatgggacgtatctcaaagtaataagagctatctatgacaaacccacagccaatatcatactgaatgggcagaaactggaagcattccctttgaaaactgacacaagacagggatgccctctctcaccactcctattcaacatagtgttggaagttctggccagggcagtcaggcaggagaaggaaatagagggtattcaattaggaaaagaggaagtcaaattgtccctgtttgcagatgacatgattgtatatctagaaaaccccatcgtctcagcccaaaatctcctcaagctgataagcaacttcagcaaagtgtcaggatacaaaatcaacatacaaaaatcacaagcattcttatacaccaataacagacaaacagagagccaaatcatgagtgaactcccattcacaactgcttcaaagaaaataaaatacctaggaatccaacttacaagggatgtgaaggacctcttcaaggagaactacaaaccactgctcaatgaaataaaagaggatacaaacaaatggaagaacattccatgctcgtgggtaggaagaatcaatatcatgaaaatggccatactgcccaaggtaatttgtagattcaatgccatccccatcaagctaccaatgcctttcttcacagaattggaaacaactactttaaagttcatatggaaccaaaaaagagcccgcaagtcaatcctaagccaaaagaacaaagctggaggcatcacactacctgacttcaaactatactacaaggctacagtaaccaaaacagcatggtactggtaccaaaacagagatatagaccaatggaacagaacagagccctcagaaataatgccacatatctacaactatctgatctttgacaaacctgagaaaaacaagcaatggggaaaggattccctatttaataaatagtgctgggaaaactggctagccatatggagaaagctgaaac

SEQ ID NO: 6251 - DNA, 2907 bp, Homo sapiens
  SIMILAR (1)..(1632): 941254mologous to Homo sapiens putative p150,accession number U93563,Smith-Waterman Score=2643.
atgggagactttaacaccccactgtcaacattagacagaacaaccagacagaaagtcaaccaggatacccaggaattgaactcagctctgcaccaagcagacctaatagacatctacagaacactccactccaaatcaacagaatatacatttttttcagcaccacaccacacctattccaaaattgaccacatacttggaagtaaagctctcctcagcaaatgtaaaagaacagaaattataacaaactatctctcagaccacagtgaaatcaaactagaactcaggattaagaatctcactcaaaactgctcaactacatggaaactgaacaacctgctcctgaatgactactgggtacctaatgaaatgaaggcagaaataaagatgttctttgaaaccaatgagaacaaagacacaacatacccaaatctctgggacgcattcaaagcagcgtgtagagggaaatttatagcactaaatgcccacaagagaaagcaggaaagatccaaaattgacaccctagtatcacaattaaaagaactagaaaagcaagagcaaacacattcaaaagctagcagaaggcaagaaataactaaaatcagagcagaactgaaggaaatagagacacaaaaaacccttcaaaaaattaatgaatccaggagctggttttttgaaaggatcaaaaaaattgatagaccgctagcaagactaataaaggaaaaaagagagaagaatcaaatagacgcaataaaaaatgataaaggggatatcaccaccaatcccacagaaatacaaactaccatcagagaatactataaacacctctacacaaataaactagaaaatctagaagaaatggataaattcctcgacacatacactctcccaagactaaaccaggaagaagttgaatctctgaatagaccaataacaggatctgaaattgtggcaataatcaattgcttaccaaccaaaaagagtccaggaccagatggattcacagctgaattctaccagaggtacaaggaggaactggtaccattccttctgaaactattccaatcaatagaaaaagagggaatcctccctaactcattttatgaggccagcatcattctgataccaaagcctgacagagacacaagcaaaaaagagaattttaggccaatatccttgatgaacattgatgcaaaaatcctcaataaaatactggcaaaccgaatccagcagcacatcaaaaagcttatccaccatgatcaagtgggcttcatccctgggatgcaaggctggttcaatatacgcaaatcaataaatgtaatccagcatataaacagagccaaagacaaaaaccacctgattatctcaatagatgcagaaaagccctttgacaaaattcaacaatgcttcatgctaaaaactctcaataaattagttatcgatgggacatatttcaaaataataagagctatctatgacaaacccacagccaatatcatactgaatgggcaaaaactggaagcattccctttgaaaacgggcacaagacatggatgccctttctcaccactcctattcaacatagtgttggaagttctggccagggcaattaggcaggagaaggaaataaaggagaataaaatacctaggaatctaacttacaagggatgtgaaggacctcttcaaggagaactacaaaccactgatcaaggaaataaaagagaatacaaacaaatggaaaaacattccatgctcatgggtaggaagaatcaatatcgtgaaaatggccatactgcccaagaattggaaaaaactactttaaagttcatatggaaccaaaaaagagcccacatcgccaagtcaatcctaagccaaaagaacaaagctggaggcatcacactaccagacttcaaactatactacaaggctacagtttccaaaacagcatggtactggtaccaaaacagagatatagatcaatggaacagaacagtgccctcagaaataacgccgcatatctacgactatctgatctttgacaaccctgagaaaaacaagcaatggggaaaggattccctatttaataaatggtgctgggaaaactggctagccatatgtagaaagctgaaactggatcccttccttacaccttatacaaaaatcaattcaagatggattaaagacttaaacattagacctaaaaccataaaaaccctagaagaaaacctaggcattaccattcaggacataggcatgggcaaggacttcatgtctaaaacaccaaaagcaatggcaacaaaagccaaaattgacaaatgggatctaattaaactaaagagcttctgcacagcaaaagaaactaccatcagagtgaacaggcaacctacagaatgggagaaaatttttgcaatctactcatctgacaaagggctaatctccagaatctacaatgaactcaaacaaatttacaagaaaaaaacaaacaaccccatcaaaaagtgggcaaaggacatgaacagacacttctcaaaagaagacatttatgcagccaaaaaacacatgaaaaaattctcatcttcactggccatcagagaaatgcaaatcaaaaccacaatgagataccatctcacaccagttagaatggcaatcattaaaaagtcaggaaagaacagggctggctcggcactggctccttgcagtcggcgaactgtcggggcgggaggagccgtgagcagtagctgcactcagctgcccgcgcggcaaagaggaaggcaagccaaacagagtgcgcagagtggcagtgccagcggcgacacaggcagcacaggcagcccgggctgcctgaatagcctcagaaacaacctcagcgactccggctgctctgcggactgcgagctgtggcggtag

SEQ ID NO: 6252 - DNA, 2361 bp, Homo sapiens
  SIMILAR (1402)..(2358): 891254mologous to Homo sapiens putative p150,accession number U93568,Smith-Waterman Score=1439.
atgaagaaaggaattcaggtaccttcctttaaacatatctcttctgcaaatgtagtcatccctgataaagtacaattagagggctctgggcccacaggcgcggatgcaattcaggagggagttggagcgaatgttggtgttgagaaaggccaccacgcagcccagcttggcgaggccgaaccacacgtgaacgaagtccggctcattgctcatcagcagagccaccgtgtccccctttttcagagaggaatggttcaggaagacatgggccactctgctgctccttttgtctacatcctgataggtgtagatgtctccctcatagatgatgaaaggcacagctctccacggagaccgcagatcctcactactcagggcttacacctgaagttcttgtcagcttttccggggcgaagcgggatggggaggaatcctgagaaacagaatcgtaggtttgcaccgaaaaggtcgccccaagtggtgctgaagattaagcttgggtcactgggcggctggaaagcagggagcctccgactcctgcgagaaaccaacacagccaccctcaggggtcttggaatctacaaccccagcgctgcgccctcgcctcccaaccgcgacagcggcccgtgccctgcgagttccccaggactttccagacctcttctctccggaacagcctgggccccgccgccagctcctccctgggcgcgcgtccggccacctagagaagtgtggcgcgccgacctgctcacaccccagggaggaggccccgcgactggcgtctccggcggggaagaatgtgacagtcccgtggggggaaacccagggatctggaaggcttggggtcacaggagaaccagagttgctgggattgggcggcgcgggggccctggcgaggctgataagcagcctctgctggtgatactcaggcaaacagggtctggagtggacctccagcaaactccaacagacctgcagctgagggtcctgactgttagaaggaatactaacaaacggaaaggacatccacaccaaaaccccatctgtacatcaccatcatcaaagaccgaaggcagatcaatgagacagaaagttaacaaggatatccaggaattgaactctgctctgcaccaagtggacctaatagacatctacagaactctccaccccaaatcaacagaatatacattcttctcagcaccacatcacacttattccaatattgaccacatagttggaagtaaagcactcctcaacaaatgtaaaagaacagaaattgtagcaaactgtctctcagaccacagtgcaatcaaaccagaactcaggattaagaaactcactcaaaactgctcaactacatggaaactgaacaacctgctcctgaatgactactggagaagcaagagaaaaacacattcaaaagctagccgaaggcaagaaataactaagatcagagcagaactgaaggagatagagacacaaaacacccttcaaaaaatcaatgaatccaggagctggttttttgaaaacatcaacaaaattgatagactgctagaaagactaataaagaaggaaagagagaagaatcagatagatgcaataaaaaatgataaaggggatatcaccaccgatcccacaaagatacaaaccaccatcagagaatactataaacacctctacaaaaataaactattaaatctagaagaaatggataaattcctggacacatacaccctcccaagactaaaccaggaagaaattgaatccctgaatagaccaataacaggctatgaaattgaggcaataattaatagcctaccaaccaaaaaaagtccaggatcagatggattcacagctgaattctaccagaggtacaaacaggagttggtaacattccttctgaaactattccaatcaacagaaaaagagggaatcctccctaattcatttcatgaggccagcatcatcctgataccaaagcctggcagagacacaacaaaaaaagagaattttagaccaatatccctgatgaacatcgatgcaaaaatcctcaataaaatactggcaaaccaaatccagcagcacatcaaaaagcttatccaccacgatcaacttggcttcatccctgggatgcaaggcttgttcagcacatgcaaatcaataaacgtaatccatcatataaacaaaaccaaagacaaaaaccacatgattatctcaatagatgcagaaatggcctctgacaaaattcaacagcccttcatgctaaaaactctcaataaactaggtattgacgggatgtatctcaaaataataagagctatttatgacaaacccacagccaatatcatactgaatgggtaa

SEQ ID NO: 6253 - DNA, 1869 bp, Homo sapiens
  SIMILAR (505)..(1353): 701254mologous to Homo sapiens putative p150,accession number U93574,Smith-Waterman Score=992.
atgggagactttaacaccccactgtcaacattagacagatcaacaagacagaaagtttacaaggatatccaggaattaaacacagctctgcaccaagcggacctaatagacatctacagaactctctaccccaagtcaacagaatatacattttcagaatatacatttttctcagcaccacatcacacttattccaaaattgaccacttagttggaagtaaagcactccttagcaaatgtaaaagaacagaaattataacaaactgtctctcagaccacagtgcaatcaaactagaactcaggattaagaaattcactcaaaaccactcaactacatggaaactgaacaacctgctcctgaacaactactgggtacataacgaaatgaaggcagacataaagatgttctttgaaatgaatgagaacaaagacacaacataccagaatctctgggacacatttaaagcagcatgtaaagggaaatttatagcactaaatgcccacaagagaaagcaggaaagatctaaaattgacaccctaacatcacaattaaaagaactagagaagcaagagcaaacacaaatacaaactaccatcagagaatactataaacacgtctatgcaaataaactagaaaatctagaagaaatggataaattcctggacacatacaccctcacaagactaaaccaggaagaagttgaatccctgcataggccaataacaggctctgaaattgaggcaataattaatagcctacgaacccaaaaaagtccaggaacagatggattcacagccaaattctaccagagttacaaagaggagctggtaccattccttctgaaactattccaatcaatagaaaaagatggaatcctccctaactcattttatgaggccagcatcatcctgataccaaagcctggcagagacacaacaaaaaaagaggattttagaccaatatccctgaagaacatcgatacaaaaatcctcagtaaaatactggcaaaccaaatccagcagcacatcaaaaagcttatccaccatgatgaagtgggcttcattcctgtgatgcaaggctggttcaacatatgcaaatcaataaacataatccatcatataaacagaaccaaagacaaaaaccacatgattatctcaacagatgcagaaaagacctttgagaaaattcaacagtgcttcatgctaaaaactctccataaattagtgttggaatttctggccagggcaatcaggcaggagaaagaaataaagggtattcaattaggaaaagaggaaatcaaattgttcctgttggctgatgacacgattgtgtgtttagaaaaccccctcatctcagcccaaaatctccttaaactgataagcaacttcagcaaagtctcaagacacaaaatcagtgtgcaaaaaccacaagcattcttatacaccaataacagacaaatagagagccaaatcatgagtgaactcccattcacaattgcttcaaagaaaataaaatacctaggaatccaacttacaagggatgtgaaggacctcttcaaggagaactacaaaccactgctcaatgaaataaaagagtactcaaacaaatggaagaacattccatgctcatggataggaagaatcaatatcatgaaaatggccatatggcccaaggtaacttatagattcagtgccatccccatcaagctaccaatgactttcttcacagaattggaaaaaactactttaaagttcatatggaaccaaaaaagggcccacatcaccaagacaatcctaagccaaaagaataaggctgcaggcatcacgctacctgacttcaaactatactacaagtctacagtatcctaa

SEQ ID NO: 6254 - DNA, 888 bp, Homo sapiens
  SIMILAR (145)..(885): 891254mologous to Homo sapiens putative p150,accession number U93563,Smith-Waterman Score=1095.
atgcagctggagatccgagaatgcacagactgcctcctcaagtggcctccactgctgatactcaggcaaacagggtctggagtagacctccagcaaactccaacagacctgcagctgagggtcctgactgttagaaggaaaactaacaaacagaaaagacatccacaccaaaaccccatctgtacgtcaccatcatcaaagaccaaagaactagagaagcaagagcaaacacattcaaaagctagcagaaggcaagaaataactaagatcagagcagaactgaaggatatagagacacaaaaaacccttcaaaaaatccatgaatccaggagctggttttctgaaaagatcaacaaaattgatagaccgctagcaagactaataaagaagaaagagaagaatcaaatagatgcaatacaaaatgataaaggggatatcaccaccgatcccacagaaatacaaaccaccatcagagaatactataaacacctctatgcaaataaactagaaaatctagaagaaatggatacattcttcgacacatacaccctcccaagtctaaaccaggaagaagttgaatctctgaatagaccaacaacaggctctgaaattgaggcaataattaatagcttaccaaccaaaaaaagtccaggaccagatggattcacagccgaattctaccagaggtacaaggaggagctggtaccattccttctgaaactattccaatcaatagaaaaagagggaatcctccctaacacattttatgaggccagcatcatcctgatactaaagcctggcagagacacaacaaaaaaagagaattttagaccaatatccctgatgaacatcgacgcaaaaatcctcaataaaatactggcaaactga

SEQ ID NO: 6255 - DNA, 1059 bp, Homo sapiens
  SIMILAR (184)..(1005): 891254mologous to Homo sapiens putative p150,accession number U93572,Smith-Waterman Score=1233.
atgaaaaacaactcagagagttttgagcctctgctgctgatacccaggcaaagagggtctggagtggacctccagcaaactccaacagacctgcagctgagggtcttgactgttagaaggaaaactaacaaacaggacatccacaccaaaactccaactgtacgtcaccatcatcaaagaccaaagaatccctgggacacattcaaagcagtatgtagagggaaatttatagcactaaatgcccacaagagaaagcaggaaagatctaaaattgacaccctaacatcacaattaaaagaagtagagaagcaagagcaaacacagtcaaaagctagtagaaggcaagaaataactaagatcagaggagaactgaaggaaatagagacacaaaaaacccttcaaaaaatcaatgaatccaggagctggttttttgaaaagatcaacaaaattgataggctgctagcaagactaataaagaagaaaagagagaagaatcaaatagacacaataaaaaatgataaagaggatatcaccactgattccacagaaatacaaactaccatcagagaatactataaacacctctacgcaaataaactagaaaatctagaagaaatggataaattcctcaacatatacaccctcccaagactaaaccaggaagaagttgaatccctgaatagaccaattacaggctctgaaattgaggcaataattaatagcttaccaaccaaaaaaagtccaggaccagatggattcacagccgaattctaccagagttaccaggaagagctggtaccattccttctgaaactattccaatcaatagaaaaagagggaatcctctctaactcattttacaaggccaacatcatcctgataccaaagcctggcagagatacaacaaaaaaagagaattttagaccaatatccctgatgaacatcgatgccaaaatcctcaataaaatactggaaaccgaatccagcagcacatcaaaaagcttatccaccatgatcaagtgggcttcatccctgggatgcaaggctggttcaacataa

SEQ ID NO: 6256 - DNA, 1695 bp, Homo sapiens
  SIMILAR (682)..(1689): 871254mologous to Homo sapiens putative p150,accession number U93569,Smith-Waterman Score=1487.
atgaggcccccattccagaccccagctcctgaacacatcctgggctggaaggaaacctgttgctttcaagggaagaacccattcctggcagcattcatcacctgctacctgaagagcccttggaccttgattaaccatcagcaagatccaggtactacactgaagagcagtcctggtagtggaggccacaggggtgcttcttttacaccaccagaagctctgggtggcttagaacaaagagagactgttcatttgggagaacgtaagaaagataacaagtgtatctgcctggtaatccagagaattcttccagaacttgtgcaagaccatcaaggcggcacctctatgagtctgcaaaaccaccgtgttactgggtttggggagccccctaaagcagatacagttcagatcataacagccaattcctttaaaatatctgaaaagcctcctcaaagaaagagggattcatcaccaggcatctattggccattgatgagaaaaagccttgctactattgaccttcaaggtgcaattgctgttttaattctctcactcactctcactgctgggttgccaagtggcatcacccagacaaatcagacccatctagaatatgactacctggaagtcttttgccctcctcccattcaggatgatggctccttttctgggagaggtaatagagaagagaaactagagacaaattacaaaaaggagaaccagttaaatgaagccttaacaccattcgaaatacaaactaccatcagacaatactataaacacctctatgcaaataaactagaaaatctagaagaaatggataaactcctcaaaacatacaccctctcaagacaaaaccaggaagaagttgaatctctgaatagaccaatagcaggctctgaaattgaggcaataattaatagtttaccaaccaaaaaaagtccaggaccagatagattcacagctgaattctaccagaggtacaagaaggagctggtaccattccttctgaaactattccaatcaatagaaaaagagggactccttcctaactcattttatgaggccagcatcatcctgataccaaagcctggcagagacacaacaaaaaaagagaattttagaccaatatccctgatgaacattgatgcaaaaatcctcaataaaatacttgccaaacaaatccagcagcacatcaaaaagcttatccaccatgatcaagtgggcttcatccctgggatgcaaggctggatcaacatactcaaatcaataaatgtaatccagcatataaacagaaccagtgacaaaaaccatgtgattatctcaatagatgcagaaaaagcctttgacaaaattcaacaacccttcatgctaaaaactctcaataaattaagtattgatgggatgtatttcaaaataataagagctatctatgacaaacccacagccaatatcatactgaatgggcaaaaactggaagcattccctttgaaaactggcacaagacaaggatgccctttctcaccactcctattcaacatagtgttggaagttctggccagggcaatcaggcaggagaaggaaataaagggtattctattaggaaaagaggaagtcaaattgtccctttttgcacatgacatgattgtatatctagaaaaccccatcatctcagcccaaaatctccttagctga

SEQ ID NO: 6257 - DNA, 2871 bp, Homo sapiens
  SIMILAR (883)..(2868): 751254mologous to Homo sapiens putative p150,accession number U93569,Smith-Waterman Score=2443.
atggctggagcaggaagaagaaagagagagcagggaggtgctacacactttagacaaccggagcttatgggaactcactatcatgagagcaccaagagggatagtgctaaaatgttcatgagaaaccacccctatcacccagtcacctcccaccaagccccacctccaacactggggattacaatttggtatgagatttcggcggggacacagatccagaccactgcaatacatgtgttgaaattcatagaactagaatgttatttggttattaataaagtgatgtactcatgtgtggccaaagcagcttatttttatgtactgaggtgtgtgccgccaccctatggaagatttgatggacatgtacttaagcctcctaaggcccagaactatcttctcagttgcgagctaaagggtgacaaaggttgtcactttcagatggataatgatacaaatgagcgccagttatctttaagaaccaccagttcaggagctggtgcaaaggatgaattgcacgttgttgaagcagagataatgaataatgaaggcagtccaattaagcttctggtaaccattgttctactctctgtctccatgagttcagttgttttaattttagttcccacaaataaattaactttgaagattccttggaagaacctttatggagaagcagttgttgcgaccctggaaggattatacctgcttgttgtccctggagcaagtattaagtatgatgctgtaaaagaagaaaaatccttgcaggatgttaaacagaaagagctatcccgaattgaagaagcccttcaaaaagcagcagaaaaagataagccaaaagaagccaaaaaggatacatttgtggaaaaattggcaactcaagtaataaaaaatgtacaagtaaaaatcacagatattcacttaaatatgaagatgattctctcagaccacagtgcaatcaaactagaactcaggattaagaaactcactcaaaaccactcaactacatggaaactgaacaaccttctcctgaatgactactgggtgcataacgaaatgaaggcagaaataaagatgttctttgaaaccaacgagaacaaagacacaacataccagaatctctgggacacattaaaagcagtgtgtagagggaaatttgcagcactaaatgcccacaagagaaagcaggaaggatctaaaattgacaccctaacatcacaattaaaagaactagagcagcaagagcaaacacattcaaaagctagcagaaggcaagaaataactaagatcagagcagaactgaaggaaatagagacacaaaaaacccttcaaaaaatcaatgaatccaggagctggttttttgaaaagatcaacaaaatcgatagactgctaaaatacaaaactaccatcagagaatactataaacacctctacgcaaataaactagaaaatctagaagaaatggacaaattcctcgacacatacaccctcccaagactaaaccaggaagaagttgaatctctgaatagatcaataacaggctctgaaattgaggcaataattaatagcttaccaaccaaaaaaagtccaggaccagacggattcacagccgaattctaccagaggtacaaggaggagctggtaccattccttctgaaactattccaatcaatagaaaaagagggaatcctccctaactcattttatgagtccagcagcatcctgataccaaagcctggcagagacacaaccaaaaaagagaattttagaccaatatccttgatgaacatcgatgcaaaaatcctcaataaaatactggcaaaccgaatccagcagcacatcaaaaagcttatccaccatggacaagaaggcttcatccctgggatgcaaggctggttcaacatacgcaaatcaataaatgtaatccagcatataaacagaaccaaagacaaaaaccacatgattatctcaatagatgcagaaaaggcctttgacaaaattcaacagcccttcatgctaaaaactctcaatagattaggtattgatgggatgtatctcaaaataataagagctatttatgaaaaacccacagccaatatcatagtgaatgggcaaaaactggaagcattccctttgaaaactggcacaagacagggatgccctctctcaccactcctattccacatagtgttggaagttctggccagggcagtcaagcaggagaaagaaataaagggtattcaattaggaaaagaggaagtcaaattgtccgtgtttgcagatgacatgattgtatatctagaaaaccccatcgtctcagccccaaatctccttaagctgataagcaacttcagcaaagtctcaggatacaaaatcaatgtgcaaaaatcacaagcattcttatacaccaataacagacaaacggagagccaaatcatgagtgaactcccattcacaattgattcaaagagaataaaatacctaggaatccaacttacaagggacgtgaaggacctcttcaaggagaactacaaaccactgctcaatgaaataaaagaggacacaaacaaatggaagaacattccatgctcatggataggaagaatcaatatcgtgaaaatggccatactgcccaagataatttatagattcagtgccatccccatcaagctaccaatgactttcttcacagaattggaaaaaactactttaaagttcgtatggaaccaaaaaagagcccacattgccaagtcaatcctaagccaaaagaacaaagctggaggcatcacgctacctgacttcaaactatactccaaggctacagtaaccaaaacagcatggtactggtaccaaaacagagatacagaccaatga

SEQ ID NO: 6258 - DNA, 2317 bp, Homo sapiens
  SIMILAR (863)..(2296): 891254mologous to Homo sapiens putative p150,accession number U93563,Smith-Waterman Score=2181.
aagttcagaaaatatattaacagtgcacgaacaggccaatgttgaatctcttaaagaaacaaaacagaattgtaaggatttggatgaagatgccaatggaataacagatgaggggaaagaaattaatgagaaaagttctcagctgaagaatctttctgaacttcaggacactagccttcaacatgatgatgaagaagagtccacagttataagtgtcagtgaagacatgaacagtgaagggaatgtagattttgaatgtgataccaaactatacacgtttctcagcagtgatgaaagccaacagtctgaaaacagtgagaatgaagaggatactttatgttttgttgaaaatagtggccaaagggagtcattaagtggagacacaggaagtctgtcatgtgacaatgcattgtttgtaattgacacaactcctggaatgagtgctgataaaaatttttacttggaagaggaagacaaggcaagtgaggttgccattgaggaagaaaaagaagaggaagaggatgaaaaaagtgaagaagattcatcagaccatgacgaaaatgaagatgagtttagtgatgaagaagacttcctaaatagcacaaaggctaaactgggcagactgacacctcacatggctgggtactcctctgagacaaaacttccagaggaacgaccaggcagcaacatctgctgttcaccaatatctgctgttctgcagcctccgctgctgatacccaggcaaacagggtctggagtggacctccagcaaactccaacagacctgcagctgagggtcctgactgttataaagaaaactaacaaacaaaaaggacatccacaccaaaaccccatctgtacgtccccatcatcaaagaccaaagacagatcaacgagacagaaagttaacaaggatatccaggaattgaactcagctctgcaccaagcagacctaatagacatctacagaactctccaccccaaatcaacagaatatacattcttcgcagcaccacactgcacttattccaaaatcgaccacatagttggaagtaaagcactcctcagcaaatgtaaaagaacagaaattataacaaactgtctcttagaccacagtgcaatcaaactagaactcaggattaagaaattcactcaaaactgctcaactacatggaaattgaacaacctgctcctgaatgactactgggcacataacgaaatcaaggcagaaataaagatgttctttgaaaccaacgagaacaaagacacaacataccagaatttctgggacacattcaaagcagtgtgtagagggaaatttatagcactaaatgcccacaagagaaagcaggaaagatctaaaattgacaccctgacatcacaattaaaagaactagagaagcaagagcaaacacattcaaaagctagcagaaggcaagaaataactaagatcacagcagaactgaaggaaatagagacacaaaaaacccttcaaaaaatcaatgaatccaggagctggttttttgaaaagatcaacaaaattgagaccgctagcaagactaataagaaaagagagaagaatccaatagatgcaataaaaaatgataaaggggatatcaccaccaatcccacagaaatacaaactaccatcagagaatactataaacacctctatgcaaataaactagaaaatctagaagaaatgaataaattcctcgacacaaacaccatcccaagactaaaccaggaagaagttgaatctctgaataggccaataacaggctctgaaattgaggcaataattaatagcttaccaacaaaaaaaagtccaggaccacatggatttacagccagattctaccaggagtacaaggaggagctggtaccattccttctgaaactattccaatcaatagaaaaagagggaatcctccctaactcattttatgaggccagcatcatcctgacaccaaagcctggcagagacacaacaaaaaaagagagttttagaccaatatccctgatgatcatcaatgcaaaaatcctcaataaaatactggcaaaccgaatccagcagcacatcaagaagcttatccaccatgatcaagtgggcttcatccctgggatgcaagactggttcaaaatatgcaaatcaataaacgtaatccagcatataaacagaaccaaagacaaaaaccacatgattatctcaatagatgcagaaaaggcctttgacaaaattcaacaactcttcatgctaaaaactctcagtaaattaggtattgatgggacgtatctcaataagagctatctatga

SEQ ID NO: 6259 - DNA, 1554 bp, Homo sapiens
  SIMILAR (1001)..(1168): 921254mologous to Homo sapiens putative p150,accession number U93563,Smith-Waterman Score=277.
atgatgagctttcatgaactctcagtccacactgccatagatggtcattcccacagctcctgctctgcatggtgtagccccatagacagagattattttgaacaggagaacaacagcagcagcagctgctgctgctgctgctaccactgccaccggaagcactgtggtgggaagggactcagttttccaggcgaaatgccattgagtcccggacattttaacaagatgatgtattcagtgtctgagctcatgcagggcagtggcagtggcaccttcatccctctccctgcagaattgtcattgtggctactggtcaccaataccaagggacaacgtatgataaaaaatgatgctgaaatacaaactaccatcagagaatactacaaacacctctacgcaaataaactagaaaatctagaagaaatggataaattcctcgacacatacaccctcccaagactcaaccaggaagaagttgaatctctgaatagaccaataacaagctctgaaattgtggcaataatcaatagcttaccaaccaaaaagagtccaggaccacatggattcacagccgaattctaccagaggtacaaggaggaactggtaccattccttctgaaactattccaatcaatagaaaaagagggaatcctccctaactcattttatgaggccagcatcatcctgataccaaagcctggcagagacacaacaaaaaaagagaattttagaccaatatccttgatgaacagtgatgcaaaaatcctcaataaaatactggcaaaccgaatccagcagcacatcaaaaagcttatccaccatgatcaagtgggcttcatccctgggatgcaaggctgtttcaatatatgcaaatcaataaatgtaatccagcatataaacagaaccaaagacaaaaaccacatgattatctcaatagatgcagaaaaagcctttgacaaaattcaacaacccttcatgctaaaaactctcaataaattagagaataaaatacctaggaatccaacttacatgggacgtgaaggacctcttcaaggagaactacaaaccactgctcaaggaaataaaagaggatacaaacaaatggaagaacattccatgctcatgggtaggaaaaatcaatatcatgaaaatggccataccgcccaaggctacctctccattggagagttacaagagagagaagaggtaatggggcagaaaaggcttaggatggtgttagtgccttctgaaagagctagatatctaattgcagattatttccttgtgaggtatggagagccctttactggagtcttccaattccctagcatgctgaagacccctctagtgggctccctacaacttaagtctcccacagtacctggctaccagtgcttccacactagtcacttctccagtccacatggtccacacagaggcttggtgcttcctgggatgcaaatatggattcagccagatgaacatatggcagagactagttacaagactcctactgggaacaagccactttcagaaccatttctagaatgttga

SEQ ID NO: 6260 - DNA, 2745 bp, Homo sapiens; identical to SEQ ID NO: 5617
  SIMILAR (352)..(1782): 951254mologous to Homo sapiens putative p150,accession number U93563,Smith-Waterman Score=2344.

SEQ ID NO: 6261 - DNA, 2055 bp, Homo sapiens
  SIMILAR (1)..(1473): 871254mologous to Homo sapiens putative p150,accession number U93563,Smith-Waterman Score=2207.
atgggagactttaacaccccactgtcaacattagacagatcaatgagacagaaagtcaacaaggatacccaggaattgaactcagctctgcaccaagcggacctaatagacatctacagaactctccaccccaaatcaacagaatatacatttttttcagcaccacaccacacctattccaaaatagaccacatagttggaagtaaagctctcctcagcaaatgtaaaagaacagaaattataacaaactatctctcagaccacagtgcaatcaaactagaactcaggattaagaatctcactcaaaaccgctcaactacatggaaactgaacaacctgctcctgaatgactactgggtacataacgaaatgaaagcagaaataaagatgttctttgaaaccaatgagaacaaagacaaaacataccagaatctctgggacgcattcaatgcagtgtgtagagggaaatttgtagcactaaatgcccacaagagaaagcaggaaggatccaaaattgacaccctaacatcacaattaaaagaactagaaaagcaagagcaaacacattcaaaagctagcagaaggcaagaaataactaaagtcagagcagaactgaaggaaatagagacacaaaaaacccttcaaaaaattaatgaatccaggagctgcaagactaataaagaaaaaaagagagaagaatcaaatagagcaataaaaaatgacaaacgggatatcaccatcgatcccacagaaatacaaactaccatcagagaatactacaaacacctctacgcaaataaactagaaaatctagaagaaatggataaattcctcgacacatacactctcccaagactaaaccaggaagaagttgaatctctgaatagaccaataacaggatctgaaattgtggcaataatcaatagcttaccaaccaaaaagagtccaggaccagaaggattcacagccgaattctaccagaggtacaaggaggaactggtaccattccttctgaaactattccaatcaacagaaaaagagggaatcctccctaactcattttatgaggccagcatcattctgataccaaagccgggcagagacacaaccaaaaaagagaattttagaccaatatccttgatgaacattgatgcaaaaatcctcaataaaatactggcaaaacgaatccagcagcacatccaaaagcttatccaccatgaccaagtgggcttcatccctgggatgcaaggctggttcaatatatgcaaatcaataaatgtaatccagcatataaacagaaccaaagacaaaaatcacatgattatctcaatagatgcagaaaaggtctttgacaaaattcaacaacgcttcatgctaaaaactctcaataaattagtgttggaagttctggccagggcagttaggcaggagaagaaaataaagggtattcaattaggaaaagaggaactcaaattgtccctgtttgcagacgacatgattgtatatctagaaaaccccattgtctcagcccaaaatctccttaagctgataagcaacttcagcaaagtctcagaatacaaaatcaatgtacaaaaatcacaagcattcttatacaccaacaacagacaaacagagagccaaatcatgagtgaactcccattcacaattgcttcaaagagaataaaatacctaggaatccaacttacaagggatgtgaaggacctcttcaaggagaactacaaaccactgctcaaggaaataaaagaggatgtaaacaaatggaagaacattccatgctcatgggtaggaagaatcaatatcgtgaaaatggccatactgcccaaggtaatttacagattcaatgccatccccatcaagctaccaatgacttccttcacagaattggaaaaaactactttcaagttcatatggaaccacaaaggagcccgcatcgccaagtcaatcctaagccaaaagaacaaagctggaggcatcacactacctgacttcaaactatactacaaggctacagtaaccaaaacagcatggtactga

SEQ ID NO: 6262 - DNA, 3529 bp, Homo sapiens
  SIMILAR (305)..(1849): 891254mologous to Homo sapiens putative p150,accession number U93572,Smith-Waterman Score=2317.
ctctagtgatggcagctggtggacagggtttcagtggagagaatggaggcaggcagggagatcggtgaactcttgggacaatcccaaacaggaagttagagcttcaagtaaggacaagagcaggggaagcattcaagaggcgatgaggatgcaaagttcagcgaagctgctgtgttctgcctggactctagcttactccattgcagtaaggacattgtcctcagacagcgagggccagcctccgctggtgatacacaggcaaacagggtctggagaggacctccagcaaactccaacagacctgcagctgagggtcctgactattagaaggaaaactaacaaacagaaaggacatccacaccaaaaccccatctctagcagaagacaagaaataactaagatcagagcagaactgaagaagatagagacacaaaaacccttcaaaaaaatcaatgaatccaggagctggttttttgaaaagatcaacaaaattgatagactgctagcaagactaataaagaagaaaatagagaagaatcaaatagatgcaataaaaaatgataaagggaatatcaccaccaatcccacagaaatacaaactaccatcagagaatactataaacacctctatgcaaataaactagaacacctagaagaaatggataaattcctggacatatacaccctcccaagactaaaccaggaagaagttgaatctgtgaatagaccaataacaggttctgaaattgaggcaataattaatagtctaccaaccaaaaaaagtccaggaccagacagattcacagctgaactctaccagaggtacaaagaggagctggtaccattccttctgaaactattccaatcaatagaaaaagagggaatcctccctaattcattttatgaggccagcatcatcctgatatcaaagcctggcagagacacaacaaaaaaagagaattttagaccaatatccctgatgaacatcgatgcaaaaatcctcaataaaatactggcaaaccaaatccagcagcacatcaaaaagcttatccaccaccatcaagttggcttcatccctgggatgcaaggctggttcaacatactcaaatcaataaacgtaatccatcatataaacagaaccaaagacaaaaaccacatgattatctcaatagaagcagaaaaggcctttgacaaaattcaacagccctttatgctaaaaactctcaataaactaggtattgatgggacatatctgacatatctcaaaataataagagctatttatgacaaacccacagccaatatcatactgaatgggcaaaaactggaagcattcccttttaagactggcacaagacagggatgtcctctctcaccactcctattcaacatagtgttggaagctctggccagggcaatcaggcaagagaaagaaataaagggtattcaattaggaaaagaggatgtcaaattgtccctgtttgcagatgacatgattgtatatttagaaaaccccatcgtctcagcccaaaatctccttaagctgataagcaacttcagcgaagtctcaggatacaaaatcaatgtgcaaaaatcacaagcattcctatacaccaataacagacagacagagagccaaatcatgagtgaactcccattcacaattgcttcaaagagaataaaatacctaggaatacaacttacaagggatgtgaaggacctcttcaaggagaactacaaaccactgctcaatgaaataaaagaggacacaaacaaatggaagaacattccatgctcatggataggaagaatcaatattgtgaaaatggccatactgcccaagactctcaatcagaaattctcatactggttcagagtcaacaaacactacattcaccagaggacttttcccctcaaagagacagaattcaacaccatagcaacgctttataatggtgcttctccagcacagcaccaaaaagcactggaaccaatggccatcaagcatcaggattgccacggttctgaagaattgccttttgcagtgctcttgtcaagtctaaacgaaaactctatcagggttatttgcctggtcagacagataggagggaagagggagtttcttggtgtccaggtggtccttaagacaaagccagaactggcatttccagtggagggaggactacaaggtcaaaggtggataagcaattacctctatgaaggaaacgggcagggagatgaaaaggagaaaagcaacacggaggataggaaaagcctttccatggagatgatgttccagccaagacaggaaggggtagaacgagccagcgaggccaagggcaggatgggggtgggcaaggatactgagaaacagctcctggaggaggagtcggccagggcacaggcctggaggcggaaatgtgctgggtgcatggtcacagaatccaggatgttattttggctttctggagacaagggcccacagttcgtcaccatgggtccagcagaaggcccagctagatctaagaatcaacacaaaaagattgaaagctttaaacacctgagtttggataattctagccaggaagagaccccaggaccaggccagtgtcattaccacctccagcaactcccctcagctccccacaaggaggcgaaagcaacccaacacaaacgtgtgtgcccaagcatctcctctcagtccttgaccccttcatctttactctctaaagatattactacagcaccttgcaaattgaatttaacaaaggacctatgtttgatgaatgaacagccatacagaaatgtgattggacacaaaggatctggcctaacggtgaaggacggagtggggaaacccagcaaaaccacagaattttttactgagtacttcagttacaagaaaagctatccaaaaaaaccctacaaatgcatccaaagacagcttctgctcatccagagccaagaagaactagcaggcaatcatgtgcagaggcctttagctttagagtttggggcgcttttttctcctggaggtgccagctggggttttggggacttgaaaagttacctggggctacagaacacagtgtccacgcacttggacaagctgcctcttctgggtgaaaggcacatgtcccaccagacacccatgagccatccttggcccctctctggaaccttacccctcacatcccataaatccccaaggactgtgcatccacctgctgaacatcaccaaagtccacttccaattccactcccagtgactgcaaagggggcctttgcctcggtgccaccattactattccctgctccacaaggattatcgaatgagggcagaagatgtcatgggtatattttgataaatatttcaggcattacaaacaatactgaaatatatgccagtcttgtaaccatcacactgcaacattttctgctgccttctgaagactgtggaaaagcccccttgcaagggagggtggaaggaagagagggagtttctcagaaagagaagagaaaaacctaa

SEQ ID NO: 6263 - DNA, 3021 bp, Homo sapiens
  SIMILAR (214)..(1176): 911254mologous to Homo sapiens putative p150,accession number U93569,Smith-Waterman Score=1506.
atggatggacctggaagccattatcctcagcaaagtaacgcaggaacagaaaatcaaacaccgaatgttctcacttataagtgggagctgaacaatgagaacacatggacacaaggaggagaacaatacacactggggccttttggggggtggcaggggaaggagagcatcaagataagtagctattacacgctgggcttaatacctaggtggagctggttttttgaaaagatcattaaaattgatagaccactagcaagactaataaagaagaaaagagagaagaatcaaatagatgcaataaaaaatgataaaggggatatcaccaccgatcccacagaaatacaaactaccatcagagaatactataaacacctctacacaaataaactaggaaatctagaagaaatggatcaattcctggaaacatacaccctcccaagactaaaccaggaagaagttgaatccctgaagagaccaataacaggctctgaaattgaggcaataattaatagcctaccaaccaaaaaaagtccaggaccagatggattcacagctgaattctaccagaggtacgaggaggagctggttccattccttctgaaactattccaatcaatagaaaaagagggaatcctccctaattcattttatgaggccaacatcatcctgatatcaaaggctggcagagacacaataaaaaaagagaattttagaccaatatccctgatgaacatcaatgcaaaaatcctcaataaaatactggcaaaccgaatccagcagcacatcaaaaagcttatccaccacgatcaagtgggctgcatccctgggatgcaaggctggttcaacatatgcaaatcaataaacgtaatccatcatataaacagaaccaaagacaaaaaccacatgattatctcaacagatgcagaaaaggcctctgacaaaattcaacaacccttcatgctaaaacctctcaataaattaggtattgatgggatgtatctcaaaataagaagagctatttatgacaaacccacagccaatatcatactgaatgggcaaaaactggaagcattccctttgaaaactggcacaagacagggatgccctctctcaccactcctattcaacatagtgttggaagttctggtcagggcaatcaggcaggagaaggataaaactactttaaagttcatatggaaccaaaaaagagcccgcattgccaagataatcctaagccaaaagaacaaagctggaggcatcaagctacctgacttcaaactatactacaaggctacagtaaccaaaacagcgtggtactggtaccaaaacagagatatagaccaatggaacagaatagagccctcagaaataataccacacatctacaaccatctggtctttgacaaacctgacaaaaacaagaaatggggaaaggattccctatttaataaatgttgctgggaaaactggctagccatacgtagaaagctgaaactggatcccttccttacaccttatacaaaaatcaattcaagatggattaaagacttaaatgttagacctaaagccataaaaactctagaagaaaacctaggcaaaaccattcaggccataggcatgggcaagggcttcatgtctaaaacaccaaaagcaatggcagcaaaagcccaaattgacaaatgggttctaattaaactaaagagcttcttcacagcaaaagaaaccaccatcagagtgaacaggcaacctacagaatgggagaaaatttttgcaatctactcatctgacaaagggctagtatccagaatctacaaaaaactcaaacagatttacaagaaaaaatcaaacaaccccattaaaaagtgggtgatggatatgaacagacaattctcaaaagaagatgtttatgcagccaacagacacatgaaaaaatgctcatcatcacgggccatcagagaaatgcaaaccaaaaccacaatgagataccatctcacaccagttagaatggcgatcattaaaaagtcaggagacaacaggctgctctctggcggtgcagagcctctcattcagtgtcggacacctgccccgccgtgcattgcacacagctgtgcctgctcctgctccgtcagtacccctccactggggtgggatgggagtccttttgggctgatacaacagaataccttaggttgggtaatttataaacaacagaaatttattgctcacagttttgaaggttggaaagtccaagacgcaggcacccatagatttggtgtctggtggaagcccataggcagtgcctgccatgaaggggaaagggatctttcaagactcttttataaagaatcaaccttgtcctatgttaggcagctggaggcaagagtaagacagctggaggaagaaaatcgcatgctgccccaggatagatacacattttatgtaatggttgcagccacagttatgtgcctggagtggagaaggtcaaatgagcacagagctgatgttaatctggtcttggatgttcaggaaactatagatcgtcaacagggtaaagagtatgaacatgaccttagtgagacagaaaaagctatagtcagagaaatgtgcaatgttgtgtggaggaaacttggagatgctgcaggttcgtgtcctggaattaggcaacatttgtcaggaaaccagtacaaaggaccaatgattagagtggatagtggggacaacaggcaaagagaactggaagaagatgaagtattccagctagatggtcctggatttaatactcaatttgatgggcagctctttgggccaagcacaaatgtcctgtattggtgccagtggcagatggtccttttcatgacagataaggtatcaatgaactgggggggctctagggagtcagagggtagacgtttccatgctctgctggttcttacatccagcatgaaaagcaactcagtgttgacatttttggatccagaaatcaggggcatttctctgagagtagaaaggggtttttag

SEQ ID NO: 6264 - DNA, 2016 bp, Homo sapiens
  SIMILAR (262)..(1530): 671254mologous to Homo sapiens putative p150,accession number U93572,Smith-Waterman Score=1377.
atgggagactttaataccccactgtcaacattagacagatcaaagagacagaaagttaacaaggatatccaggaattgaactcagctctgcaccaagtggacctaatagacatctacagaactctccaccccaaatcaacagaatatacattcttttcagcaccacaccgcacttattccaaaatggaccacacagttggaagtaaaccactcctcagcaaatgtaaaagaacagaaattataacaaactgtctctcagaccacagtgcaatcaaactagaactcaggattaagaaactcactcaaaactgctcaactacatggaaactgaacaacctgctcctgaatgactactggctacataacgaaatgaaggcagtaataaagatgttctttgaaaccaacgagaacaaagacacaacataccagaatctctgggacacattcaaagcagtgtgtagagggaaatttatagcactaaatgcccaaaagagaaagcaggaaagacccaaaattgacaccctaacatcacaattaaaagaactagaaaagcaagagcaaacacattcaaaagctagcagaaggcaagaaataactaagaccagagcagaactgaaggaaatagagacacaaaaaaacccttcaaaaaaatcaatgaatccaggggctgaaatacaagctaccatcagagaatactataaacacctctatgcaaataaactagaaaatctagaagaaatagataaattccttgacacatataccctcccaagactaaaccaggaagaagctgaatctctgaacagacaaataacaggctctgaaattgaggcaataattaacagcttaccaaccaaaaaaagtccaggacctgatggattcacagctgaattctaccagagggacaaggaggagctggtaccattccttctgaaactattccaatcaatagaaaaagagggaatcctccctaactcattttatgaggccagtatcatcctgataccaaagcctggcagagagacaacaaaaaaagagaattttagaccaatatccctgatgaacatcgatgcaaaaatcctcaataaaatactggcaaaccgaatccagcagcatatcaaaaagcttatccaccatgatcaagtggacttcatccctgggatgcaaggctggttcaacatatgcaaaacaataaacataatccagcatataaacagaaccaaagacaaaaaccatacgattatctcactagatgcagaaaaggcctttgacaaaattcaacaacccttcatgctaaaaactctcaataaattaggtattgatgggacgtatctcaaaataataagaactatctatgacaaacccacagccaatatcataccgaatgggcaaaaactggaagcattccctttgaaaacgggcacaagacagggatgccctctctcaacactcctattcaacatagtgttggaagttctggccagggcaatcaggcaggagaaggaaataaaggcccaaaatctccttaagctgataggcaacttcagcaaagtctcaggatacaaaatcaatgtgcaaaaatcacaagcattcttatacaccaataacagacaaacagagagccaaatcatgagtgaactcccattcacaattgcttcaaagagaataaaatacctaggaatccaacttacaagggatgtgaaggacctcttcaaggagaactacaaaccactgctcaaggaaataaaagaggatacaaataaatggaagaacattccatgctcatgggtaggaagaatcaatatcgtgaaaatggccacactgtccaaggtaatttatagattcaatgccatccccatcaagctaccaatgactttcttcgcagaattggaaaaaactactttaaagttcatatggaaccaaaaaagagcccgcatcgccaagtcaatcctaagccaaaagaacaaagctggaggcatcgagctacctgacttcaaactatactacaaggctatg

SEQ ID NO: 6265 - DNA, 1215 bp, Homo sapiens
  SIMILAR (103)..(801): 831254mologous to Homo sapiens putative p150,accession number U93563,Smith-Waterman Score=963.
atgcctaactttgcccccagcacagggggagttgaaggagtttcattggtgtatatccagagagattatcagattcatcagtcatccaatcggtggttggtagaaatacaaactaccatcagagaatactataaacaactctacgcaaataaactagaaaatctagaagaaatggataaattcctggacacacacatcctcccaagactaaatcaggaagaagttgaatctctgaatagaccaataacaggctctgaaattgaggcaataatcaatagcttatcaaccaaaaaaattccaggaccagatggattcacagctgaattctaccagaggtacaaacaggagctggtaccattccttctgaaactattccaatcaatagaaaaagagggaatcctccctaactcattttatgaggccagcatcatcctgataccaaagcctgggagagacacaaccaaaaaagagaattttagaccaatatccttcatgaacattgatgcaaaaatcctcaataaaatactggcaaaccgaatccagcagcacatcaaaaagcttatccaccatgatcaagtgggcttcatccctgggatgcaaggctgggtcaacatacgcaaatcaataaatggtatccaacatataaacagaaccaaagaccaaaaccacatgattatctcaacagatgcagaaaaggcctttgacattatactgtacagcgcactcttcgctgaagtttatgcgactgtcatagtggggaccgaagctgttcaaaaggaagtagattatccttcccctacgtacgtgggaagggggaggctctgggttatcaagaggatcaaaatcgaatttgctcatccagtactgtacctgacattggataagtcaagtgagctctgtaaggcagaaaccggggaagccgccctcatacggtatggagaccggaagcacatagtgcccgagagcgccgtcacttccggcgtcacagacggtcattacaagcgactcgtgggcgtcaatactgggctgaatctcatttttgatgaagaggaaggagcggtttccacaaggggcacctccgttcagagcattgaactggtcctcccaccccatgcaaaccatcacggaaatacatttggtggccagattatggcgtggatggagacagtggctactatttctgcaaggttcttggttttgaccttcggcctatga

SEQ ID NO: 6266 - DNA, 2268 bp, Homo sapiens
  SIMILAR (178)..(1701): 871254mologous to Homo sapiens putative p150,accession number U93563,Smith-Waterman Score=2227.
atggccgggtacccctctgagacgaaacctccagaggaacgatcagacagcaacatttgctcttcagcaatattcactgttctgcaccccccgctgctgatacccaggcaaacagcgtttggaatggacctccagcaaatgccaacagacctgcagctgagggtcctgactgttaaaaggaaaactaacaaacagaaaggacatccacaccaaaaccccatccgcacatcaccatcatcaaagaccgaagactttcaaccaacaaagatcaaaagagacaaagaaggccattatataatggtaaagggatcaattcaacaagaagagctaactatcctaaatatatatgcacccaatacaggagcacccagattcataaaggaagtccttagagatctacaaagagacttagactcccacacaataataatgggagaatttaacacacgactgtcaacattagacagatcaatgagacagaaagttaacaaggatatccaggaattgaattcagctctgcaccaagcagacctaatagacatctccagaaatctccaccccaaatcaacagaatatacattcttctcagcaccacatcgcacttattccaaaattgaccacatagttggaagtaaagcactcctcagcaaatgtaaaagaacagaaattataacaaagtgtctctcagaccacagtgcaatcaaactagaactcaggattaagaatctcactcaaaactgttcaactacatggaaactgaacaacctgctcctgaatgactactgggtacataatgaaatgaaggcagaaataaagatgttctttgaaaccagcgagaacaaagacacaacataccagaatctctgggacacatttaaagcagtgtgtagagggaaatttatagcactaaatgcccacaagagaaagcaggaaagatctaaaactgacaccctaacatcacaattaaaagaactagagaagcaagagcaaacacattcaaaagctagcagaaggcaagaaataacaaagatcagagcagaactgcaggagatagagacacaaagaacccttcaaaaaatcagtgaatccaggagctggttttttgaaaagatcaacaaaattgatagatcgctagcaagactaataaagaagaaaagagagaagaatcaaatagaggcaataaaaaatgataaaggagatatcaccaccaatcccacagaaacacaaactaccatcaaagaatactataaacacctctacaaaaataaactagaaaatctagaggaaatggataaattcctgaacacatacaccctcccaagactaaaccaggaagaagttgaatctctgaatagaccaataacaggatctgaaattgtggcaataatcaatagcttaccaaccaaaaaaagtccaggaccggatggattcacagccgaattctaccagaggtgcaaggaggagctggtaacattccttctgaaactattccaatcaatagaaaaagagggaatcctccctaactcattttatgaggccagcatcaacctgataccaaagcctggcagagacacaacaaaaaaagagaattttagaccaatatccctgatgaacatcgatgcaaaaatcctcaataaaatactggcaaaccgaatctgggcaattaggcagaagaaagaaataaagagtattcaattaggaaaagaggaagtcaaattgtccctgtttgcagatgacatgattgtgtatctagaaaaccccatcatctcagcccacaatctccttaagctgataagcaacttcagcaaagtctcaggatacaaaatcaatgcacaaaaatcacaagcattcttatacaccaataacagacaaacagagagccaaatcatgagtgaactcccattcacaattgcttcaaagagaataaaatacctaggaacccaacttacaagggatgtgaaggacctcttcaaggagaactacaaaccactgctcagtgaaataaaagaggacacaaacaaatggaagaacattccatgctcatggataggaagaatcaacatcgtgaaaatcgccatactgcccaaggtaatttatagattcaatgccattcccatcaagctaccaatgactttcttcacagaattggaaaaaactaccttaaatttcatatggaaccaaaaaagtgcccacattgccaagtcaatcctaagtcaaaagaacaaagctggaggcatcaagctacctgacttcaaactatactgctag

SEQ ID NO: 6267 - DNA, 1797 bp, Homo sapiens
  SIMILAR (187)..(1422): 591254mologous to Homo sapiens putative p150,accession number U93563,Smith-Waterman Score=1135.
atgataatgggagactttaacaccccactgtcaacattagacagatcaacgagacagaaagttaacaaggatatccaggaattgaactcagctctgcaccaagcggacctaatagacatctacagaactctccaccccaaatcaacagaatataccttcttctcagcatcacacctcacttattccaaaattgaccacatagttggaagtaaagcactcctcagcaattgtaaaagaacagaaattataacaaactatctctcagaccacagtgcaatcaaactagaactcaagattaagaaactgactccaaaccgctcaactacatggaaactgaacaacctgctcctgaatgactactgggtacataacgaaatgaaggcagaaataaagatgttctttgaaaccaacgagaacaaagacacaacataccagaatctctgggacacattcaaagcagagtgtagagggaaatttatagcactaaatgcccacaaaagaaagcaggaaagatctaaaattgacaccctaacatcacaattaaaagaactagagaagcaagagcaaacacattcaaaagctagcagaaggcaagaaataactaagatcagagcagaactgaaggaaatggagacacaaaaaaacccttcaaaaaaatcaatgaatccaggggctgaaatacaaactaccatcagagaatactataagcacctctacgcaaataaactagaaaatctagaagaaatggatacattcctcgacacatacaccctcccaagactaaaccaggaagaagttgaatctccgaatagaccaataacaggctctgaaattgaggcaataattaatagcttaccaaccaaaaaaagtccaggaccagatggattcacagccaaattctaccagaggtacaaggaggagctggtaccattccttctgaaactattccaatcaatagaaaaagagggaatcctccctaactcattttatgaggccagcatcatcctgataccaaagcctggcagagacacaacaaaaaaagagaatttcagaccaatatccctgatgaacatcgatgcaaaaatcctcaataaaatactggcaaaccgaatccagcagcacatcaaaaagcttatccaccatgatcaagtgggcttcatccctgggatgcaaggctggttcaacatacgcaaatcaataaacataatccagcatataaacagaaccaacaacaaaaaccatatgattatctcaatagatgcagaaaaggcctttgacaaaattcaacaacccttgatgctaaaaactctcaatgaattagcccaaaatctccttaagctgataggcaacttcagcaaagtctcaggttataaaatcaatgtgcaaaaatcacaagcattcttatacaccaataacagacaaacagaaagccaaatcatgagtgaactcccattcacaactgcttcaaagagaataaaatacctaggaatccaacttacaaggttggcaaaggaactcttcaaggagaactacaaaccactgctcaatgaaacaaaaggggatacaaacaaatggaagaacattccatgctcatgggtaggaagaatcaatattgtgaaaatggccatattgcccaaggtattgagaaagggtcaaactccagtgccttcaggcataaggctagcaaaacaattgtcatataataagaaacacttgtgttgcagctcagaaaatgataccctcaaatatgccgctttaaaactcaaactgagagcacctggaaagcagcaaatgcag

SEQ ID NO: 6268 - DNA, 2065 bp, Homo sapiens
  SIMILAR (614)..(1498): 901254mologous to Homo sapiens putative p150,accession number U93572,Smith-Waterman Score=1350.
gataaaaactcttagtattcgcctaacattacgggccactgaattaacctgcaccgggtctcccagttctaccgagagtggaggtcttcctggaggagccgggcagtggctcgtgggagccaagatggcggcggcggcggcagcgacagcagcagcagcagccagtattcgggaaaggcagacagtggctttgaagcgtatgttgaatttcaatgtgcctcatattaaaaacagcacaggagaaccagtatggaaggtactcatttatgacagatttggccaagatataatctctcctctgctatctgtgaaggagctaagagacatgggaatcactctgcatctgcttttacactctgatcgagatcctattccagatgttcctgcagtatactttgtaatgccaactgaagaaaatattgacagaatgtgccaggtttttgaccaatatctcaattttattactttggaagatgatatgtttgtattatgtaatcaaaataaggagcttgtttcatatcgtgccattaacaggccagatatcacagacacggaaatggaaactgttatggacactatagttgacagcctcttctgcttttttgttactctggaaatacaaactaccatcagagaatactataaacacctctatgcaaataaactagaaaatctagaagaaatggataaattcctggacacatataccctcccaagactaaactgggaagaatttgaattgctgaatagaccaataacaggctctgaaattgaggcagtaatcaatagcctaccaacccaaaaaaaaagtccaggaccaggtgaattcacagctgaattctaccagagatacaaagagaagctggtaccattccttctgaaactattccagtcaatagaagaagagggaatcctccctaactcattttatgaggccagcatcatcctgataccaaagcctggcagagacacaacaaaaaacgagaattttagaccaatatccctgatgaacatcaatgcgaaaatcctcaataaaatactggcaaagcaaatccaacagtacatcaaaaagcttatccaccacaaacaagttggcttcatccctgggatgccaggctggttcaacatatgcgaatcgataaacataaatcatcatattaacagaaccaaagacaaaaaccacatgattatctcaatagatgcagaagaggccttcgacaaaattcaacagcccttcatgctaaaacctctcaataaattaggtattgatggaacgtatctcaaaataataagacctatttatgacaaacctacagccaatatcatactgaatgggcaaaaactggaagcattccctttgaaaactggcacaagacagggatgccctctctcaccactcttattcaacatagtgttggaagttctggccagggcagtcaggcaagagaaagaaataaagggtattcaattaggaaaagaggaagtcaaattgtccctgttgagaataaaatacctaggaattcaacttacaagggatgtgaaggacctcttcaaggagaactacaaaccactgctcaacgaaataaaagaggacacaaacaaatggaagaacattccatgctcatggataggaagaatcaatatcgtgaaaacggccatactgcccaaggatttccatttaaacagggttaatttggaagaatcttcaggagtggaaaactctccagctggtgctagaccaaagagaaaaaacaagaagtcttatgatttaactccggttgataaattttggcaaaaacataaaggaagtccattcccagaagttgcagaatcagttcagcaagaactagaatcttacagagcacaggaagatgaggtcaaacgacttaaaagcattatggttcatacaggaatagaaacagaactgcagtctgtaggtgattctgctgatgttttcacttctatatgtagtgtctctgtgaaatggcaaaaggctgttcagatctgtttacctgaggtcattgtctcttgtggaggtgatacagatacagatatagatgtatag

SEQ ID NO: 6269 - DNA, 1215 bp, Homo sapiens
  SIMILAR (727)..(1203): 801254mologous to Homo sapiens NAG13,accession number AF194537,Smith-Waterman Score=629.
atgaaggtgatgacttggaaggcacctaacactacctggggacagctaaagaaattggatcaacaggcatctatttggcttgcagctgtggaagccctcgcaaccgcatggaatcggtttcttaagtatctggtggtaactggggaaacttctgagaaagagtatctttattaccagccccaaagggatactaagtttgcaaacttgacctttatgtctgctgttagcactaatcttactgaggtctctaatgaagctacacaagtgcctgatcttcctatatgctgtctgagtacggactggcgatacaagtgcatttgcagacggctctgtgctgccacccaacgtatctatgaccaaggaagaacaatagaagtttaccttgcattggatgaccagcatgtgctaagaattaaagaagagggagacatcgggggagcatggcaatatattcaaccttataataacccaaatgcacatggcgattttttaaaaataaatagagcatatgaagtactcaaagatgaagatctacggaaaaagtatgacaaatatggagaaaagggacttgaggataatcaaggtggccagtatgaaagctggaactattatcgttatgattttggtaagggcatagctgaacaaaaggcagcagacaacttctgcagacttaaacgttcctgtctgacagctctgaagacagtggtggttctcccagaacggcatttgagctctgagaagggacagactgcctcttcaaaaatacaaactaccatcagagaatactataaacacctctacacaaataaactagaaaagctagaagaaatggataaattcctggacacaaacaccctcccaagactaaaccaggaagaagatgaatttctgaatagaccaatagcaggctctgaaattgaggcaataattaatagcctatcaaccaaaaaaagtccaggaccagaaggattcacagctgaattctaccagagctacaaagaggagctggtaccattcctgctgaaactattccaatcaatagaaacagagggaatcctccctaactcattttatgaggccaacatcatcctgataccaaagcctggcagagacacaacaaaaaaagggaattttagaccaatatccctgatgaacatcgatgtgaaaatcctaaatattgatgtgaaaatcctcaataaaatactggcaaactga

SEQ ID NO: 6270 - DNA, 2721 bp, Homo sapiens
  SIMILAR (1234)..(2718): 781254mologous to Homo sapiens putative p150,accession number U93574,Smith-Waterman Score=2019.
atggccctcttcagggtggggatgaccacaaggagactgggtcatgctaataaattcacaagagacttactggtaaaaagactactgctttatgaatttgtggtagaaattataccgggtttaagaaccaagaccacattggtgggtcccctggagacaggatatacatcaagtgactcagtgaacagtccccactttatgttggacatagctctatctcataatgtcaagagcacacagctgttgctaagaccatggaggaatattgactgttcaaggaaccacaagaacgcaaagaaggaggaacaaatgggggatgatgaaataaacaggcagcaggaatgcagctcctcaccagcaatggaacaaagctggacagagaatgactttgatgagttgagagaagaagtcttcagacgatcaaactactccgagctacaggaggaaattcgaaccaatggcaaagaagttaaaagctttgaaaaaaaattagacgaatggataactagaataaccaatgcagagaagtccttaaagcacctgacggagttgaaaaccaaggcacgagaactacaactagaaaagcaagagctaacacattcaaaagctagcagaaggcaagaaataactaagatcagagcagaactgaaggaaatagagacacaaaaaacccttcaaaaaattaacgaatccaggagctggttttttgaaaagatcaacaaaattgatagaccgctagcaagactaataaagaagaaaagagagaagaatcaaacagacacaataaaaaatgataaaggggatatcatcaccgatcccacagaaatacaaactaccatcagagaatactataaacacctctacacaaataaactagaaaatctagaagaaatggataagttcctggacacatacgtcctcccaagactaaaccaggaagaagttgaatctctgaatagaccaataacaggctctgaaattgaggcaataatcaatagcttaccaaccaaaaaaagtccaggaccagatggattcacagccgaattctaccagaggtacaaagaggagctagtaccattccttctgaaactatcccaatcaatagaaaaagagagaatcctccctaactcatcttatgaggccagcatcatcctgattccaaagcctggcagagacacaaccaaaaaagagaattttagaccaatatccttgatgaacatcgatgcaaaaatcctcaataaaatattggcaaacagaacccagcagcacatcaaaaagcttatccaccatgagcaagtgggctgcatccctgggatgcaaggctggttcaacatacgcaaatcaataaatgtaatccagcatataaatagaaccaaagacaaaaaccacatgattatctcaatagatgcagaaaagctgataagcaaattcagcaaagtctcaggacacaaaatcaatgtacaaaaatcacaagcattcttatacaccgataacagacaaacagagagccaaatcatgagtgaactcccattcacaattgcttcaaagagaataaaatacctaggaatccaacttacaagggatgtgaaggacctcttcaaggagaactacaaaccactgctcaatgaaataaaagaggatacaaacaaatggaagaacattccatgctcatgggtaggaagaatcaatattgtgaaaatggccctactgcccaagattcagtgccatccccatcaagttaccaatgactttcttcacagaattggaaaaaactactttaaagttcatatggaaccaaaaagagcccgcatcgccaagtcattcctaagccaaaagaataaagccggaggcatcacactacctgacttcaaactatactacaaggctacagtacccaaaacagcatggtactgctaccaaaacagagatatagatcaatggaacagaacagagccctcagaaataatgctgcttatctacaactatctgatctttgacaaacctgacaaaaagaaggaatggggaaaggattccctatttaataaatggtgctgggaaaactggctagccatatgtagaaagctgaaactggatcccttccttacaccttatacaaaaatgaattcaagatggattaaagacttacatgttagacctaaaaccataaaaaccctagaagaaaacctaggcaataccattcaggacgtaggcatgggcaaggacttcatgtctaaaacaccaaaagcaatgggaacaaaagtcaaaattgacaaatgggatctaattaaactaaagagcttctgcacagcaaaagaaactaccatcagagtgaacaggcaacctacagaatgggagaaaatttttgcaacctactcatctgacaaagggttaatatccagaatctacattgaactcaaacaaatttacaagaaagaaacaaacaaccccatcaaaaagtgggccaaggatatgaacagacacttctcaaaagaagacatttatgcagccaaaaaacacatgaaaaaatgctcatcatcactggccatcagagaaatacaaatcaaaaccacaatgagaaagcatctcataccagttagaatggtgatcattaaaatgtcaggaaacaacaggtgctggagaggatgtggagaaacaggaacacttttacgctgttggtggaactgtaaactagttcaaccattgtggaagtcagtgtggtga

SEQ ID NO: 6271 - DNA, 2310 bp, Homo sapiens
  SIMILAR (1138)..(2307): 911254mologous to Homo sapiens putative p150,accession number U93568,Smith-Waterman Score=1900.
atgggcaaggtaaacctgctgatggagagtcatgaatgccagagtgagaatttcagaattgattcagtaacaatcagtaaacgaacattttgcctgcagtacactgttaggcactccatgtcctcaaacacaaggtctggccttgtacacaaacaaccagagaagtggcaagaatcaccacataatgtagaagaaaacctgagctgggccttacagggtggggaaggattaacaaggagaagaaaagaacagaatgagcaatcttatatggagttaaaaattggttatggtgtagaaaagctttttggaatttctgaagcaatttcagtggcctctgctgatgatacccagacaaacacggtctggagtggacctccagcaaactccaacaaacctgcagctgaggtcctgactgttagaaggaaaactaataaacagaaaggacatccacatcaaaaccccatctgtatgtcaccatcatcaaagaccaaagaaatacaaactaccatcagagaatactataaacacctctatgaaaataaactacaaaatctagaagaaatggataaattactggacacatacaccctcccaagactaaaccaggaagaagttgaatccctgaatagaccaataacaggctctgaaattgaggcaataatgaatagcctaccaaacaaaaaaagtccaggaccagatggattcacagccgaattctaccagaggtacaaagaggagctggtaccattccttctgaaactattccaatcgatagaaaaagagggaatcctccctaactcattttatgaggccagcatcattctgataccaaagcctggcataaaaacaacaaaaaaagagagttttagaccaatatccctgatgaacatcgatgcaaaaatcctcaataaaatactggcaaaccgaatccagcagcccatcaaaaagcttatccaccacgatcaagttggcctcatccctgggttgcaaggctggttcaacatacacatatcaatagacataatccatcatataaacagaaccaatgacaaaaaccacataattatctcaatagatgcagaaaagggctttgacaaaattcaacagcccttcatgctaaaaactctcaataaactagcccaaaatctccttaagctgataagcaacttcagcaaagtctcaggatacaaaattaatgtgcaaaaatcacaagcattcctatacactaataacagacaaacagagagccaaatcatgagtgaactcccattcacaattgcttcaaagagaataaaatacctaggaatccaacttacaagggatgtgaaggacctcttcaaggagaactacaaaccactgctcattggaataaaagaagacacaaataaatggaagaacattccatgctcatggataggaagaatcaatatcgtgaaaatggtcatactgcccaaggtaatttatagattcaatgccatccccatcaagctaccaatgactttcttcacagaattggaaaaaattactttaaagttcatatggaaccaaaaaagagcccacattgccaagacaatcctaagccaaaagaacaaagctggaggcatcacgctacctgacttcaaactatactacaaggctacagtaaccaaaacagcacggtactggtaccaaaacagagatatagaccaatggaacagaacagagccctcagaaataataccatacatctacaaccatctgatctttgacaaacctgacaaaaacaagaaatggggaaaggattccccatttaataaatggtgctgggaaaactggctagccttatgtagaaagctgaaactggatcccttccttataccttatacaaaaattaattcaagatggattaaagacttaaatgttagacctaaaaccataaaaaccctagaagaaaacctaggcaataccattcaggacataggcatgggcaaggacttcaggactaaaacaccaaaagcaatggcaacaaaagccaaaattgacaaatgggatctaattaaactaacgagcttctgcacagcaaaagaaactatcatcagagtgaacacgcaacctacagaatgggagaaaatttttgcaatctacgcatctgacaaagggctaatatccagaatctacaaagaacttaaacaaatttacaagaaaaaatcaaacaaccccatcaaaaagtgggcaaaggatatgaacagacacttctcaaaagaagatgtttatgcagccaaaagacacatgaaaaaatgctcatcatcactggccatcagaaaaatgtaa

SEQ ID NO: 6272 - DNA, 1992 bp, Homo sapiens
  SIMILAR (1276)..(1989): 941254mologous to Homo sapiens putative p150,accession number U93563,Smith-Waterman Score=1148.
gaacgcagctccgcaccagcaacggaaagctggatggagaatgactttgacgagttgagagaagaaggcttcagacgatcaaactactccgagctaaaggaggaagttcgaacccatggcaaagaagttaaaaaccttgaaaaaagattagacaaatggctaactagaataatcaatgcagagaagtccttaaaggacctgatggagctgaagaccatggcacgagaactacgtgatgaatgcacaagcctcagtagccaattcaatcaactggaagaaagggtatcagtgatggaagatcaaatgaatgaaatgaagaaagaagagaagtttagaagaaaaagaataaaaagaaaggaacaaagcctccaagaaatatgggactatgtgaaaagaccaaatctacgtctgattggtgtacctgaaagtgacggggagaatagaacgaagttggaaaacactctgcaggatattatccaggagaacttccccaatctagcaaggcaggccaacattcaaattcaggaaatacagagaacgccacaaagatactcctcgagaagagcaactccaagacacataattgtcagattcaccaaagttgaaatgaaggaaaaaatgttaagggcagccagagagaaagaaatacaaactaccatcagagaatactataaacacctctatgcaaataaactagaaaatctagaagaaatggataaattcctcgacacatacactctcccaagactaaaccaggaagaagttgaaactctgaatagaccaataacaggttctgaaattgaggcaataattaatagcttaccaaccaaaaaaagtccaggaccagatggattcaccgccgaattctaccagaggtacaaggaggacctggtaccattctttctgaaactattccaatcaatagaaaaagagggaatcctccctaactcattttatgaggccagcatcatcctgataccaaagcctggcagagacacaaccaaaaaagagaattttagaccaatatccctgatgaacagtgatacaaaaatcctcaataaaatactggcaaaccgaatccagcagcacatcaaaaagcttatccaccatgatcaagtgggcttcatccctgggatgcaaggctggttcaacatacgcaaatcaataaacataatccagcatataaacagaaccaacgacaaaacccacatgattatctcaatagatgcagaaaaggcctttaacaaaattcaacagcccttcatgctaaaaactctgaataaattagtgttggaagttctggccagggcaatcaggcaagagaaagaaataaagggtattcaattaggaaaagaggaagtcaaattgtccctgtttgcagatgacatgattgtatatctagaaaaccccatcgtctcagcccaaaatctccttaagctgataaacaacttcagcaaagtatcaggatacaaaatcaatgtgcaaaaatcacaaatattcttatacaccaataacagacaaacagagagccaaatcatgagtgaactcccattcacaattgcttcaaagacaataaaatacctaggaattcaacttacaagggatgtgaaggacctcttcaaggagaattacaaaccactgctcaatgaaataaaagaagatacaaacaaatggaacaacattccatgctcatgggtaggaagaatcaatatcatgaaaatggccatactgcccaaggtaatttatagattcagtgccatcgccatcaagctaccaatgactttcttcacagaactggaaaaaactactttaaagttcatatggaaccaaaaaagagcccgcattgccaagtcaatcctaagccaaaagaacaaagccggaggcatcatgctacctgacttcaaactatactacaaggctacagtaaccaaaacagcatggtactggtaccaaaacagagatattgatcaatggagcagaacagagccctga

SEQ ID NO: 6273 - DNA, 3288 bp, Homo sapiens
  SIMILAR (2487)..(2534): 561254mologous to Homo sapiens putative p150,accession number U93572,Smith-Waterman Score=53.
atgaaggttgcttcacagtcttcccttctatctgattcagtggaccaagtaaatgactctctggtaactgcagaggctatttcctggaatgaatcaacgagtgaaacgaataactctatggtgactgaattcatttttctgggtctctctgattctcaggaactccagaccttcctatttatgttgttttttgtattctatggaggaatcgtgtttggaaaccttcttattgtcataacagtggtatctgactcccaccttcactctcccatgtacttcctgctagccaacctctcactcattgatctgtctctgtcttcagtcacagcccccaagatgattactgactttttcagccagcgcaaagtcatctctttcaagggctgccttgttcagatatttctccttcacttctttggtgggagtgagatggtgatcctcatagccatgggctttgacagatatatagcaatatgcaaacccctacactacactacaattatgtgtggcaacgcatgtgtcggcattatggctgtcgcatggggaattggctttctccattcggtgagccagttggcctttgccgtgcacttacccttctgtggtcccaatgaggtcgatagtttttattgtgaccttcctagggtaatcaaacttgcctgtacagatacctacaggctagatattatggtcattgctaacagtgaaatacaaactaccatcagagaatactacaaacacctctatgcaaataaactagaaaatctagaagaaatggataaattcctggacacatacactctcccaagactaaaccaggaagaagttgaatctctgaatagaccaataacagaagctgaaattgtggcaataatcaatagcttaccaaccaaaaagagtccaggaccagatggattcacagccgaattctaccagaggtacaaggaggaactggtaccattccttctgaaactattccaatcaatagaaaaagagggaatcctccctaactcattttatgaggccagcatcattctgataccaaagccaggcagagacacaacaaaaaaagagaattttagaccaatatccttgatgaacattgatgcaaaaatcctcaataaaatactggcaaaacgaatccagcagcacatcaaaaagcttatccaccaagatcaagtgggcttcatccctgggatgcaaggctggttcaatatatgcaaatcaataaatgtaatccagcatataaacagagccaaagacaaaaaccacatgattatctcaatagatgcagaaaaagcctttgacaaaattcaacaacgcttcatgctaaaaactctcaataaattaggtattgatgggacgtatttcaaaataataagacctatctatgacaaacccacagccaatatcatactgaatgggcaaaaactggaagcattccctttgaaaactggcacaagacagggatgccctctctcaccactcctattcaacatagtgttggaagttctgcccagggcaactaggcaggagaaggaaataaagggtattcaattaggaaaagaggaagtcaaattgtccctgtttgcagacgacatgattgtatatctagaaaaccccattgtctcagcccaaaatcttcttaagctgataagcaacttcagcaaagtctcaggatacaaaataaatgtacaaaaatcacaagcattcttatacaccaacaacagacaaacagagagccaaatcatgagtgaactcccattcacaattgcttcaaagagaataaaatacctaggaatccaacttacaagggatgtgaaggacctcttcaaggagaactacaaatcactgctcaaggaaataaaagaggatacaaataaatggaagaacattccatgctcatgggtaggaagaatcaatattgtgaaaatggccatactgcccaaggtaatttacagattcaatgccatccccatcaagctaccaatgactttcttcacagaattggaaaaaactactttaaagttcatatggaaccaaaaaagagcctgcatcgccaagtcaatcctaagccaaaagaacaaagctggaggcatcacgctacctgacttcaaactatacgacaaggctacagtaaccaaaacagcatggtactggtaccaaaacagagatatagatcaatggaacagaacagagccctcagaaataatgccgcatatctacaactatctgatctttgacaaacctgagaaaaacaagcaatggggaaaggattccctatttaataaatggtgctgggaaaactggctagccatatgtagaaagctgaaactggatcccttccttacaccttatacaaaaatcaattcaagatggattaaagacttaaacgttagacctaaaaccataaaaaccctggaagaaaacctaggctttaccattcaggacataggcatgggcaaggacttcatgtctaaaacaccgagagaggcactcttatgcattgttggtgagaatacaaaatggagcaaagaccccagtgctttatccacacctccaacaagctgcagtcgaccacaaagaagaaacaagtctgtctcccatgggtcctacccacaccccctgctgttcaccatgaatgatagagtcaacagtgtgaaaacgaccatactgccaaaagcaacctacaaattcaatgcaattcccatcaaaataccaccatcattcttcacagaactagaaaaaacaaggctaaaattcacatggaaccaaaaaagagcccacatagccaaagcaagactaagcaaaaagaataaatctagaggcatcacattactcgacttcaaactatactataaggccatagtcaccaaaacagcatggtactggtataaaaataggcatatagaccaatggaatagaatagagaacccagaaataaagccaaatactttcagccaactgatctttgacaaagcaagcaaaaacataaagtggggaaaggacaccctattcaacaaatggtgctggtataattggcaagccacatgtagaagaatgcaactggatcctcatctctcaccttataaacaaatcaactcaagatggttcacagacttaaatctaagacctgaaaccataaaaattctagaagataagattggaaaaacccttctagacattggcttaggcaaagacttcacaatcaagaacccaaaagcaaacacaacaaagataaatagatgggacttaattaaactgaaagccttctgcacatcaaaataa

SEQ ID NO: 6274 - DNA, 4733 bp, Homo sapiens
  SIMILAR (2736)..(3899): 931254mologous to Homo sapiens putative p150,accession number U93569,Smith-Waterman Score=1950.
ggtgtgctgatctgcaaaccctggacacaatgcagccaattgagaggaaaagacagggctatattcatgagctgattcagaccgaagagcggtacatggctgaccttcagctcgtcgtcgaggtttttcagaaacgcatggcagagtcaggctttctcactgaaggggagatggccctgatttttgttaactggaaggagctcatcatgtccaacacaaagctgctgaaggctttgcgggtgcggaagaagaccgggggcgagaagatgccggtgcagatgattggggacatcctggccgctgagctgtcccacatgcaggcttacatcaggttctgcagctgccagcttaatggagcagctctgttacagcagaagacagatgaagacacagatttcaaagaatttttaaagaagctggcatctgacccgcggtgtaaaggaatgcccctctccagcttcctgctgaaacccatgcagaggatcacccgctacccactgctcatcagaagtcagcgttacctgtccctgtgtccccaagaacttgtgggagtacgagtttctcaagggcggaaagtgtcgtcttgttcaccgccgcgtttccagggcatggaagcagtccataacatggggttggaggagcggtcctgcgaaggtccaggtgggcagattctggagaacaccccggagagccatgcagaccattcctccctaaagctggccctcgagcgggcagaggagctgtgctctcaagtgaatgagggagttcgggagaaggaaaactcggaccgactggagtggatccaggcgcacgtgcagtgtgaaggcctcgcggagcaacttattttcaactctctcaccaactgcctggggccccggaagctcttacacagtgggaaattatacaagaccaagagcaacaaggaactgcacggattcctcttcaatgacttcctgcttcttacctacatggtcaagcagtttgctgtttcctctggctctgagaaacttttcagctcgaagtccaatgctcaattcaaaatgtataaaacgcccattttcctgaatgaagtcttggtgaaactgcccacagacccttccagcgatgagcctgtcttccacatttcccacattgatcgggtctacaccctccgaacagacaacattaatgagaggaccgcctgggtgcagaagatcaaggcggcgtctgagcagtacatcgacaccgagaagaagaagcgtgagaaagcttaccaagcccgctcccaaaagacttcaggcattgggcgcctgatggtgcatgtcattgaagctacagaattaaaagcctgcaaaccaaatggaaagagcaacccatactgtgaaatcagcatgggctcccagagctacaccaccaggaccatccaggacacactcaatcccaagtggaattttaactgccagttctttattaaggatctctaccaagacgtgctgtgtctcaccctgtttgacagagaccagttttcaccagatgatttcctgggtcgtactgaaattccagtggcaaaaattcgaacagaacaggaaagcaaaggccctatgacccgccgactgctgctgcatgaggtccccaccggggaggtctgggaacgcagttcctcaccagcaacagaacaaagctggacggagaatgactttgacgagttgagagaagaaggcttcagacgatcaaactactctgagctacaggaggaaattcaaaccaatggcaaagaagttaaaaactttgaaaaaaaattagacgaatggctacctagaatatccaatgcagagaagtccttaaaggagctgatggagctgaaagccaaggctcaagaactacgtgaagaatgcagaagcctcaggagccgatgcgatcaactggaagaaagggtatcagtgatggaagacgaaatgaatgaaatgaagagctggttttttgaaaagatcaacaaaattgatagaccgctagcaagactaataaagaagaaaagagagaagaatcaaatagacgcaataaaaaatgataaagggggtatcaccaccgatcccacagaaatacaaactaccatcagagaatactacaaacacctctacgcaaataaactagaaaatctagaagaaatggataaattcctggacacatacaccctcccaagactaaaccaggaagaagttgaatctatgaatagaccaataacaggctctgaaattgtggcaataatcaattgcttaccaaccaaaaaaagtccaggtccagatgaattcacagccgaattctaccagaggtacaaggaggagctggtaccattccttctgaaactattccaatcaatagaaaaagagagaatcctccctaactcattttatgaggccagcatcatcctgataccaaagcctgacagagacacaaccaaaaaagagaattttagaccaatatccttgatgaacattgatgcaaaaatcctcaataaaatactggcaaaccgaatccagcagcacatcaaaaagcttatccaccatgatcaagtgggcttcatccctgggatgcaaggctggttcaacatacgaaaatcaataaacgtaatccagcatataaacagaaccaaacacaaaaaccacatgattatctcaatagatgcagaaaaggcctctgacaaaattcaacaacccttcatgctaaaaactctccgtaaattaggtattgatgagacacaaacagagagccaaatcatgagtgaactcccattcacaattgcttcaaagagaataaaatacctaggaatccaacttacaagggacgtgaaggacctcttcaaggagaactacaaaccactgctcaatgaaataaaagaggatacaaacaaatggaagaactttccatgctcatgggtaggaagaatcaatattgtgaaaatggccatagtgcccaaggtaatttatagattcaatgccagccccatcaagctaccaatgactttcttcacagaattggaaaaaactactttaaagttcatatggaaccaaaaaagagcctgcattgccaagtcaatcctaagccaaaagaacaaagctggaggcatcatgctacctgacttcaaactatactacaaggctacagtaaccaaaacagcatggtactggtaccaaaacagagatatagaccaatggaacagaacagagccctcagaaataacgccgcatatctacaactatctgttctttgacaaacctgacaaaaacaagcaatggggaaaggattccctatttaataaatggtgctgggaaaactggctagccatatgtagaaagctgaaattggatcctgtacttacaccttatacaaaaattaattcaagatggattaaagacttacatgttagacctaaaaccataaaaaccctagaagaaaacctaggcattaccattcaggacataggcatgggcaaggacttcatgtctaaaacaccaaaagcaatggcaacaaaagccaaaattgacaaatgggatctaattaaactaaagagcttctgcacagcaaaagaaactaccatcagagtgaacaggcaacctacagaatgggagaaaatttttgcaacctactcatctgacaaagggctaatatccagaatctacaatgaactcaaacaaatttacaagaaaaaaacaaacaaccccatcaaaaagtgggcgaaggacatgaacagacacttctcaaaagaagacatttatgcagacaaaaagcacatgaaaaaatgctcatcatcactgatcatcagagaaatgcaagtcaaaaccacaatgagataccatctcacaccagttagaatggcgatcattaaaaagtcaggaaacaacagcctctttagaggtcatggagccaaagaatcttatgttgacaaggacaagaggggccatctacattcaggagttccttttcaaaagtccccagcaggatttgcaaaagctgagagaggatccaggagaagtgtagtagctgcaggcctgctgccgtctctcaccagcaacatgagccggcagacaaatgacaacacatgcacggctgccacagtgccgagctaccgaatgcacagacaatatgatgctgtcctgtcctgtgcaagatgtctcttgtggcccaccctaactggaattatgcagaaaagggaattctgggaagcacagttcagccttgccatggtgacatgtaacaatgtggcaggccagaccccaccccatacaacagaaccaagaaagaaaaaaggtgtgatggcaaaactctctggggctttcactggcaaatctgtcttctcaggtgagagctcaatgggagaggaaagccctgcaggaatgcgaaatggaacaggtgctagggtggggcaggaggagagggtgggagttgggaaggaaaggcagctgaggaagaaagaactggaggtgggactccctgaattagaatctccagggagtgaggccagagtggtgtcgagctgcatgtccccctctgatgcgcaggcatatttgggacaccactccccgcccccagctgtgggccacctgggaacttgcttggctacctctagatatactgattcctgtaccttccagtggttctgtttgctgtctggatacatttggtctttgcctactcaatgtgaagatggcgaggatgaagacctttatgatggtccacttccatttaatgaatggtaa

SEQ ID NO: 6275 - DNA, 2816 bp, Homo sapiens
  SIMILAR (601)..(1446): 921254mologous to Homo sapiens putative p150,accession number U93572,Smith-Waterman Score=1352.
atggggaaaaaacagaacagaaaaactggaaactctaaaaagcagagcgcctctcctcctccaaaggaacgcagttcctcaccagcaacggaacaaagctggatggagaatgactttgacgagatgagagaagaaggcttcagacgatcaaattactctgagctacgggaggacattcaaaccaaaggcaaagaagttgaaaactttgaaaaaaatttagaagaatgtataactagaataaccaatacagagaagtgcttaaaggagctgatggagctgaaaaccaaggctcgagaactacgtgaagaatgcagaagcctcaggagccgatgcgatcaactggaagaaagggtatcagtgatggaagatgaaatgaatgaaatgaatgatggggagaatggaaccaagttggaaaacactctgcaggatattatccaggagaacttccccaatctagcaaggcaggccaacgttcagattcaggaaatacagagaacgccacaaagatactcctcgagaagagcaactccaagacacataattgtcagattcaccaaagtggaaatgaaggaaaaaatgttaagggcagccagagagaaagactttaaaccaacaaagatcaaaagagaaaaagaaggccattacataatggtaaagggatcaattcaacaagaagagctaactatcctaaaaatatatgcacccaatacaggagcaccaagattcacaaagcaagtcctgagtgacctacaaagagacttagactcccacacattaataatgggagactttaacaccccactgtcaacattagacacatcaacgagacagaaagtcaagaaggatacccaggaattgaactcagctctgcaccaagcggacctaatagacatctacagagctctccaccccaaatcaacagaatatacatttttttcagcaccacaccacacctattccaaaattgaccacatagttggaagtaaagctctcctcagcaaatgtaaaagaacagaaattataacaaactatctctcagaccacagtgcaatcaaactagaactcaggattaagaatctcactcaaaaccactcaactacatggaaactgaacaacctgctcctgaatgactactgggtacataacgaagtgaaggcagaaataaaggtgttctttgaaacgaaggagaacaaagacacaacataccagaatctctgggacgcattcaaagcagtgtgtagagggaaatttatagcactaaatgcccacaagagaaagcaggaaagatccaaaattgacaccctaacatcacaattaaaagaactagaaaagcaagagcaaacacattcaaaagctagcagaaggcaagaaataactaatatcagagcagaactgaaggaaatagagacaaaaaaacccttcaaaaaaatcagtgaatccaggagctgaaatacaaactaccatcagagaatactataaacacctctatgcaaataaacaagaaaatctagaagaaatggataaattccttgacacatacaccctcccaacactaaaccaggaagaagttgaatctctgaatagaccaataacaggctctgaaattgaggcaataattaatagcttaccaaccgaaaaaactccaggaccagatggattcacagccgaattctaccagaagtacaaggaggagctggtaccattccttctgaaactattccaatcaatagaaaaagagggaatcctccataactcattttatgagaacagcatcatcctgatactaaagcctggcagagacacaaccaaaaaagagaattttagaccaatatccctgaagaacattgatgcaaaaatcctcaataaaatactggcaaaccaaatccagcagcacatcaaaaagcttatccaccatgatcaagtgggcttcatccctgggatgcaaggctggttcaacatacacaaatcaaataaatgtaatccagcatataaacagaaccaaagacaaaaaccacatgattatctcaatagatgcagaaaaggcctttgacaaaactcaacagcccttcatgctaaaaactctcaataaattaggtattgatgggatgtatctaaaaataataagagctatttatgacaaactcacagccaatatcatactgaatgggcaaaaactggaagcattccctttgaaaactgccacaagacagggatgccctctctcaccactcctattcaacatagtgttggaaattctgaccagggcaatcaggcaggagaaagaaataaagggtattcaattaggagaagaggaagtcaaattgtccctgtttgcagatgacatgattgtatatctagaaaaccctatcatctcagcccaaaatctccttaagctgataagcaacttcagcaaagtctcaggatacaaaatcaatgtgcaaaaatcacaagcattcttacacaccaataacagacaaacagagagccaaatgatgagtgaactcccattcacaattgcttcaaagagaacaaaatacctaggaatccaacttacaagggatgtgaaggacctcttcaaggagaactacaaaccactgctcaatgaaataaaagaggacacaaacaaatggaagaacattccatgctcatggataggaagaatcaatatcgtgaaaatggccatactgcccaaggtaatttatagattcaatgccatccccatcaagctaccaatgactttcttcacagaattggaaaaaactactttaaagttcatatggaaccaaaaaatagcctgcattgcaaatcaatcctaa

SEQ ID NO: 6276 - DNA, 2979 bp, Homo sapiens
  SIMILAR (754)..(2322): 881254mologous to Homo sapiens putative p150,accession number U93568,Smith-Waterman Score=2319.
atgcctggcactccagcagccaaattggatgctaaagacaaagaccaaaccctaagaatggcagataagggtactggaaggaacctggaggtccttggtaaatctgtagcagaggctatttggaggacaaaacccacccatccaggactcagaggggttagtggtgagctatttagtgcctgctccctgtctcttgtgctctacctgtgcatgctgcatcccatggaccttcagatcctggcactgacagtcatttgtaaggagactgcaagtaaagagtctctagccatgttcgactacgacaagagcaaggacagtgggctgccaagtcaaggacttagttttaaatatggagatattctccacgttatcaatgcctctgatgatgagtggtggcaagccaggagagtcatgctggagggagacagtgaggagatgggggtcatccccagcaaaaggagggtggaaagaaaggaacgtgcccgattgaagacagtgaagtttaatgccaaacctggagtgattgattcgaaagggcctaactgggagtcaccccccagtaagggcagactgacacctcacatggccgagtactcctctgagacaacactgccagaggaacgatcaggcagcaacatttgctgttcaccaatatccgctgttctgcagcctctgctgctgatacccaggcaaacagggtctggagtggacctccggcaaactccaacagacctgcagctgagggtactgactgttagaaggaaaactaacaaacagaaaggacatccacaccaaaaccccatctgtacgtcaccatcatcaaagaccaaagaaacacaaactaccatcagagaatactataaacacctctacgcaaatagactagaaaatctagaagaaatggataaattcctggacacatacaccctcccaagactaaaccaggaagaagttgaatctctaaatagacgaataacagaatctgatattgaggcaataattaatagcttaccaaccaaaaaaagtccaggaccagatggattcacagccgaattctaccagaggtacaaggaggagctggtaccattccttctgaaactattccaatcaatagaaaaagagggaatcctccctaactcattttatgaggccagcatcatcctgataccaaagctgggcagagacacaacaaaaaaagagaattttagaccaatatccctgatgaacatcgatgcaaaaatcctcaataaaatactagcaaaccgaatccagcagcacatcaaaaagcttatccaccatgatcaagtgggcttcatccctgggatgcaaggctggttcaacatatgcaaatcaataaatgtaatccatcatatgaagagaaccaaagacaaaaaccacatgattatctcaatagatgcagaaaaggcctttgacaaaattcaacaacccttcatgctaaaaactctcaataaattaggtattgatgggacatatctcaaaataataagagctatctatgacaaacccacagctaatatcatactgaatgggcaaaaactggaagcattccctttgaaaactggcacaagacagggatgccctctctcaccactcctattcaacatagtgttggaagttctggccagggcaatcaggcaggagaaggaaataaagggctttcaattaggaaaagaggaagtcaaattgtccctgtttgtagatgagatgattttatctttagaaaaccccatggtctcagccaaaaatctccttaagctgataagcaacttcagcaaagtctcaggatacaaaatcaatgtgcaaaaatcacaagcattcttatacaccagtaacagacaaacagagagccaaatcatgagtgaactcccattcacaattgcttcaaagagaataaaatacctaggaatccaacttacaggagatgtgaaggatttcttcaaggagaactacaaaccactgctcaatgaaataaaagaggatacagacaaatggaagaacattccatgctcacgggtaggaagaatcaatatcatgaaaatggccatactgcccaaggtaatttatagattcaatgccatccccatcaagctaccaatgactttcttcacagaattggaaaaaactactttaaagttcatatggaaccaaaaaagagcccgcattgccaagtcaatcctaagccaaaagaacaaagctggaggtatcacgctacctgacttcaaactatactacaaggctacagtaaccaaaacagcgtgccatagagtgggccgtgcacagcagcattccatcagcaaatggaagtggtatatacatgattggtctcaagtaggtcctgaaggcacaaatgattctgcacgatatccagataccacccaaaagtggacagctgcagcactacagcccctttctaggacatccctgaaggacagccatgaagggaaatcttcccagtgggcagaacttagagcagtgcacctggttttgcgctttgcatggaaggagaaatggccagatgtgcaattatatactgattcatgggctgtagccagtggtttggctggatggtcagggacttggaagaagcatgattggaaaattggtgacaaagaaatttggggaagagccacccctgtcatcgcccaatgggcccatgaacaacgtggccatggtggcagggatggagattatgcatgggctcagcaacatgggcttccactcaccagggatgacctggctacagccactgctgagtgccccatttgccagcagcagagaccaacactgagccctcaatatggcaccattcctcaggccaggattcacgggtccaggaatcaacgggtggaagtggaagcggcaccactcaccatcactcctagtgatccactagcaaattttttgcttcctcctcccacaacattacattctgctggcctagatagtctgctggcctag

SEQ ID NO: 6277 - DNA, 6369 bp, Homo sapiens
  SIMILAR (3721)..(5406): 851254mologous to Homo sapiens putative p150,accession number U93570,Smith-Waterman Score=2487.
atggaagacgaaatgaatgaaatgaagcgagaagggaagtttagagaaaaaagaataaaaagaaatgaacaaagccaccaagaaatatgggactatgtgaaaacaccaaatctacgtctgattggtgtacctgaaactgacggggagaatggaaccaagttggaaaacactctgcaggatattatccaggagaacttccccaatctagcaaggcaggccaacattcagattcaggaaatacagagaacaccacaaagatactcctcgagaagagcaactccaagacacataatcatcagattcaccaaagttgaaatgaaggaaaaaatgttaagggcagccagagagaaaggtcaagttacccacaaagggaagcccatcagactaaaagcggatctctcggcagaaactctacaagccagaagacagagctggtttcattgaaaagatcaacaaaattgatagaccactagcaagactaataaagaaaaaaagagagaagaatcaaatagacgcaataaaaaatgataaaggggatatcaccactgatcccacagaaatacaaactaccatcagggaatactataaacacctctacgcaaataaactagaaaatctagaagaaatggataaattcctggacacatacaccctcccaaggctaaaccaagaagaagttgaatctcttaatagaccaataacaggctctgaaattgaggcaataattaatagcctcccaaccaaaaaaaaggacaggacctgatggattcacagctgaattctaccagaggtacaaagaggaactggtgccattgcttctgaaactatgccaatcaatagaaaaagagggaatcctccctaactcattctatgaggccagcatcatcctgataccaaagctgggcagagacacaacaaaaaaggagaattttagaccaatatccctgatgaacattgatgcaaaaatcctcaataaaatactggcaaaccgaatccagcagcacatcaaaaagcttatccaccatgatcaagtgggcttcatccctgggatgcaaggctgtgttggaagttctggccagggcaataggcaggagaaggaaataaagggtattcaattaggaaaagaggaagtcaaattgtccctgtttgcagatgacatgattgtatatctagaaaaccccactgtctcagcccaaaatctccttaagctgataagcaacttcagcaaagtctcaggatacaaaatcaatgtacaaaaatcacaagcattcttatacaccaacaacagacaaacggagagccaaatcatgagtgaactcccattcacaattgcttcaaagagaataaaatacctaggaatccaacttacaagggatgtgaaggacctcttcaaggagaactacaaaccactgctcaatgaaataaaagaggatacaaacaagtggaagaacattccatgctcatggataggaagaatcaatatcgtgaaaatggccatactgcccaaggtaatttatacattcaatgccatccccatcaagctaccaatgactttcttcacagaattggaaaaaactactttaaagttcatatggaaacaaaaaagatcccacatcgccaagtcaatcctaagccaaaagaacaaagctggagacatcacactacctgacttcaaactacactacaaggctacagtaaccaaaacagcatggtactggtaccaaaacagagatatagatcaatggaacacaacagagccctcagaaataatgctgcatatctacaaccatctgatctttgacaaacctgacaaaaacaagcaatggggaaatgattccctatttaataaatggtgctgggaaaactggctagccatatgtagaaagctgaaactggatcccttccttacatcttatacaaaaatcaattcaagatggattaaagacttaaatgttagacctaaaaccataaaaaccctagaagaaaacctaggcaataccattcaggacataggcatgggcaaggacttcatgtctaaaacaccaaaagcagtggcaacaaaagccaaaattgacaaatgggatgtaattaaactaaagagcttctgcacagcaaaggaaactaccatcagagtgaacaggcaacctacagaatgggagaaaattttcgcaacctactcatcggacaaagggctaatatccagaatctacaatgaactcaaacaaatttacaagaaaaaaacaaacaaccccatcaaaaagtgggcaaaggatatgaacagacacttctcaaaagaagacatttatgcagccaaaagacacatgaaaaaatgctcatcatcactggccatcagagaaatgcaaatcaaaaccacaatgagataccatctcacaccaattagaatggtgatcattaaaaagtcaggaaacaacagagcacctgggggaaggggtggctgtgggtgcagctttggcagacttaaacgttcctgcgtgccagctctgaaaagagtagcagatctcccagcacaacgctcgagctctgctaagggagagactgcctcctcaagtgggtccctgaaccccgtgccccctgactgggagaaacctcccagcaggggtcgacagacacctcatactggagaactccggctagcatctgacgggtgcctctctgggatgaagcttccagaggaaggaataggcagcagtctttgctgttctgcagcctctgctggtgatacccaggcaaatggggtccggagtggactgccagcaaactccagcagacctgcagcagaggggcctgttagaaggaaaactaacagacagaaaggaatagtatcaacttcaacaaaaaggacgtccacaccaaaaccccatccaaaggatcacaactcctcgccagcaatggaacaaaactggatggagaatgcgtttgacgaattgacagaagtaggcttcagaaggtgggtaataacaaacttctccaagctaaaggagcatgttctaactcaatgcaaggaagctaagaagcttgaaaaaaggttagaggaattgctaactagaataaccagtttagagaagaacataaatgacctgatggagctgaaaaacacatcacaagaacttcgtgaagcatacacaacggaagaaaggatatcagagattgaagatcaacttaatgaaataaagcatgaagacaggattagagaaaaaaatgaaaaggaacgaacaaagcctccaagaaatatgggactacgtgaaaagaccaaatctacctcttattggtgtacccgaaagtgacggggataacgcaaccaagttggaaaacactctgcaggatattatccaggagaactgccccaatctagcaaggcaggccaacattcaaattcaggaaatacagagaacgccacaaagatactcttcgagaagagcaactccaagacacataattgtcagattcaccaaagttgaaatgaaggaaaaaatgttaagggcagccagagagaaaggtcgggtcacccacaaagggaagcccatcaggctaacagctgctctctcagcagaaactctacaagccagaagagacaggaggccaatattcaacattcttaaagaaaagaattttcaacccagaatttcatatccagccaaactaagcttcgtaagtgaaggagaaatagaatactttacagacaagcaaatgctgagagattttctcatgaccaggcctgccctaaaagagctcctgaaggaagcactgaacatggaaacaaccggagcacccagattcataaagcaagtccttagagagctacaaagagacttagacacccacacaataataacgggagactttaacaccccactgtcaacatcagacagatcaactagacagaaagttaacaaggatatccaggaactgaactcagctctgcaccaagcggacctaatagacatctgcagaactctccaccccaaatcaatagaatatacattcttttcagcaccacaccacacctattccaaaattgaccacatagttggaagtaaagcactcctgagcaaatgcaaaagaacagaaattataacaaactgtctctcagaccacagtgcaatcaaactagaactcaggattaagaaactcactcaaaaccgctcaactacatggaaactggacaatctgctcctgaatgactactgggtacataacgaaatgaagacagaaataaagatgttctttgaaaccaatgagaacaaagacacaacataccagaatctctgggacacattcaaagcagtgtgcagagggaaatttatagcactaaatgcccacaagagaaagaagacaagatctaaaattgacaccctaacatcacaattaaaagaactagagaagcaagagcaaacacattcaaaagctagcagaaggcaagaaataactaagatcagagaagaactgaaggaaatagagacacaaaaaacccttcaaaaaatcaatgaatccaggagctggttttttgaaaagatcaacaaaattgatagaccactagcaagactagtaaagaagaaaagagagaagaatcaaatagacgtaataaaaaatgataaaggggatatcaccaccgatcccacagaaatactaactaccatcagagaataccataaacacctctacacaaataaactagaaaatctagaagaaatggataaattcctcaacacatacaccctcccaagactaaaccaggaagaagttgaatctctgaatagcccaataacaggctctgaaattgaggcaataattaatagcttatcaatgaaaaaaagtacaggaccagatggattcacagccgaattctaccagaggtacaaggaggaactggtaccattccttctgaaactattccaatcaatagaaaaagagggaatcctccctaactcattttatgaggccagcatcatcctgataccaaagcctggcagagacacaacaaaaaaagagaattttggaccaatattcctgatgaacatcaatgcaaaaatcctcaataaaatactggcaaacagaatccagcagcacatcaaaaagcttatccaccatgatcaagtgggctccatccctgggatgaaaggctggttcaacatatgcaaatcaataaatgtaatgcagcatataaacagaaccaaatacaaaaaccacatgattatctcaatagatgaagaaaaggcctttcagaaaattcaaaagcgcttcatgctaaaaactctcaataaattaagtattgatgggacatatctcaaaataataagagcgatctatgacaaacccacagccaatatcatactgaatgggcaaaaactggaagcattccctttgaaaaaatggcacaagacagggatgtcctctctcaccagtcctattcaacatagtgttggaagttctggccagggcaatcagctgataagctgcttcagcaaagtctcaggatacaaaatcaatgtacaaaaatcacaagcattcttatacaccaacaacaggcaaacagagagccaaatcatgagtgaactcccattcacaattgcttcaaagagaataaaatacctaggaatccaacttacaagggatgtgaaggacctcttcaaggagaactacaaaccactgttcaatgaaataaaagaggacacaaacaaatggaagagcattccatgctcacgggtaggaagaatcaatattgtgaaaacggccatactgcccaaggtaatttatagattcaatgccatccccatcaagctaccaatgactttcttcacagaattggaaaaaactactttaaagttcatatggaaccaaaaaagagcctgcattgtcaagacaatcctaagcaaaaagaacaaagctggaggcatcacactacctgacttcaaacgatactacaaggctacagtaaccaaaacagcatgtcattccatgagcttggaaagacccagctggctaccagaacaactgtttccaccttccaacaaatccctggcatctaagttcagttgcgctttgacttctccagagatatcacacttctcagtctcctttgcagataggtgggaccatgtgagtgggttctacacagtggaatgtgggcagatgccatatataccccttccaggcttgtcccgtaggcttctggcagaatgcttcatgacttctctcttcccttgcctgcaggctgaaagcaaagggcccagtggaggatggcaaagcctcataagacagaaaagccacaccacagaaaagcctgggaccctgaatgactgtgtgaaccagagagtcttgaaagccattcccataactgtacttaactga

SEQ ID NO: 6278 - DNA, 2885 bp, Homo sapiens
  SIMILAR (1745)..(2296): 741254mologous to Homo sapiens putative p150,accession number U93563,Smith-Waterman Score=649.
atgccagatgagctgatactgatcacggtcagattttggaaacgagctgaggatagcggtgcaaccagagggtgctctgtgataaaaagcctgggacctcatgactggcccacagttcagccactgcaggtttcatgcttggtgctggagggtctccaggacctgcgcctgcatggttcctccatcctgccaactagaaatttccacatcactcacatgagaccacctcctgaaatctaccaagaatgtgtgcattttcctaatttgtacaatggtaaaaatagtgaggattctggtggaaattattggcaacggaagaatctctgggacacagctaaagcagtgtttagagggaaatttatagcattagacgcccacaggagaaagctggaaagacctaaaatcgaccccctatcatcaaaattaaaagaactggagaagaaagagcaaacaaattcaaaagctagaagaaggcaagaaataactaagatcagagcagaattgaaggagatagagacacaaaaagcccttcaaaaaatcaatgaatccaggagctggttttttgaaaagatcaacataattgatagaccgctagcaggactaataaagaataaaagggagaagaacaaaatagatgcaataaaaaatgataaaggggatattaccaccgatcccacagaaatacaaactaccatcagagaatactgtaaatacctctatgcaaagaaactagaaaatctagaagaaatggataaattcctggatacttacacccctccaagactaaaccagaaagaatttgaatctctgtatagaccaataataggctctgaaattgaggcaataattaatagcctaccaaccaaaaaaagtccaggaccagatggagtcacagccgaattctaccagaggtacaaagaggagctggtaccattccttctgaaactattccaatcaatagaaaaagagggaatcctccctaactcattttatgaggccagcatcatcctgataccaaagcctggcagagacacaacaaaaaaagagaattttagaccaatatccctgatgagcattgatgcaaaaatcctcaataaaatactggcaaaccaaatccagcagcacatcaagaagcttatccaccaagatcaagttggcttcatccctaggatgcccggctggttcaacatatgcacatcaataaacgtaatccatcacataaagagaaccagtgacaaaaatcacatgattatctcaatagatgcagaaaaggcctttgacagaattccacagtgcttcctgctaaaaactctcaataaactagtattggaagttctggccagggcaatcaggcaagacaaagaaataaagggtattaagttaggaaaagaggaagtcaaattgtccctgtttgcagatgacatgattgtttatttagaaatccccatcgactcagcccaaaatctccttaagctgataagcaacttcagcaaagtctcaggatacaaaatcaatgtgcaaaaatcacaagcattcccatacaccaataacagaaaaacagagatccaagccacgtgtgaactcccattcacaattgttacaaagagaataaaatacctaggaatccaacttactgagcactgcaaaccactgctcaatgaaataaaagaggacacaaacaaatggaagaacattcaatgctcatggataggaagaataaatatgaaaatggccatactgcccaagaccgctagccagactaataaaaatgaaaagagagaagaatcaaataaatgcaataaaaaatgataaaggggatatcaccaccgatcccacagaaatacaaactaccatcagagaatacttataaacacctctacacaaataaacttagaaaatctagaagaaatggataaattcctggacacatacagcctcccaagactaaaccaggaagaagttgaatcccttcagtagactaataacaggctctgaaattgaggcaataattaatagcttaccaaccaaaaaaagtccaggaccagacggattcacagccaaattctaccagaggtacaaagaggagctggtaccattccttctgaaactattccaatcaatagaaaaagagggaatcctccctaactcattttatgaggccaacatcatcttgataccaaagcctggcacagacacaacaaaaaaagagaatttcagaccagtatccctgatgaacattgatgcaaaaatcctcaataaaatactggcaaaccgaatccagcaaacacatcaaaaagcttatccaccatgatcaagtcagcttcatccctgggatgcaaggctgtttcaacatacacaaatcaataaacataatccatcatataaacagaaccaacaacaaaaaccacatgattatctcaatagatgcaggaaaggcctttgaccaaattcaatatcccttcatgctaagaactctcaataaactaggtactgatggaacatatctcaaaataataagagctacttatgacaaacccacagccaatatcatactgaatgggcaaaagctggaagcattccctttgaaaactgggagaagacaaggatgccttctctcaccactcctattcaacatagtgttggaagttctggccagggcaatcaggcaaaagaaagaaataaagggtattcgattaggaaaagaggaagccaaattgtccctgtttgcagatgacatgattgtatatctagaaaactccatcatctcagcccaaaatctccttaagctgataagcaacttcaccaaaggttcaggatacaaaatcaatgtgcaaaaatcacaagcattcctatactccattaacagacagagagccaaatcatga

SEQ ID NO: 6279 - DNA, 4698 bp, Homo sapiens
  SIMILAR (1)..(3063): 611254mologous to Mus musculus domesticus ORF2,accession number AF081111,Smith-Waterman Score=3378.
atggtaaagggatcaattcaacaagaggagctaactatcctaaatatttatgcacccaatacaggagcacccagattcataaagcaagtcctcagtgacctacaaagagacttagactcccacaaattaataatgggagactttaacaccccactgtcaacattagacagatcaaccagacagaaagtcaacaaggatacccaggaattgaactcagctctgcaccaagcggacctaatagacatctacagaactctccaccccaaatcaacagaatatatatttttttcagcaccacaccacacctattccaaaattgatcacatacttggaagtaaagctctcctcagcaaatgtaaaagaacagaaattataacaaactatctctcagaccacagtgcaatcaaactagaactcaggattaagaatctcactcaaagccgctcaactacatggaaactgaacaacctgctcctgaatgactactgggtacataacgaaatgaaggcagaaataaagatgttctttgaaaccaacgagaacaaagacaccacataccagaatctctgggacgcattcaaagcagtgtgtagagggaaatttatagcactaaatgcctacaagagaaagcaggaaagatccaaaattgacaccctaacatcacaattaaaagaactagaaaagcaagagcaaacacattcaaaagctagcagaaggcaagaaataactaaaatcagagcagaactgaaggaaatagagacagaaaaaacccttcaaaaaatcaatgaatccaggagctggttttttgaaaggatcaacaaaattgatagaccgctagcaagactaataaagaaaaaaagagagaagaatcaaaaaatacaaactaccatcagagaatattacaaacacctctacgcaaataaactagaaaatctagaagaaatggatacattcctcgacacatacactctcccaagactaaaccaggaagaagttgaatctctgaatagaccaataacaggctctgaaattgtggcaataatcaatagtttaccaaccaaaaagagtccaggaccagatggattcacagccgaattctaccagaggtacaaggaggaactggtaccattccttctgaaactattccaatcaatagaaaaagagggaatcctccctaactcattttatgaggccagcatcattctgataccaaagcctggcagagacacaaccaaaaaagagaattttagaccaatatccttgatgaacattgatgcaaaaatcctcaataaaatactggcaaaccgaatccagcagcacatcaaaaagcttatccaccatgatcaagtgggcttcatccctgggatgcaaggctggttcaatatacgcaaatcaataaatgtaatccagcatataaacagagccaaagacaaaaaccacatgattatctcaatagatgcagaaaaagcctgtgacaaaaatcaacaacccttcatgctaaaaactctcaataaattaggtattgatgggacgtatttcaaaataataagagctatctatgacaaacccacagccaatatcatactgaatgggcaaaaactggaagcattccctttgaaaactggcacaagacagggatgccctctctcaccactcctattcaacatagtgttggaagttctggccagggcaattagacaggagaaggaaataaagggtattcaattaggaaaagaggaagtcaaattttccctgtttgcagacgacatgattgtatatctagaaaaccccattgtctcagcccaaaatctccttcagctgataagcaacttcagcaaagtctcaggatacaaaatcaatgtacaaaaatcacaagcattcttatacaccaacaacagacaaacagagagccaaatcatgggtgaactcccattcacaattgcttcaaagagaataaaatacctaggaatccaacttacaagggatgtgaaggacctcttcaaggagaactacaaaccactgctcaaggaaataaaagaggacacaaacaaatggaagaacattccatgctcatgggtaggaagaatcaatatcgtgaaaatggccatactgcccaaggtaatttacagattcaatgccatccccatcaagctaccaatgactttcttcacagaattggaaaaaactactttaaagttcatatggaaccaaaaaagagcccgcattgccaagtcaatcctaagccaaaagaacaaagctggaggcatcacactccttgacttcaaactatactacaaggctacagtaaccaaaacagcatggtactggtaccaaaacagagacatagatcaatggaacagaacagagccctcagaaataatgccgcatatctacaactatctgatctttgacaaacctgagaaaaacaagcaatggggaaaggattccctatttaataaatggtgctgggaaaactggctagccatatgtagaaagctgaaactggatcccttccttacaccttatacaaaaatcaattcaagatggattaaagatttaaacgttaaacctaaaaccataaaaaccctagaagaaaacctaggcattaccattcaggacataggcgtgggcaaggacttcatgtccaaaacaccaaaagcaatggcaacaaaagacaaaattgacaaatgggatctaattaaactaaagagcttctgcacagcaaaagaaactaccatcagagtgaacaggcaacctacaacatgggagaaaattttcgcaacctactcatctgacaaagggctaatatccagaatctacaatgaactcaaacaaatttacaagaaaaaaacaaacaaccccatcaaaaagtgggtgaaggacatgaacagaaacttctcaaaagaagacatttatgcagccaaaaaacacatgaagaaatgctcatcatcactggccatcagagaaatgcaaatcaaaaccactatgagatatcatctcacaccagttagaaaggcaatcattaaaaagtcaggaaacaacagaaacatggatggagctggaggccattatcctaagcaaactaatgaaggaacagaaaaccaaataccagatgttctcacttgtaagtgggagctaaatgataagaacatatggacacaaagaggggaacaacacaccctggagcctgttggaggagaaggtgaattaagaaaagataatcactcaaccaaaaatgaccagtacgataataggcattttcaactggctgtaggaaatggccttatggctaagaccttcatggtcagtttcttctataaagccagtgcctacgttgtacccacaggagaattgccagatttagatataattcagttaaaacaatttggaaacgcattgtcacatctaacagtaggaacctcagtcactcaaatacaaaatttaaatacaatgggaataattggatcccaagatagcagggaccaactggccacactcaaatgtcaaggtaaaggggacccaaaatatcaatgtgatcctccagttaaagtaggtgctaatggaggtcagataattaatgaagttttagctcaggtccaacttacagtgggtccaaagacaaatggatattggagaatgacagtggattatcataagcttaaccaagatgtgactccaattgtagctgctgtaccagatgtggtttcattgcttgaggttatatcaactcttcaaaaagacttctattgctttttccttctgcaaaatatcacactggtccattatattgatggcattatgctgactgaatccagtgagcaagaagtagcagacacactggacttattgactagtatacgtggactcatggaatgccttatccaccatcatggtatcccacacagcattgcctctgaccaaggccctcactttatggctaaagaattgtgggagtgggctcatgctcatggaattcactggtcttaccatattccccatcatcctgaagcagctggattgatagaatggcggaatgaccttttgaagtcacaattacaacaccaactaggtgacaatgctttgcagggctggggcaaagttctccagaaggccatgtatgctctgaatcagcatccaatatatgttactgtttttcccattgccaggattcataagtcctggaatcaaggggtggaagtagaagtggcatcactcaccatcacccctagtgatccactagcaaaatttttgctttccgttcccacaacattacattctcctggcctagaggtcttagttccagctggaggaatgctgccaccaggagacacaacaatcccattgaactggaagttaatattgccacctggacactttgggctcctcctacctttaagtcaacaggctaagaaggcagttacagtgttggctagggtgattgacccagactatcaggatgaaatcagtctactactccacaatggaggtaaggaagagtatgcatggaattcaggagatccattaggtgtctcttggtattaccatgccctgtcattaaggtcaatgagaactacaacagtgcaatccaggcaggattacaaatggcccagatacctcaggaatgaagatttgggtcatgttaccagggaaaaaaaacacaacctgctgaggtgcttgctgaaggctaagggaatatag

SEQ ID NO: 6280 - DNA, 2917 bp, Homo sapiens
  SIMILAR (1)..(654): 831254mologous to Homo sapiens putative p150,accession number U93563,Smith-Waterman Score=939.
atgataatgggagactttaacaccccactgtcaacattagacagatcaacgagacagaaagttaacaaggatacctgggaattgaactcagctctgcaccaagcggacctaatagacatctacagaactccccaccccaaatcaacagaatatacattctttttagcaccacaccacacctattccaaaattgaccacatagctggaaataaagctctcctcagcaaatgtgaaagaacagaaattataacaaactgtctctcagaccacagtgccatcaaactacaactcaggattaagaaactcactcaaaaccactcaactacatggaaactgaacaacctgctcctgaatgactactgggtacataatgaaatgaaggcagaaataaagatattctttgaaaccaacaagaacaaagacacaacataccagaatctctgggacacatttaaagcagtgtgtagagggaagtttatagcactaaatgcccacaagagaaagcaggaaagatctaaaactgacaccagaacatcacaattaaaacatctagagaatcaagagcaaacacattcaaaagctagcagaagaagctggttttttgaaaagatcaacaaaattcatagaccactagcaagactaataaagaagaaaagagagaagaatcaaatagacgcaataaaaaatgataaaggggatatcaccaccaatcccacagaaatacaaactaccatcagagaatactataaacacctctacacaaataaactagaaaatctagaagaaatggataaattcctcgacacatacaccctcccaagactaaaccaggaagaagttgaatctctgaatagaccaataacaggctctgaaattgaggcaataattagcagcttaccaaccaaaaaaagtccaggaccagatggattcacagccgaattctaccagaagtacaaagaggagctgctaccattccttctgaaactattccaatcaatagaaaaagagggaatcctccctaactcattttaatgaggccagcatcatcctgataccaaaacctggcagagacacaacaaaaaaagagaattttagaccaatatccctgatgaacatcaatgcgaaaatcctcaataaaatactggcaaaccaaatccagcagcacatcaaaaagcttatcaaccatgatcaagttggcttcatccctgggatgcaaggctggttcaacatacacaaatcaataaatgtaattcatcacataaagagaaccaatgacaaaaaccacatgattatctcaatagatgcaggaaaggccttcaacaaaattcaacagtgcttcatgctaaaaactctcaataaactaaatattcatggagtgtatctcaaaataataagagctatttatgacaaacccacagccaatatcatactgaatgggcaaaaactggaagcattccctttgaaaactggcataagacagggatgccctctctcaccactcctattcaacagagtgttggaaattctggccagggcaatcaggcaagagaaagaaataaagcgtattcaattaggaaaagaggaagtcaaattgtccctgtttgcagatgacatgattgtatatttagaaaaccccatcgtctcagcccaaaatctccttaaactgatttgcaacttcagcaaaagaataaaatacctaggaatccaacttacaagggatgtgaaggacctcttcaagaagaactacaaaccactgctcaatgaaataaaagaggatacaaacaagtggaagaacattccatgctcatgggtaggaagaatcaatatcgtgaaaatggccatactgcccaaggtaatttatagattcaatgccatcccaatcaagctaccaatgactttcttcacagaattggaaaaaactactttaaagttcatatggaaccaaaaaagagcctgcatcgccaagtcaatcctaaaccaaaagaacaaagctggaggcatcatgctacctgacttcaaactatactacaaggctacaggaaccaaaacagcatggtactggtaccaaaacagagatatagatcaatggaacagaacacagccctcagaaataatgccacatatctacaactatctgatctttgacaaacctgacaaaaacaagaaatggggaaaggattccctatttaataaatggtgctgggaaaactggctagccatatgtagaaagctgaaactggatcccttccttacaccttatacaaaaattaattcaagatggattaaagacttaaacgttagccctaaaaccataaaaaccctagaagaaaacctaggcaataccattcaggacataggcatgggcaaggacgtcatgtctaaaacaccaaaagcaatggcaacaaaagccaaaattgacaaatgggatctaattaaactaaagagcttctgcacagcaaaagaaacgaccatcagagtgaacaggcaacctacagaatgggagaaaatttttgcaacctactcatctgacaaagggctaatattcagaatctacaatgaactcaaacaaatttacaagaaaaaaacaaacaacctcatcaaaaagtgggcgaagaacatgaacagacacttctcaaaagaagacatttatgcagccaaaaaacacatgaaaaaatgctcatcatcactggccatcagagaaatgcaaatcaaaaccacaatgagataccatctcacaccagttggaatggcaatcattaaaaagtcaggaaacaacagtctaagtaaccagatgtacagaatacaaaagatgcaggtacaagcccaaattcaagcttacaatgtgattacaaataataattataataacaatggcattcagctacgggacctgacactgaagatacctactgaatag

SEQ ID NO: 6281 - DNA, 6734 bp, Homo sapiens
  SIMILAR (610)..(1632): 881254mologous to Homo sapiens putative p150,accession number U93563,Smith-Waterman Score=1504.
atgaggaggagaggagaaggtgatgcaggaggaggagaaaaggaaaaagaagaggagagaaggggcatagatgaagctgtaagccatcattctcagcaaactaacacaggaggagaaaaccaaatgccacatgttctcactcataagtggcagctgaacagaaactctgcctgtgacaagctgcacaagcctcactcagtgcctggcggggttgcagctggagacgtgggaggaaaaacaatttctaatcctggtgtttgtgcaatagagtatcaggtggacggttcacctcacatttgggaagatgtgaacaaaggtgtctacattgaagaggacagagctcctctcatggaacgcagttcctcaccagcaatggaacaaagctggatggagaatgactttgacgagctgagagaagaaggcttcagacgatcaaattactctgagctacgggaggacattcaaaccaaaggcaaagaagttgaaaactttgaaaaaagttcagaagaatatataactagaatagccaatacacagaagtgcttaaaggagctgatggagctgaaaaccaaggctccagaactacgtgaagaatgcagaagcctcaggagccaatgcgatcaactggaagaaagggcatcagtgatagacacacatagtctcaaaataaaaggatggaggaagatctaccaagcaaatggaaaacaaaaaaaggcaggggttgcaatcctagtctctgataaaacagactttaaaccaacaaagatcaaaagagacaaagaaggccattacataatggtaaagggatcaaatcaacaagaagagctaactatcctaaataaatatgcacccaatacaggagcacccagattcataaagcaagtcctgagtgacctacaaagagacttagactcccatacattaataatgggagactttaacaccccactgtcaacattagacagatcaacaagacagaaagtcaacaaggatacccaggaattgaactcagctctgcaccaagcggacctaatagacatctacagaactctccaccccaaatcaacagaatatacatttttttcagcaccacaccacacctatttcaaaactgaccacatagttggaagtaaagttctcctcagcaaatgtaaaagaacagaaattataacaaactgtctctcagaccacagtgcaatcaaactagaactcaggattaagaaactcactcaaaaccactcaactacatggaaactgaacaacttgctcctgaatgactactgcgtacataacgaaatgaaggcagaaataaagatgttttttgaaaccaacgagaacaaagacacaacataccagaatctctgggacgcattcaaagcagtgtgtagagggaaatttatagcactaaatgcccacaagagaaagcaggaaagatccaaaattgacaccctaacatcacaattaaaaaaactagaaaagcaagagcaaacacattcaaaagctagcagaaggcaagaaataactaaaatcagagcagaactgaaggaaatagagacacaaaaaaacccttcaaaacaatcagtgaatcctggagctggttttttgaaaagatcaacaaaactgatagaccgctagcaagactaataaagaagaaaagagagaagaatcaaatagatgcaataaaaaatgataaaggggatatcaccaccgatcccaaagaaatacaaactaccatcagagaatactataaacacctctacgtaaataaactagaaaatctagaagaaatggataaattcctcaacacatacaccctcccaagattaaaccaggaagaagttgaatctctgaatagaccaataacaggctctgaaattgaggcaataattaatagcttaccaaccaaaaaaaagtccaggaccagatggattcacagccaaattctaccagaggtacaaggaggagctggtaccattccttctgaaactattccaatcaatagaaaaagagggaatcctccttgactcattttatgaggccagcatcatcctgataccaaagcctggcagagacacaacaaaaaaaagagaatttcagacccatatccctgatgaacatcgatgcaaaaatcctcaataaaatactggcaaaccgaatccagcagcacatcaaaaagcttatccaccatgatcaagttggcttcctccctgggatgcaaggctggttcaatatatgcaaatcaataaacataatccatcacattaacagaaccaaagacaaaaaccacatgattatctcaatatctcaatagatgcagaaaaggccttcgacaaaattcaacaacccttcatgctaaaaactctcaataaattaggtattgatgggacgtatttcaaactaataagagctatctatgacaaacccacagccaatgtcatactgaatgggcaaaaactggaagcattccctttgaaaactggcacaagacagagatgccctctctcaccactcctattcaacatagtgttggaagttctggccagggcaattaggcaggagaaggaaataaagggtattcaattaggaaaagaggaagtcaaattgtccgtgtttgcacatgacatgattgtatatccagaaaaccccattgtctcagcccaaaatctccttaagctgataagcaacttcagcaaagtctcagcatacaaaatcaatgtacaaaaatcacaagcattcttatacaccaacaacagacaaacagagagccaaatcatgagtgaactcccattcacaattgcttcaaagagaataaaatacctaggaatccaacttacaagggatgtgaaggacctcttcaaggagaactacaaaccactgctcaaggaaataaaagaggatacaaacaaatggaagaacattccatgctcatgggtaggaagaatcaatatcgtgaaaatggccatactgcccaaggtaatttacagattcaatgccatccccatcaagctaccaatgcctttcttcacagaattggaaaaaactactttaaagttcatatggaaccaaaaaagagcccttattgccaagtcaatcctaagccaaaagaacaaagctggaggcatcacactacctgacttcaaactatactacaaggctacagtaaccaaaacagcatggcactggtaccaaaacagcatggtactggtaccaaaacagagatatagatcaatggaacagaacagagccctcagaaataatgccgcatatctacaactatctgatctttgacaaacctgagaaaaacaagcaatggggaaaggattccctatttaatacatggtgctgggaaaactggctagccatatgtagaaagctgaaactggatcccttccttacaccttatacaaaaattaattcaagatggattaaaaaaaaagatttaaacgttagacctaaaaccataaaaaccctagaagaaaacctaggcattaccattcaggacataggcgtgggcaaggacttcatgtccaaaacaccaaaagcaatggcaacaaaagccaaaattgacaaatgggatctaattaaactaaagagcttctgcacagcaaaagaaactaccatcagagtgaacaggcaacctacaaaatgggagaaaattttcgcaacctactcatctgacaaagggctaatatccagaatctacaatgaactcaaacaaatttacaagaaaaaaacaaacaaccccatcaaaaagtgggcgaaggacatgaacagacacttctcaaaagaagacatttatgcagccaaaaaacacatgaaaaaatgctcatcatcactggccatcagagaaatgcaaatcaaaaccactatgagataccatctcacaccagttagaatggcaatcattaaaaagtcaggaaacaacagctgtttccactgtggttccattgcctacaacattcctctcttggtgttccactcacctcccgttagacatctggattcaaggaaaaatccactgtgcttcccaaagttggagttatttcaggacatgaatggagctcgaagccattaccggcatcagcaaactaatgcaggaacagaaaaccaaacaccacatgttttcacttataattgggaactaaatgatcagagcacatgcacacatggaggggaaaaacacacgctggagcctgtctcagggggaaaaacctccctgctccccatcttgtcccctgaaatctaccctctccatggagcagccaaacccctgtccctgggatctgccaagggaagcagtcctgagaaaaggtggcatcgggtagtggtgagggacacagcttcacagcagcccccatttctgccattgaccatgggtactgcaggcaaggcactgaaccccccagtttcctcgtggtgttaccctgaatttagggaagaaaagaaaattgagagattccaagtattgagcgtagtactgaatgctttccatactttatgtaatttcatctccacaaaactaagtgaggtagatgcccgttttatagatgacgcaaagcggctgctggaagaactcaaatatagacacttcctcagaactgtgcaaggtgatagggaaacagatggaaaagacattctctttaaagagctcatgagctggagagaaaatgtgcaaatgcagtttcggatgctctgtgctggttatcctccacttgccaaccgcaccgtctgccatttctgccatgaggccgacctccaagcagagcagcaccagggttccctatccttcagctcccagatggatcagtcaatgccactggcagaagatccaaggcaagaggagaaagaagtgggtgtttctgccccacttactccagatttcagcactgaatttctggcagtgtctgcatccttctatggctacagctcctgccagcctacaacctcattatccacacatgggagcacaggcactcgcctccgggtactgtatgagtcggcttgcaaagaggaatgcctgggaggcagacaggatgctgaggcaaagctggcagccagcaggaggggccagccctcttccctgatgtcgtcacgtgaagggggctggggggagggctcgcagagcaggaactccagccatggagccctgaaagaagcccagttcataataaccaatgcagagaagtccttaaaggacctgatggagctgaaaaccatggcacaagaactacgtgacgaatgcacaagcctcagtagccgattcgatcaactggaagaaaaggtatcagtgatggaagatgaaattaatgaaatgaagcaagaagagaaggttagagaaaaaagaataaaaagaaatgaacaaagcctccaagaaatatgggactatgtgaaaagaccaaatctacatctgattggtgtacctgaaagtgacagggagaatggaaccaagttggaaaacactctgcaggatattatccaagagaacttccccaatctagcaaggcaggccaacattcaaattcaggaaatacagagaatgccacaaagatactcctcgagaagagcaactccaagacacataattgtcagattcaccaaagttgaaatgaaggaaaaaatgttaagggcagctagagagaaagaaatacaaactaccatcagagaatactataaacacctctacacaaataaactagaaaatctggaagaaatggataaattcctggacacatacagtctcccaagactaaaccaggaagaagttgaatctctgaagagaccaataacaggctctgaaattggggcaataattaatagcttacgaaccaaaaaaaagtccaggaccagacagattcacagccgaattctaccagaggtataaggaggagctggtaccattccttctgaaactattccaatcaatagaaaaagagggaatcctccctaactcattttatgaggccagcatcatcctgataccaaagcctggcagagacacaacaaaaaaaaagagaattttagaccaatatccctgatgaacattgatgcaaaaatcctcaataaaatactggcaaaccgaatccagcagcacatcaaaaagcttatccaccatgatcaactgggcttcatccctggtatgcaaggctggttcaacatatgcaaatcaatgaacgtaatccagcatataaacagtcccaaagacaaaaaccacatgattatctcagtagatgcagaaaaggcctttgacaaaattcaacagcccttcatgctaaaaactctcaataaattaggtattgatgggacgtatctcaaaatagtaagagctatttatgacaaactcacagccaatatcatactgaatgggcaaaaattggaagcattccctttgaaaactggcacaagacagggatgccctctctcaccactcctattcaacatagtgttggaagttctggccagggcaatcaggcaagagaaagaaataaagggtattcaattaggaaaagagcaagtcaaattgtccctgtttgcagatgacatgattgtatatctagaaaaccccatcgtctcagcccaaaatctccttaagctgataagcaacttcagcaaagtctcaggatacaaaaatcaatgtgcaaaattcacaagcattcttatacaccaataacagacaaacagagagccaaatcatgagtgaactcccattcacaattgcttcaaagagaataaaatag

SEQ ID NO: 6282 - DNA, 381 bp, Homo sapiens
  SIMILAR (1)..(108): 971254mologous to Mus musculus MITF protein,accession number AF222959,Smith-Waterman Score=184.
atgcagtccgaatcggggatcgtgccggatttcgaagtcggggaggagtttcatgaagagcccaaaacctattacgaactcaaaagtcaaccgctgaagagcagtgcgcctttaggaagctcggatggagcgcacttcgcgggggccgcgcgggtcgccgggtacgaagcgtccaggcgcggggaccctcggccgaggatgccagctgctgagactgattgggggctggggagcgacctggcgcgatgtgggggtggaggagcgccgtgtttgtacgctgtcccgaggtcaccttcaggagccatcgcttccggaggtcctccagctgctgtggccgacaggtggctgaggttcatccgctgcctggcgggggctggctga

SEQ ID NO: 6283 - DNA, 2481 bp, Homo sapiens
  SIMILAR (138)..(1697): 991254mologous to Homo sapiens A-type microphthalmia associated transcription factor,accession number AB006909,Smith- Waterman Score=2662.
gccgcgagccggcgagcgggcagagctttgctctgcgccggggcgcacggctcgggggacccaggcccagctaccttccctccggccccgggctctgttctcactttccagcagtggaaggacgggaagcgggagccatgcagtccgaatcggggatcgtgccggatttcgaaggcggggaggagtttcatgaagagcccaaaacctattacgaactcaaaagtcaaccgctgaagagcagcagttccgccgagcatcctggggcctccaagcctccgataagctcctccagtatgacatcacgcatcttgctacgccagcaactcatgcgtgagcagatgcacgagcaggagcgcacggagcagcagcagaagctgcaggcggcccagttcatgcaacagagagtgcccgtgagtcagacaccagccataaacgtcagtgtgcccaccacccttccctctgccacgcaggtgccgatggaagtccttaaggtgcagacccacctcgaaaaccccaccaagtaccacatacagcaagcccaacggcagcaggtaaagcagtacctttctaccactttagcaaataaacatgccaaccaagtcctgagcttgccatgtccaaaccagcctggcgatcatgtcatgccaccggtgccggggagcagcgcacccaacagccccatggctatgcttacgcttaactccaactgtgaaaaagagggattttataagtttgaagagcaaaacagggcagagagcgagtgcccaggcatgaacacacattcacgagcgtcctgtatgcagatggatgatgtaatcgatgacatcattagcctagaatcaagttataatgaggaaatcttgggcttgatggatcctgctttgcaaatggcaaatacgttgcctgtctcgggaaacttgattgatctttatggaaaccaaggtctgcccccaccaggcctcaccatcagcaactcctgtccagccaaccttcccaacataaaaagggagctcacagagtctgaagcaagagcactggccaaagagaggcagaaaaaggacaatcacaacctgattgaacgaagaagaagatttaacataaatgaccgcattaaagaactaggtactttgattcccaagtcaaatgatccagacatgcgctggaacaagggaaccatcttaaaagcatccgtggactatatccgaaagttgcaacgagaacagcaacgcgcaaaagaacttgaaaaccgacagaagaaactggagcacgccaaccggcatttgttgctcagaatacaggaacttgaaatgcaggctcgagctcatggactttcccttattccatccacgggtctctgctctccagatttggtgaatcggatcatcaagcaagaacccgttcttgagaactgcagccaagacctccttcagcatcatgcagacctaacctgtacaacaactctcgatctcacggatggcaccatcaccttcaacaacaacctcggaactgggactgaggccaaccaagcctatagtgtccccacaaaaatgggatccaaactggaagacatcctgatggacgacaccctttctcccgtcggtgtcactgatccactcctttcctcagtgtcccccggagcttccaaaacaagcagccggaggagcagtatgagcatggaagagacggagcacacttgttagcgaatcctccctgcactgcattcgcacaaactgcttcctttcttgattcgtagatttaataacttacctgaaggggttttcttgataattttcctttaatatgaaattttttttcatgctttatcaatagcccaggatatattttatttttagaattttgtgaaacagacttgtatattctattttacaactacaaatgcctccaaagtattgtacaaataagtgtgcagtatctgtgaactgaattcaccacagactttagctttctgagcaagaggattttgcgtcagagaaatgtctgtccatttttattcaggggaaacttgatttgagatttttatgcctgtgacttccttggaaatcaaatgtaaagtttaattgaaagaatgtaaagcaaccaaaaagaaaaaaaaaaagaaagaaagaggaaaagaaatccatactaacccttttccattttataaatgtattgattcattggtactgccttaaagatacagtacccctctagctttgtttagtctttatactgcaaactatttaaagaaatatgtattctgtaaaagaaaaaaaaaatgcggccttttcatgaggatcgtctggttagaaaacataactgataccaaccgaaactgaagggagttagaccaaggctctgaaatataaagtctaatcttgctctcttttattctgtgctgttacagttttcttcatcaatgagtgtgatccagtttttcataagatattttattttgaaatggaaattaatgtcctctcaaag

SEQ ID NO: 6284 - DNA, 1900 bp, Homo sapiens
  SIMILAR (4)..(699): 311254mologous to Xenopus laevis cingulin,accession number AF207901,Smith-Waterman Score=324.
atgagagcaaacctagaagagctccgaagccaacacaacgaaaaggtggaggagaactccacattgcagcaacgactggaagaaagtgaaggggagctccggaagaatctggaggagctattccaggtgaagatggaacgggagcagcatcagactgagatcagggatctccaggaccagctctcagaaatgcacgatgaactggacagtgcaaagcgatcggaggacagggagaagggagctctgattgaggagctcttacaggcaaaacaggatcttcaagatctgctgattgccaaagaggagcaagaagacctcttgagaaagcgagagcgtgaactcaccgccctgaagggagccctgaaagaagaggtttccagccatgatcaggagatggacaagctgaaggagcaatatgatgctgagttgcaggccctgagggagagtgtggaagaagcaaccaagaatgtcgaggtcttggcgagcaggagcaacacttcagagcaagaccaggcggggactgaaatgcgcgtgaagcttctgcaggaggagaatgagaagctgcagggaagaagcgaagagctggagcggagagttgctcagcttcaaaggcagatcgaggacctgaaaggcgatgaagccaaggcgaaggaaacgctgaagaagtacgagaccatccccacctctgatcctcaagtgtacagagaatgtctttcacactcttctcagcgtgacactgagggcaccaggaaaatggaagtgcccactaatgtgagaaagaaatgcctccctatacaacggctgggcttcttccctgcaggactcctacaggccgccgcccgattctctactgactccccagtccaccagaaaaagtctgactcgattcgacctcggtaccctttagactttggccaccggcagcttctgtatttcgttcctgtgtccctgtgccatacctcatcaatatgcctcaaactcaacacggtcagattcaacatgcacaaaatggaagtcctcatcccacttaccactccaagacatggacctcctctgttccttctcaatgcctccaatattcaccagtcacctaacgagtcaggagagacagggacagggatgcaaatcctggcccaacctatagctgcccctccctctgctctgcctgctggcaagacggcccaggccatgggggacaagatgaggacaatgattcctgacacaaggctctatgcaccctttgggcctggtgatgttctcatggggacctgcaggccattccgctactctgaaaagcttgacggaaagaaaatgtacagcttcccaagcactgctgccttggctgatgggatcattgcttcttggcttggggccaacagcaatccagccaggcaagggagtgatggaggatgccgatggcccacaggaattgccctcgactggagtgagtcaacgtcttcatctgcaaaatggggatacaagggcgggccccgcacgcttatcctgcccgggaggaacgccggcgtccagcccgctaccgaccgccgctgcgggatgctgcgctccacgtccacggtcaccctgctctcgggcggcgccgccaggacgcccggggcgcccagcaggaggcttcttgacctgagcaatggagaacctaccacggaaacttcctcaggggtgttgtttatggtgtggtgcgaagatcagatcaaaatcagcagaaagaaatgggggtgtatgggtggtccaccagtccactgaaagaagagatgaactacatcaaagatgggagagccactttggaaaaggtgagaaaacgaatgtttggagactatgatgagaggagacagaagatttgaccgctcaccccaggaactatcatttttccatgctcagcagg

SEQ ID NO: 6285 - DNA, 409 bp, Homo sapiens
  SIMILAR (141)..(404): 301254mologous to Homo sapiens Human bcl2 proto-oncogene mutant protein fragment 14,accession number Y21166,Smith-Waterman Score=84.
cttaattatacatcatgcaccgctggtgaactcgttagctgaagtcattctgaatggtgatctgtctgagatgtacgctaagactgaacaggatattcagagaagttctgccaagcccagcattcggtgcttcattaaacccaccgagacactcgagcggtcccttgagatgaacaagcacaagggcaagaggcgggtgcaaaagagacccaactacaaaaacgttggggaagaagaagatgaggagaaagggcccaccgaggatgcccaagaagacgccgagaaggctaaagagatcgagatggtgatcatggagcgtagcaagctctcagagctggccgccagcacctccgtgcaggagcagaacaccacggacgaggagaaaagcgccgccgccacctgctctgag

SEQ ID NO: 6286 - DNA, 2643 bp, Homo sapiens
  SIMILAR (1942)..(2640): 931254mologous to Homo sapiens dJ475N16.3 (novel protein similar to RPL7A (60S ribosomal protein L7A)),accession number AL035587,Smith-Waterman Score=1091.
atgtttggccgctcgcggagctgggtgggcgggggccatggcaagacttcccgcaacatccactccttggaccacctcaagtatctgtaccacgttttgaccaaaaacaccacagtcacagaacagaaccggaacctgctagtggagaccatccgttccatcactgagatcctgatctggggagatcaaaatgacagctctgtatttgacttcttcctggagaagaatatgtttgttttcttcttgaacatcttgcggcaaaagtcgggccgttacgtgtgcgttcagctgctgcagaccttgaacatcctctttgagaacatcagtcacgagacctcactttattatttgctctcaaataactacgtaaattctatcatcgttcataaatttgacttttctgatgaggagattatggcctattatatatcgttcctgaaaacactttcgttaaaactcaacaaccacactgtccatttcttttataatgagcacaccaatgactttgccctgtacacagaagccatcaagtttttcaaccaccctgaaagcatggttagaattgctgtaagaaccataactttgaatgtctataaagtggataaccaggccatgctgcactacatccgagataaaactgctgttccttacttctccaatttggtctggttcattgggagccatgtgatcgaactcgatgactgcgtgcagactgatgaggagcatcggaatcggggtaaactgagtgatctggtggcagagcacctagaccacctgcactatctcaatgacatcctgatcatcaactgtgagttcctcaacgatgtgctcactgaccacctgctcaacaggctcttcctgcccctctacgtgtactcactggagaaccaggacaaggtcttcttaattatacatcatgcaccgctggtgaactcgttagctgaagtcattctgaatggtgatctgtctgagatgtacgctaagactgaacaggatattcagagaagttctgtcttacccactctaagctccttatggcagggatctcacctgtcactgaatcagctgcagtctgggctgcacaaatgctcatctcacttatgcggagcccaggctgcagctgattcagtgacaggtgagatccctgccataaggagcttagagtggctaatcagtgctggttccaaggcgcgcacattcttcttcctgaaaatgctaataggcttctgggagaaggttgattgtgaatatcaaaggcgtcaagtgctgagcacgcggctgcaagaggccttgccgtcaaatcgcctcactgatgttgcagctgtgcattcttcatgcatgttgggctttggttccacagctccacgcggctcctggattggcgatccagcggctgtgcatctgcccctacctggggagctggccgagcaccttgggtccaagggtaccaccactgtcaccaagcaccagccccaggccaagcccagcattcggtgcttcattaaacccaccgagacactcgagcggtcccttgagatgaacaagcacaagggcaagaggcgggtgcaaaagagacccaactacaaaaacgttggggaagaagaagatgaggagaaagggcccaccgaggatgcccaagaagacgccgagaaggctaaaggtacagagggtggttcaaaaggcatcaagacgagtggggagagtgaagagatcgagatggtgatcatggagcgtagcaagctctcagagctggccgccagcacctccgtgcaggagcagaacaccacggacgaggagaaaagcgccgccgccacctgctctgagagcacgcaatggagcagacccttcctggatatggtgtaccacgcgctggacagcccggatgatgattaccatgccctgttcgtgctctgcctcctctatgccatgtctcataataaagaaaatctcctgaaaaagaggaaggcttatcaggcactcaaagccacccaggcaaagcaggaacttttggcaaagaaggagcagaagaaaggaaaagggctcaggtttaagctactggaatcattcctacatgattactggcagcagaaacctgacaaggtgcatctcagacgactagaagtgaaacctcatgccgtggaattgccagataaacattccttggcctttgttgtacgcatcgaaaggattgatggcgtgagtttactggtgcagagaaccattgcaagactttgcctaaagaaaatttttagtggtgtctttgtaaaagtcaccccccagaatctacaaatgctgcgtatagtggaaacttatgtgacctggggatttccaaatctgaagtctgtccgagaactcattttgaaacgtggacaagccaaggtcaagagtaagaccatccctctgacagacaacacagtgattgaggagcacctggggaagtttggcatcatttgcttggaagacctcattcatgaaattgcattcccagggaagcatttccaggagatctcatggttcttgcgccctttccacctctcagtggcccatcatgctaccaaaaatagagtgggcttcctcaaggagatgggcacacttggctatcggggtgaacgcatcaatcagctcatccgccagctgaactag

SEQ ID NO: 6287 - DNA, 6607 bp, Homo sapiens
  SIMILAR (2712)..(3113): 741254mologous to Homo sapiens KIAA0350 protein,accession number AB002348,Smith-Waterman Score=506.
ccggaacctgctagtggagaccatccgttccatcactgagatcctgatctggggagatcaaaatgacagctctgtatttgacttcttcctggagaagaatatgtttgttttcttcttgaacatcttgcggcaaaagtcgggccgttacgtgtgcgttcagctgctgcagaccttgaacatcctctttgagaacatcagtcacgagacctcactttattatttgctctcaaataactacgtaaattctatcatcgttcataaatttgacttttctgatgaggagattatggcctattatatatcgttcctgaaaacactttcgttaaaactcaacaaccacactgtccatttcttttataatgagcacaccaatgactttgccctgtacacagaagccatcaagtttttcaaccaccctgaaagcatggttagaattgctgtaagaaccataactttgaatgtctataaagtgtcattggataaccaggccatgctgcactacatccgagataaaactgctgttccttacttctccaatttggtctggttcattgggagccatgtgatcgaactcgatgactgcgtgcagactgatgaggagcatcggaatcggggtaaactgagtgatctggtggcagagcacctagaccacctgcactatctcaatgacatcctgatcatcaactgtgagttcctcaacgatgtgctcactgaccacctgctcaacaggctcttcctgcccctctacgtgtactcactggagaaccaggacaagggaggagaacggccgaaaattagcctgccggtgtctctttatcttctgtcacaggtcttcttaattatacatcatgcaccgctggtgaactcgttagctgaagtcattctgaatggtgatctgtctgagatgtacgctaagactgaacaggatattcagagaagttctgccaagcccagcattcggtgcttcattaaacccaccgagacactcgagcggtcccttgagatgaacaagcacaagggcaagaggcgggtgcaaaagagacccaactacaaaaacgttggggaagaagaagatgaggagaaagggcccaccgaggatgcccaagaagacgccgagaaggctaaaggtacagagggtggttcaaaaggcatcaagacgagtggggagagtgaagagatcgagatggtgatcatggagcgtagcaagctctcagagctggccgccagcacctccgtgcaggagcagaacaccacggacgaggagaaaagcgccgccgccacctgctctgagagcacgcaatggagcagacccttcctggatatggtgtaccacgcgctggacagcccggatgatgattaccatgccctgttcgtgctctgcctcctctatgccatgtctcataataaaggcatggatcctgaaaaattagagcgaatccagctccccgtgccaaatgcggccgagaagaccacctacaaccacccgctagctgaaagactcatcaggatcatgaacaacgctgcccagccagatgggaagatccggctggcgacgctggagctgagctgcctgcttctgaagcagcaagtcctgatgagtgctggctgcatcatgaaggacgtgcacctggcctgcctggagggtgcgagagaagaaagtgttcaccttgtacgacatttttataagggagaagacatttttttggacatgtttgaagatgagtataggagcatgacaatgaagcccatgaacgtggaatatctcatgatggacgcctccatcctgctgcccccaacaggcacgccactgacgggcattgacttcgtgaagcggctgccgtgtggcgatgtggagaagacccggcgggccatccgggtgttcttcatgctgcgttccctgtcactgcaattgcgaggggagcctgagacacagttgccgctgactcgggaggaggacctgatcaagactgatgatgtcctggatctgaataacagcgacttgattgcatgtacagtgatcaccaaggatggcggcatggtccagcgatccctggctgtggatatttaccagatgagtttggtggagcctgatgtgtccaggcttggctggggagtggtcaagtttgcaggcctattgcaggacatgcaggtgactggcgtggaggacgacagccgtgccctgaacatcaccatccacaagcctgcgtccagcccccattccaagcccttccccatcctccaggccaccttcatcttctcagaccacatccgctgcatcatcgccaagcagcgcctggccaaaggccgcatccaggcaaggcgcatgaagatgcagagaatagctgccctcctggacctcccaatccagcccaccactgaagtcctggggtttggactcggctcctccacctccactcagcacctgcctttccgcttctacgaccaggggcgccggggcagcagcgaccccacagtgcagcgctccgtgtttgcatcggtggacaaggtgccaggcttcgccgtggcccagtgcataaaccagcacagctccccgtccctgtcctcacagtcgccaccctccgccagcgggagccccagcggcagcgggagcaccagccactgcgactctggaggcaccagctcgtcctccaccccctccacagcccagagtccagcagtcaggagtggcaggaaaggacgccgacgagtgttcagcctgtcggaggccgacagtcatggcggccactgggtttagtgctccgaacggcagctgccacggcacctcacgcacagtcaattcagatgcccccatgagtccagaactgcctaagcctcaccttcctgaccagttggtaatcgtcaacgaaacggaagcagactctaagcccagcaagaacgtggccaggagcgcagccgtggagacagccagcctgtcccccagcctcgtccctgcccggcagcccaccatttccctgacccttgtccccccagttgacccccacagcctccgcagcctcaccggcatgcccccgctgtccacgccggctgccgcctgcacagagcccgtgggcgaagaggctgcatgtgctgagcctgtgggcaccgctgaggactgagtcagtgccggggcctccctttgtgtgtgtggccccgctggtagggaccccagtgccgctgactggcaagacacactgggagcacccaccattctgtgcggcccccagcagccatctcaaccacctatccctgcgctcccttgaatgggaagaagccccacgttgtccttgaattcctttttcactttgcatctcttcacgtgcaggctgggaccagcggagacaccgcggcgaatgcagatgactgcaccggccactcagggagctgcctgggctccgtgtctctgagccccgggtggcaggacccaccggcacctctttcttcctctgtcatatggctcctctgtcaccagccccagtgtgcacagaagaattggaccaggtcactgtacgtagaaatttgtagaaaagcagacttagataaacatctcctttggatatttatttccgcttttggcagcaggtgaacatttatttttaaaacttctatttaaaagaagtccaaaaacatcaacactaaggtttgatgtcatgtgaaaagtgtaataataacagttaagatttcatgatcattttcactggacctttcctgatattttgtttcagagttcttagtgtggctttttccatttatttaagtgattctttgttactcactaactctgcaagcctgtggaataatgaagtaccttcctggaaagtttggattattttttaaacaaaaacaagggagatacatgtattctcaggtacacacagagctgagagggctgaatggttttctgctatagcagccgagaggcctcccatcatggaaagatttctccaggaaaaggaggaatgtagccagctccccactcaggacgcttcctcatttctcttcaccaaaaccaaacagagacagcttccagcaccttcttcagtgttaccatctctaagaaggaaccagttgggaccgtgaagactcccgaccctgtggccatgatggaaatcaaaggaagacaccctctacgtcacctgccctcgactgtgtgtgcccacatgtgccgagagatggcccagagccagttcccctccagctgcaagggcatggtgtccccagagctctgagtctgtcactctccctctgctactgctgctgatctgaatatggaaaccccatggttcccttccccattcggactgggtgtgtacaagcaaggacccagatgcatcagacacagcccccaagatgttcctttctactcggccagctcgggagccagacacagcactcacagcccaggccgtgatccaccctccccaagtccaccagggccagcggcccctcacctctctggtcactggtgagaccttccacaactttcctccagacctgccagcagatgtgcccaccaggggcattaggtatccgccggagcctggccatagggtagtctcgggagccgcgctgagatcttttgccacctgcattttagaagaacatggtctctgtctcctcggcccagccagctgtcccggcaaggcctgccgagggcagttttcaacctcatgaaggaaacacagtcctgccaaggagggggagtggcgcccatggggacaggcctcagtccttagaagccctctgggtagctgtgcccacccagccttcatggctgcaggtacaaggacctttgcttccatagagaaaacgcacagctcagaaagggggccacatgggcagaaacccaaaggaaggacaaaccacgaccaccgtggccatctgcagaatccctggaagagaaggaaggcagggtggagcggggggaagaccatcatggagagaaggaccacagcatcaggagacgggacacgccacacccagcaggcagcctgtgtgttgcttaattttttaagagcaagaggggtagagaggatcaagctggccctggctggagatggctagcccctgagacatgcacttctggttttgaaatgactctgtctgtggggcagcagaaactagagaaggcaagtggctgccccaccccaaggcgtgaccaggaggaacagcctgcagctcactccatgccacacgggtgggccaccagcctgctgtcagaagtctctgggctccaactggtcttgtaaccactgagcactgaaggagagaggtcttggtcagggctggacagcatgcccgggaggaccagcagaggattaaaggtgactgggaggaccagcggaggataaaagacactgctcagggcagggcttctaccctgcatccctggccaagaaaagggcagtccccatgtgggcttgcagggtcactctcaggggcctctttcagctggggctggcaacttgcgtctgggggacacctccaggtgtgtggggtgaggatttcctataaccagggctcccagaagctttgcttatgtaaggaggtctgggagccagcccattggaggccaccagccattttggcttcaaaggaccccacctcacccaggtctcagcggcagtgggcacagctatgtcttcaggagctcccgtcaaacctcatagctggggcgctcccagacaggccagtccagacaggacacgctgggcccctggcatccagaggaagagccaggagtgtgggaaggcccacagtgggggctgtggcttctgacactcaggtcatagcctcagaggtctgaggtcagcccccacagacccatccggcccgccccccaagtccctgcagagagcacttagagttatggcccaggccctggtccacccttcccctgtgcacctccggctgggtttgccaagtcagggagcagggctggccgcaggaactcccaaaccttggctttgaatattgttgtggaggtgtgctcgtccctttctggacgtgcaaggtacctgtcccagcaggtcagatggggccagctgaggcgctcccccaggcaggaagggccagccttcaccatcgcgtgggattgggaggaggggcctccgtgagcagcccctcctctgccgctgtcccagcccagtccctctcccggaaccttggcagcctcccacaacccagacacttgcgttcacaagcaacctaaggggcaggtgaagaagcgcagccctgccagacgcgctagattcctctaaggtctctgagatgcaccgttttttaaaaaggcgtggggtgaactgattttgatcttcttgtctagatgcaataaataaatctgaagcatttaatgtagtcatcttgacattgggcctacactgtacgagttccttatgtttccttgagctaaaaatatgtaaataatttttgtcccagtgagaaccgagggttagaaaacctcgatgcctctgagcctcgggaccgctctagggaagtacctgctttcgccagcatgactcatgcttcgtgggtactgaacacgagggtggaaatgaaaactggaacttccttgtaaatttaaacttggcaataaaagagaaaaaaagtt

SEQ ID NO: 6288 - DNA, 577 bp, Homo sapiens
  SIMILAR (17)..(64): 501254mologous to Homo sapiens acetylcholinesterase,accession number M76539,Smith-Waterman Score=38.
atggctgttctaatttacattcccaccaacagtacacaagagttccctttctccacgtcttcatcaacacttgtcttcttaataattgccattctaacagtccacaagcattcagtgagcacctacaaaggcccccctgaacaaagcaaccaattcctgcctgtggacacacacagtgctcatttccctggctctgaacccaaaaaagagggaggatcttatgtagaggtggcggccgatgaggttgagcttcaggccaagcccagcattcggtgcttcattaaacccaccgagacactcgagcggtcccttgagatgaacaagcacaagggcaagaggcgggtgcaaaagagacccaactacaaaaacgttggggaagaagaagatgaggagaaagggcccaccgaggatgcccaagaagacgccgagaaggctaaaggtacagagggtggttcaaaaggcatcaagacgagtggggagagtgaaggtgagtgtccccatgaacgccgccctgtgcctgcgccgccagccagcccgccagcgaggctgccacctgtgccctctccacccagacttc

SEQ ID NO: 6289 - DNA, 852 bp, Homo sapiens
  SIMILAR (1)..(360): 921254mologous to Homo sapiens putative p150,accession number U93565,Smith-Waterman Score=590.
atgggcaaggacttcatgtctaaaacaccaaaagcaatggcaacaaaagacaaaactgacaaatgggatctaattaaactaaaaaccttctgcacagcaaaagaaactaccatcagagtgaacaggcaacctacagaatgggagaaaatttttgcaatctacacatctgacaaagggctaatatccagaatctacaatgaactccaacaaatttacaagaaaaaaccaaacaaccccatcaaaaagtgggtgaaggatatgaacagacacttctcaaaagaagacatttatgcagccaaaagacacatgaaaaagtgctcatcatcactggccatcagagaaatgcaaatcaaaaccacatgttacctaaatagccttggtttactcctggtcatagctgtttcctgtgtgaaattgtttatccgggtcacaattaccacaccaaaataccaactcgatgcagaaaaggcatttgacaaaatccagcatacatttataattacaaccatcagcaaaattggtgtagaaaggacttaccttaaggtagtagaggccatctctgacaaacccacagccaacattatactgaacagggaaaagttgaaagcattcctcctgagaactggaacaagacaagaatgcccacttttaccacttctattcaacatagtattggaagtcctagccagagcaatcagacaagagaaagaaataaaaggcatccaaatcagtaaagaagaagtcaaactgtcactctttgctgataatatgattgtatacctagaaaaccctaaagactcatccaaaaagctcctagatctgataaatgaattcagtaaagtctcaggataa

SEQ ID NO: 6290 - DNA, 1296 bp, Homo sapiens
  SIMILAR (1)..(873): 311254mologous to Homo sapiens pendrin,accession number AF030880,Smith-Waterman Score=356.
atggtgctgggaaaactggctagccacatgcaggcaaatgaaactacacccttacttccatcatatacaaaaattaactcaagatggattaacgacttaaatataagacgtgaaactataaaaattctagaagaaaacctaggaaaaactcttctggacattggtgtggccatgtttgtgctgcaactgggcagtgccacatttgtggtcacagagcctgtgatcagcgcaatgacaactggggctgccacccatgtggtgacttcacaagtcaaatatctcttgggaatgaaaatgccatatatatccggaccacttggattcttttatatttatgcatatgtttttgaaaacatcaagtctgtgcgactggaagcattgcttttatccttgctgagcattgtggtccttgttcttgttaaagagctgaatgaacagtttaaaaggaaaattaaagttgttcttcctgtagatttagttttggctccaaacacatcgccactccatcaccactacgactgtctctttgccaactttcttgagccaccctgggaggatggacttccagaaggtgccttcaaccaggcagaaggacatttgcgcaggaacataattccctcacctagagctcccccgatgaacatcctctctgcggtgatcactgaagctttcggagtggcacttgtaggctatgtggcctcactggctcttgctcaaggatctgccaaaaaattcaaatattcaattgatgacaaccaggaatttttggcccatggcctcagcaatatagtttcttcatttttcttctgcataccaagtgctgctgccatgggaaggacggctggcctgtacagcacaggagcgaagacacagccatttgcagcccctgacttcaattcagagttgggtgaagcaggtgctgacgcaaaactggagggagggaagttaaatgaaaagaagaaggagaggaaagaggagagaaaaggaaaagaggtgggagaggaggaagaagaaagagagggaaaaggagagaggagggaagaagaaaagaaagaaaatgggaggaggagattgaagagagaacagggaagaggaagaagtaaagagaaaaaggaagaaaagaataaagagagaaaggaggagaaaatagaaaaaaaaagaaggaaagaagaagagagaggaggaagagaaagaagactagaagtgaaggagagagggagaagacaggagaagaagtgggagaaagaaagagaagggagaaggagccaaatggctaaatctgttttctgcagataa

SEQ ID NO: 6291 - DNA, 864 bp, Homo sapiens
  SIMILAR (1)..(618): 881254mologous to Homo sapiens CEV14,accession number AF011368,Smith-Waterman Score=896.
atggaaaatgcaagtcatcaagccagtgtgcaggtagagtcattgcaagaacaattgaatgtagtctccaagcaaagggatgaaactgcgctgctttctgcctctcagcaacaagtaaagcagtatgctctgtcactggccaacctgcagatggtactacagcatttccaaaaagaggaaaaatctatgtattctgctgaactacaaaagcaaaaacagcttatagctgaatggaagaaaaaggcagaaagtttggaaagaaaagtgatatcattacaggaacgtttggatgaagcagatgctgcattggattcagcatcaagacttacagaacagttagatctaaaagaagaacaaattgaagaacttaaaaaacaaaatgagttccaacaagaaatgctggatgatgtacaaaagaaattggtgaacttagcaaacagcctagaaggaaaagtggacaaagtcctaatgagaaacctcttcatcagtcatttccacatgccaaaaaatcagcgtcacgaagtgttacggttgatgggcagcatcctgggggtcagaagggaggagatggagcagctgtttcatgacaatcagggcagtgttaccagaaggctgacccctggggactgcatcccctgggctcccctcacctctggctttctgttgggcacagtccgtgggaagcaccagcaaagaccagaggagacaaaagctacagggtttgtccattcagccagtatccgggctgtgccaggcactgtctcaggggtccggggtgtagtggggggcaacagatgccgtgtctacactgagaagcttacaggagtgaggaagcgtcattcctacgtgaagggaatgctctaa

SEQ ID NO: 6292 - DNA, 6461 bp, Homo sapiens
  SIMILAR (5325)..(6302): 791254mologous to Homo sapiens Trip230,accession number AF007217,Smith-Waterman Score=1253.
cgagcgagtgtcatggcggccggcgtcgagttggcaggagtaacccacggaactgaggaaagtcattagagctgagaaagaagtggcccaatctggacggtgggaattcgtgggaatgagcagaaggccctccgtaggtgactgtgtcactagaggcgggcccctggtaaaattccaggccaggcctctgcgtttctaggcagaacctggagtcggccttgcctgagaacccagctttgtgttatcgtatcctgtctcgcgaaggcaggcgttcaaggatatttggtcggatcgcccggcggcgctaaacgttttcttttttccgagcggaccgggtcgttctctaaactcgccgcgatgtcgtcctggcttgggggcctcggctccggattgggccagtctctgggtcaagtcgggggcagcctggcttccctcactggccagatatcaaactttacaaaggatatgctgatggagggcacggaggaagtggaagcagaattacctgattctaggacaaaggaaattgaagccattcatgcaatcttgagatcagagaatgaaaggcttaagaaactttgtactgatctagaagagaaacatgaagcatcagagattcaaataaagcagcaatctacaagttaccgaaatcaacttcaacaaaaagaggtagaaatcagccatcttaaagccagacagattgccctccaggatcagttcctgaaactgcagtcagctgctcagtcagtaccttcaggagctggtgtaccagcaaccactgcatcatcttcattcgcttatgggattagtcatcatccttcagctttccatgacgatgacatggactttggtgatataatttcatcccaacaagaaataaaccgactctcaaatgaagtttcaagacttgagtctgaagttggccattggaggcatattgctcagacttccaaagcacaaggaacagataactctgatcaaagtgaaatatgtaaactacaaaatatcattaaggaactaaaacagaaccgaagtcaggaaattgatgaccatcaacatgaaatgtcagtactgcagaatgcacaccaacagaaattgacagaaataagtcgacgacatcgagaagaattaagtgactatgaagaacgaattgaagaacttgaaaatctgttacaacaaggtggctctggagttatagaaactgatctctctaaaatctatgagatgcaaaaaactattcaagttctacaaatagaaaaagtggagtctaccaaaaaaatggaacaacttgaggataaaataaaagatataaataaaaaattatcttctgcagaaaatgacagagatattttgaggagagaacaagaacagctaaatgtggaaaagagacaaataatggaagaatgtgaaaacttgaaattggaatgtagtaaattgcagccttctgctgtgaagcaaagtgatactatgacagaaaaggaaagaattcttgcccagagtggatcagtggaagaagtgttcagactacgacaagcactgtctgatgccgaaaatgaaataatgagattgagtagtttaaaccaggataacagtcttgctgaagacaatctgaaacttaaaatgcgtatcgaagttttagaaaaagagaagtcattactgagtcaagaaaaggaagaacttcagatgtcacttttaaaattgaacaatgaatatgaagtaattaaaagtacagctacaagagacataagtttggattcagaattacatgacttaagacttaatttggaggcaaaggaacaagaactcaatcagagtattagtgaaaaggaaacactgatagccgagatagaagaattggacagacagaatcaagaagctacaaagcacatgattttgataaaagctcagctatcaaaacaacaaaatgaaggagatagcatcatcagtaaactgaaacaagatctaaatgatgaaaaaaagagagttcatcaacttgaagatgataaaatggacattactaaagagttagatgtacagtttgttttgctaattcaaagtgaagtggccctaaatgatttacatttaaccaagcagaaacttgaggacaaagtagaaaatttagtagatcagctaaataaatcacaagaaagtaatgtaagcatccagaaggagaatttagaacttaaggagcatattagacaaaatgaggaggagctttctagaataaggaatgagttaatgcagtctctaaatcaagactctaatagtaattttaaggataccttacttaaagaaagagaagctgaagttagaaacttaaagcaaaatctttcagaattagaacagctcaatgaaaatttaaagaaagttgcttttgatgtcaaaatggaaaatgaaaagttagttttagcatgtgaagatgtgaggcatcagttagaagaatgtcttgctggtaacaatcagctttctctggaaaaaaacactattgtggagactctaaaaatggaaaaaggagagatagaggcagaattgtgttgggctaaaaagaggctgttggaagaagcaaacaagtatgagaaaaccattgaagaactgtcaaatgcacgtaatttgaatacctctgccttacagctggaacatgagcatttaattaaactcaatcaaaagaaagacatggaaatagcagaactcaaaaagaatattgaacaaatggatactgaccataaagaaactaaggacgttttgtcatctagtttagaagagcagaagcagttgacacaacttataaacaagaaagaaatttttattgaaaagcttaaagaaagaagttcaaagctgcaggaggaattggataaatattctcaggccttaagaaaaaatgaaattttaagacagaccatagaggaaaaagaccgaagtcttggatccatgaaagaggaaaataatcatctgcaagaagaattggaacgactcagggaagagcagagtcgaaccgcacctgtggctgaccctaaaacccttgatagtgttactgaactagcatctgaggtatctcaactgaacacgatcaaggaacatcttgaagaggaaattaaacatcatcaaaagataattgaagatcaaaaccagagtaagatgcaactacttcagtctttacaagagcaaaagaaggaaatggatgagtttagataccagcatgagcaaatgaacgccacacacacccagctctttttagagaaggatgaggaaattaagagtttgcaaaaaacaattgaacaaatcaaaacccagttgcatgaagaaagacaggacattcaaacagataactctgatatttttcaagaaacaaaagttcagagccttaatatagaaaatggaagtgaaaagcatgatttatctaaagctgaaacggaaagattagtgaaaggaataaaagagcgagaactggagattaaacttctaaatgaaaagaatatatctttaactaaacagattgatcagttgtccaaagatgaagttggtaaactaactcagattattcagcagaaagatttggagatacaagctcttcatgctagaatttcttcaacttcccatactcaagatgttgtttaccttcaacagcaactgcaggcttatgctatggaaagagaaaaggtatttgctgttttgaatgagaagactagggaaaatagccatctaaaaacagaatatcacaaaatgatggatattgttgctgccaaggaagcagctcttatcaaactgcaagatgaaaataaaaaattgtccactagatttgaaagtagtggccaagatatgtttagagaaactattcagaatttatcacgtatcattcgagaaaaagacatcgaaatagatgcactaagtcagaaatgtcagactttattggcagttttacaaacatccagcactggtaatgaggctggaggtgttaatagtaatcaatttgaggagcttctacaggaacgtgacaagttaaaacagcaagtaaagaaaatggaagagtggaagcagcaggtgatgaccacagtacaaaatatgcaacacgagtcagcccagcttcaggaagagcttcaccaacttcaagcacaggttttggttgacagtgataataattctaaattacaagtggactatactggcctgatccaaagttatgagcagaatgaaaccaaactcaaaaattttgggcaggaattagcacaagttcagcacagcattgggcagctttgcaataccaaggatcttcttttaggaaaacttgatattatttcaccccagctgtcttctgcatcattgcttactccccagtctgcagagtgtcttagagcaagtaagtctgaagtattgagtgaatcttctgaattgcttcagcaagagttagaagagctaagaaaatcactacaggaaaaagatgcaacaattagaactctccaggaaaataaccacagattgtctgattcgattgctgccacctcagagctagaaagaaaagaacacgaacaaaccgattcagaaatcaagcagctaaaggagaaacaagatgttttgcaaaagttacttaaggaaaaagacctcttaatcaaagccaaaagtgatcaactactttcttccaatgaaaatttcactaacaaagtaaatgaaaacgaacttttgaggcaggcagtaacaaacctgaaggagagaatattaattctagagatggacattggcaaactaaaaggagaaaatgaaaaaatagtggaaacatacaggggaaaggaaacagaatatcaagcgttacaagagactaacatgaagttttctatgatgctgcgagaaaaagagtttgagtgccactcaatgaaggagaaggctcttgcttttgaacagctattgaaagagaaagaacagggcaagactggagagttaaatcagcttttaaatgcagttaaatcaatgcaggagaagacagttgtgtttcaacaggagagagaccaagtcatgttggccctgaaacaaaaacaaatggaaaatactgccctacagaatgaggttcaacgtttacgtgacaaagaatttcgttcaaaccaagagctagagagattgcgtaatcatcttttagaatcagaagattcttatacccgtgaagctttggctgcagaagatagagaggctaaactaagaaagaaagtcacagtattggaggaaaagctagtttcatcctctaatgcaatggaaaatgcaagccatcaagccagtgtgcaggtagagtcattgcaagaacagttgaatgtagtttccaagcaaagggatgaaactgcgctgcagctttctgtctctcaggaacaagtaaagcagtatgctctgtcactggccaacctgcagatggtactagagcatttccaacaagaggaaaaagctatgtattctgctgaactcgaaaagcaaaaacagcttatagctgaaatggaagaaataaacgcagaaaatcctggaaggaaaagttgatatcattacaggaatgtttggatgaagcaaatgctgcattggattcagcatcaagacttacagaacagttagatgtaaaagaagaacaaattgaagaacttaaaagacaaaatgagctccgacaagaaatgctggatgatgtacaaaagaaattgatgagcttagcaaacagctcagaaggaaaagtagacaaagtcctaatgagaaacctcttcattggtcatttccacacaccgaaaaatcagcgtcatgaagtgttacggttaatggggagcatcctgggcgtcagaagggaggagatggagcagttgtttcatgacgatcagggcggtgttaccaggtggatgactgggtggcttggaggaggatcaaaaagtgttcccaacacacctttgagaccaaatcagcaatctgtggttaatagttctttttcagaactttttgttaaatttctagaaacagaatctcatccatccattccaccaccaaagctttctgttcatgatatgaaacctctggattcaccaggaagaagaaaaagagatacaaatgcaccagaaagttttaaagatacagcagaatccaggtctggtagaagaacagatgtaaatccgtttttggctcctcgctcggcagctgtaccctctttattaacccagctggacttggacctggtgggcccgggcatcttcttctgaaacccatctcagatgtttttgcccacatttacacctttgccagcgttacctgacaacagtgctggggttgtgctgaaagaccttttaaagcaatagatgattctcaagccagagacaatctagcactttaaagaaaccatgaacactatatgtatgtactttatcacaaagtggcctttggggagaaagtcatgtatttgttcgcaattatgctttctctgaatttaataaaaatattcctaatgcttttag

SEQ ID NO: 6293 - DNA, 5313 bp, Homo sapiens
  SIMILAR (3187)..(4413): 931254mologous to Homo sapiens LGMD2B protein,accession number AJ007670,Smith-Waterman Score=2082.
atggatgacaagagtgaagattccatgtccgtctccaccttgagcttcggtgtgaacagacccacgatttcctgcatattcgactccctaggctggcccaaggacatgttaattagtcagggacagactccacctccccccgagccccagctcttaaccactccagccactcactctggcacctctgttttttcccttggtgaagatgggaaccgctaccatctacgctgctacatgtaccaggcccgggacctggctgcgatggacaaggactctttttctggtagtctgctccatgacatggacgccggtcacctgagcttcgtggaagaggtgtttgagaaccagacccggcttcccggaggccagtggatctacatgagtgacaactacaccgatgtgaacggggagaaggtgcttcccaaggatgacattgagtcgcactgggctggaagtgggaagatgaggaatggtccacagacctcaaccgggctgtcgatgagcaaggtgggcagcatgtggaacctggcgagccccatccccggcaagctctcaagccatgctggctgggagtatagcatcaccatccccccggagcggaagccgaagcactgggtccctgctgagaagatgtactacacacaccgacggcggcgctgggtgcgcctgcgcaggagggatctcagccaaatggaagcactgaaaaggcacaggcaggcggaggcggagggcgagggctgggagtacgcctctctttttggctggaagttccacctcgagtaccgcaagacagatgccttccgccgccgccgctggcgcggtcgcatggagccactggagaagacggggcctgcagctgtgtttgcccttgagggggccctgctggagacccctgagtgctgccttctcagtaatgtcagtgaagtcttcggcatgactgaccagctcagcctggtggtgcccagccagcccctgcacctgggttttagggtacatgtgcacattgtgcagggtggctacaggctggcagtgatcgagaaacccttggccaaaaactacctctctgttgcaggctccctgcagctcgatctcaaccgcatgcccaagccagccaagacagccaagaagtgctccttggaccagctggatgatgctttccacccagaatggtttgtgtccctttttgagcagaaaacagtgaagggctggtggccctgtgtagcagaagagggtgagaagaaaatactggcgggcaagctggaaatgaccttggagattgtagcagagagtgagcatgaggagcggcctgctggccagggccgggatgagcccaacatgaaccctaagcttgaggacccaaggtctgggggtataggccacagtccaggaggcatcccattgcatggccatgtagaagtcacaaagcccacgtggctcagagaggggcacgactcatccaaggccacacacctccacatgatgctgatgctgctggtccaggggccatctcggagtagcacagatgtgaagtacaaagtgcctcatcaagatggggctcccattgccccctacttgggtgcccttctgagagaggcagagcatgtgcattcctgctgggaggaagccttcctgaaggggcttccaaaggcctaccccattccatcccaccccacagatggcctcatcctggggttaacatcagacccgactctgagcttcctgaagtgtgcagcgagggaggaggggtgcactcccgaggagaccacaggaatgccaagcagggaaaaggcgccccgagccaagggctccggcaacgaggatccaatatcggagggtgactccagcccccgtaacaggagagaccgtgaagcatctcagatttctagatgtcaggagcatgtgacagacagtgaagaggacaagaagggggctggatgtggactcaagagggtgctgcagaaggaagtcagcccattgccaccccattgcatctccgaaagccaagccaagagacaaggaagatacaggaacaccttgtcagatctggcacctagggggctaaaccagacacccctggatcactttgcccagaaccctccacatggtcctggaaaggccagagcaatggagcaaatgcaagatgtttctgtgtttcttaagctcccttttgtggctttctgcccctcccttcctcgctgggggaacaatctgttccgggatgtggccccttcactaattgctgttcagatagtttctaaggagggctgtctcctgcacagtaaaagagttaaacttgtgcatccaactggagctgtccttgatgactctcggactctgccgacccgttcctgcagagtggatgactacctgggcttcctccccacttttgggccctgctacatcaacctctatggcagtcccagagagttcacaggcttcccagacccctacacagagctcaacacaggcaagggggaaggtgtggcttatcgtggccggcttctgctctccctggagaccaagctggtggagcacagtgaacagaaggtggaggaccttcctgcggatgacatcctccgggtggagaagtaccttaggaggcgcaagtactccctgtttgcggccttctactcagccaccatgctgcaggatgtggatgatgccatccagtttgaggtcagcatcgggaactacgggaacaagttcgacatgacctgcctgccgctggcctccaccactcagtacagccgtgcagtctttgacgggtgccactactactacctaccctggggtaacgtgaaacctgtggtggtgctgtcatcctactgggaggacatcagccatagaatcgagactcagaaccagctgcttgggattgctgaccggctggaagctggcctggagcaggtccacctggccctgaaggcgcagtgctccacggaggacgtggactcgctggtggctcagctgacggatgagctcatcgcaggctgcagccagcctctgggtgacatccatgagacaccctctgccacccacctggaccagtacctgtaccagctgcgcacccatcacctgagccaaatcactgaggctgccctggccctgaagctcggccacagtgagctccctgcagctctggagcaggcggaggactggctcctgcgtctgcgtgccctggcagaggaggtctatgacacacagctggagaatgtggaggcctttgagggcctgtctgacttttgtaacaccttcaagctgtaccggggcaagacgcaggaggagacagaagatccatctgtgattggtgaatttaagggcctcttcaaaatttatcccctcccagaagacccagccatccccatgcccccaagacagttccaccagctggccgcccagggaccccaggagtgcttggtccgtatctacattgtccgagcatttggcctgcagcccaaggaccccaatggaaagtgtgatccttacatcaagatctccatagggaagaaatcagtgagtgaccaggataactacatcccctgcacgctggagcccgtatttggaaagatgttcgagctgacctgcactctgcctctggagaaggacctaaagatcactctctatgactatgacctcctctccaaggacgaaaagatcggtgagacggtcgtcgacctggagaacaggctgctgtccaagtttggggctcgctgtggactcccacagacctactgtgtctctggaccgaaccagtggcgggaccagctccgcccctcccagctcctccacctcttctgccagcagcatagagtcaaggcacctgtgtaccggacagaccgtgtaatgtttcaggataaagaatattccattgaagagatagaggctggcaggatcccaaacccacacctgggcccagtggaggagcgtctggctctgcatgtgcttcagcagcagggcctggtcccggagcacgtggagtcacggcccctctacagccccctgcagccagacatcgagcaggccttcccatcctttggtaggaaatctaggtggattagagtgatacctttccccaggtttttcctgcgttgtattatctggaataccagagatgtgatcctggatgacctgagcctcacgggggagaagatgagcgacatttatgtgaaaggttggatgattggctttgaagaacacaagcaaaagacagacgtgcattatcgttccctgggaggtgaaggcaacttcaactggaggttcattttccccttcgactacctgccagctgagcaagtctgtaccattgccaagaaggatgccttctggaggctggacaagactgagagcaaaatcccagcacgagtggtgttccagatctgggacaatgacaagttctcctttgatgattttctggatccctatgccatcgtctccttcctgcaccagagccagaagacggtggtggtgaagaacacccttaaccccacctgggaccagacgctcatcttctacgagatcgagatctttggcgagccggccacagttgctgagcaaccgcccagcattgtggtggagctgtacgaccatgacacttatggtgcagacgagtttatgggtcgctgcatctgtcaaccgagtctggaacggatgccacggctggcctggttcccactgacgaggggcagccagccgtcgggggagctgctggcctcttttgagctcatccagagagagaagccggccatccaccatattcctggttttgagtctgaggacacagacctgccctacccaccaccccagagggaggccaacatctacatggttcctcagaacatcaagccagcgctccagcgtaccgccatcgagatcctggcatggggcctgcggaacatgaagagttaccagctggccaacatctcctcccccagcctcgtggtagagtgtgggggccagacggtgcagtcctgtgtcatcaggaacctccggaagaaccccaactttgacatctgcaccctcttcatggaagtgatgctgcccagggaggagctctactgcccccccatcaccgtcaaggtcatcgataaccgccagtttggccgccggcctgtggtgggccagtgtaccatccgctccctggagagcttcctgtgtgacccctactcggcggagagtccatccccacagggtggcccagacgatgtgagcctactcagtcctggggaagacgtgctcatcgacattgatgacaaggagcccctcatccccatccagaactatgctgccatgaagctggtgaagcccttcagctga

SEQ ID NO: 6294 - DNA, 527 bp, Homo sapiens
  SIMILAR (1)..(243): 971254mologous to Cloning vector pZC320 SopA,accession number U26464,Smith-Waterman Score=406.
atgaaactcatggaaacacttaaccagtgcataaacgctggtcatgaaatgacgaaggctatcgccattgcacagtttaatgatgacagcccggaagcgaggaaaataacccggcgctggagaataggtgaagcagcggatttagttggggtttcttctcaggctatcagagatgccgagaaagcagggcgactaccgcacccggatatggaaattcgaggacgggttgagcaacaggctggcaggatcccaaacccacacctgggcccagtggaggagcgtctggctctgcatgtgcttcagcagcagggcctggtcccggagcacgtggagtcacggcccctctacagccccctgcagccagacatcgagcaggccttcccatcctttggtaggaaatctaggtggattagagtgatacctttccccaggtttttcctgcgttgtattatctggaataccagagatgtgatcctggatgacctgagcctcacgggggagaagatgagcgacatttatgtgaaagg

SEQ ID NO: 6295 - DNA, 6887 bp, Homo sapiens
  SIMILAR (4810)..(587): 991254mologous to Homo sapiens LGMD2B protein,accession number AJ007670,Smith-Waterman Score=7578.
gtggttccaactgttttatactgaaatatgtctgagctgatccaaaaaagcgttgggttgggggagaaggaaatgatggaagtggggtgatctcagagctccatgttagcaactctgggagtgtgggccggtccatctgtctgtctgcccaccctggcaggacaatcaggcctaggaggtctggaggagctcgccgagctgggcggaggaggcaggccagtcccatgctggaggggaccccacggccccttctacagggcaggagagtcctcagctgaagggcttcaccagcttcatggcagcatagttcgggaaggcgtagatgaagatggccaggaacagcagcaggatgaagaggatgatgaagaggatgatggcccaccggaaacgccgccacaggatgaacttcatggtcttgtatggggaggtaaaccacaggaaggaggtgtcggggcgccttgggtcctcaagcttagggttcatgttgggctcatcccggccctggccagcaggccgctcctcatgctcactctctgctacaatctccaaggtcatttccagcttgcccgccagtattttcttctcaccctcttctgctacaacagggccaccagcccttcactgttttctgctcaaaaagggacacaaaccattctgggtggaaagcatcatccagctggtccaaggagcacttcttggctgtcttggctggcttgggcatgcggttgagatcgagctgcagggagcccagaaaatcatcaaaggagaacttgtcattgtcccagatctggaacaccactcgtgctgggattttgctctcagtcttgtccagcctccagaaggcatccttcttggcaatggtacagacttgctcagctggcaggtagtcgaaggggaaaatgaacctccagttgaagttgccttcacctcccagggaacgataatgcacgtctgtcttttgcttgtgttcttcaaagccaatcatccaacctttcacataaatgtcgctcatcttctcccccgtgaggctcaggtcatccaggatcacatctctggtattccagataatacaacgcaggaaaaaccttctggctctccgtggggtgatgttgaagggaggtccaggccgccccagggccttcggaaataggtcgacccacatctgcagcttcccctgctcgatgtctggctgcagggggctgtagaggggccgtgactccacgtgctccgggaccaggccctgctgctgaagcacatgcagagccagacgctcctccactgggcccaggtgtgggtttgggatcctgccagcctctatctcttcaatggaatattctttatcctgaaacattacacggtctgtccggtacacaggtgccttgactctatgctgctggcagaagaggtggaggagctgggaggggcggagctggtcccgccactggttcggtccagagacacagtaggtctgtgggagtccacagcgagccccaaacttggacagcagcctgttctccaggtcgacgaccgtctcaccgatcttttcgtccttggagaggaggtcatagtcatagagagtgatctttaggtccttctccagaggcagagtgcaggtcagctcgaacatctttccaaatacgggctccagcgtgcaggggatgtagttatcctggtcactcactgatttcttccctatggagatcttgatgtaaggatcacactttccattggggtccttgggctgcaggccaaatgctcggacaatgtagatacggaccaagcactcctggggtccctgggcggccagctggtggaactgtcttgggggcatggggatggctgggtcttctgggaggggataaattttgaagaggcccttaaattcaccaatcacagatggatcttctgtctcctcctgcgtcttgccccggtacagcttgaaggtgttacaaaagtcagacaggccctcaaaggcctccacattctccagctgtgtgtcatagaccttcagggtgtcaaaatccttctccaggtaggagccgcacttttccctctcccctatggaggcaaagaatttgctccaccaatcgatgaactcttcctcctggatggggatgaggggctccttgtcatcaatgtcgatgagcacgtcttccccaggactgagtaggctcacatcgtctgggccaccctgtggggatggactctccgccgagtaggggtcacacaggaagctctccagggagcggatggtacactggcccaccacaggccggcggccaaactggcggttatcgatgaccttgacggtgatgggggggcagtagagctcctccctgggcagcatcacttccatgaagagggtgcagatgtcaaagttggggttcttccggaggttcctgatgacacaggactgcaccgtctggcccccacactctaccacgaggctgggggaggagatgttggccagctggtaactcttcatgttccgcaggccccatgccaggatctcgatggcggtacgctggagcgctggcttgatgttctgaggaaccatgtagatgttggcctccctctggggtggtgggtagggcaggtctgtgtcctcagactcatccaggatccttgatgtctcctgcacctcaaaaccaggaatatggtggatggccggcttctctctctggatgagctcaaaagaggccagcagctcccccgacggctggctgcccctcgtcagtgggaaccaggccagccgtggcatccgttccagactcggttgacagatgcagcgacccataaactcgtctgcaccataagtgtcatggtcgtacagctccaccacaatgctgggcggttgctcagcaactgtggccggctcgccaaagatctcgatctcgtagaagatgagcgtctggtcccaggtggggttaagggtgttcttcaccaccaccgtcttctggctctggtgcaggaaggagacgatggcatagggatcagaaaaagagtccttgtccatcgcagccaggtcccgggcctggtacatgtagcagcgtagatggtagcggttcccatagtcgaatatgcaggaaatcgtgggtctgttcacaccgaagctcaaggtggagacggacatggaatcttcactcttgtcatccatcacgccgcccagggccccctcaagggcaaacacagctgcaggccccgtcttctccagtggctccatgcgacggcgccagcggcggcggcggaaggcatctgtcttgcggtactcgaggtggaacttccagccaaaaagagaggcgtactcccagccctcgccctccgcctccgcctgcctgtgccttttcagtgcttccatttggctgagatccctcctgcgcaggcgcacccagcgccgccgtcggtgtgtgtagtacatcttctcagcagggacccagtgcttcggcttccgctccggggggatggtgatgctatactcccagccttgctcatcgacagcccggttgaggtctgtggaccattcctcatcttcccacttccagcccagtgggcactcaatgtcatccttgggaagcaccttctccccgttcacatcggtgtagttgtcactcatgtagatccactggcctccgggaagccgggtctggttctcaaacacctcttccacgaagctcaggtgaccggcgtccatgtcatggagcagagtcttctccggacacacgaaccaatctccagcccaggtccagccggccgaggggcggaagctgtccttgggtagcttgatcttgcccgtgacgtcagaaaacttggggtaggtgaggcccgttgtgccccagttcccaacaagggccaacttagtctcgttctcataggtttcagcaaagacagacagcttcccctcagcaaactggttgaactccttctcatccacagagagcccaaaccacagcttgacccgtatctgcactggcatccgggcgccaggcaccttctccatcggatatttcagaaagattgtctgtagcttcccacaattcttgccacagtagttggcaccccgccgggagaagaggacttggtgggcgggcacccgctggtatgccacacgcttgtctccctgcagcatccagatgacgatgtccggcaggctgttctggggctcctctgccagggcacgcagacgcaggagccagtcctccgcctgctccagagctgcagggagctcactgtggccgagcttcagggccagggcagcctcagtgatttggctcaggtgatgggtgcgcagctggtacaggtactggtccaggtgggtggcagagggtgtctcatggatgtcacccagaggctggctgcagcctgcgatgagctcatccgtcagctgagccaccagcgagtccacgtcctccgtggagcactgcgccttcagggccaggtggacctgctccaggccagcttccagccggtcagcaatcccaagcagctggttctgagtctcgattctatggctgatgtcctcccagtaggatgacagcaccaccacaggtttcacgttaccccagggtaggtagtagtagtggcacccgtcaaagactgcacggctgtactgagtggtggaggccagcggcaggcaggtcatgtcgaacttgttcccgtagttcccgatgctgacctcaaactggatggcatcatccacatcctgcagcatggtggctgagtagaaggccgcaaacagggagtacttgcgcctcctaaggtacttctccacccggaggatgtcatccgcaggaaggtcctccaccttctgttcactgtgctccaccagcttggtctccagggagagcagaagccggccacgataagccacaccttcccccttgcctgtgttgagctctgtgtaggggtctgggaagcctgtgaactctctgggactgccatagaggttgatgtagcagggcccaaaagtggggaggaagcccaggtagtcatccaagtctgaggctttcgaaggcttgacagcacctgcaggctcctcttctatttctcctccaggggcagagattttcgacatactcaggtaggtggtagccacgatgtcattgtgagtcaggcggtcccagtctatgatacgaatcctcattttttcgcacatggagggaaacatggcaggcagtgtgatgttctggttccactgagggttggccgtcttctccaagatcttgctgcacagcattttccccgcaaagctgacctccacaaaggggtccaccaagttcttcttgttactctcgaagccaaagatctgtttcacgttgtccatcacggcatcgtccatctgcggcaagtcctcggcccggaagaccttcaggcagaagtgggctcctcgcagggctacgcctgtgggccggagcaggttgctttcaatgtcctccttgtcttcagaggggtcttttctctccagaggcgcttcgtccccaggccccagcacacaaaggcttgttttcaggtagcctctggccccagcagagaagtcatcagggtctgagagcagcagccacttcctgagataggcgtgccggggctctctgtaaatggtgcccacgtccatccggaactccccgaggagagcatctgtcctgagagaacgagagtctaccaccgtgataaagatgggctcatcaaacagctccccaggagagtcaaacaagttgaagaaaagagtctcattgaagagtgggctgtttcccttgtggatccgcgtccgcttggtctgccctgcagcggtaaccttgaccacaggcttgatgttcacccccggcagctggcgcccctcgatcacctggaccctgatctggaaatcctgcggtttgtctgacagcagctttctagatgtaggcgcacttcgctttcttttgatcccggggtagtggggcggaggacgtgaaggtagtttccttggggtggtgggagcccccgggcctccgctttgatccaggaatggctccgcctcatctccagtgagtccctggtcctctgtgtcttcctctcctcctgtgtctgccactacatccaggtcaggcagagtcggggagggctccagaggagtagggggcgggaacaggggcacagctccaggcagcggtgtgtaggacacctgcaggaccagcgaggcccctgtgggctgcttcttggtgtccagcaggggggcattgaagctggcggacagactaggggtggcgaggacctctcggagtgggaccttggcttcccccaggaacctgttcctccccatcgtctcatggtctttgaccaccacatgaagctcagagccctggtccagggggatgcccttgaggtcccattcaaatccctcattccatacagggttcacgctgttcttgatgactttggttctcttcttcacccctgcaaacaccgcggagcagtaggcatcgctgatgtcggtgtcgggtgtgtggacgttctcggcatagaggatgaagaccctcagcatgcttggcgcgtgtagggccccgtgcgcccagggcgcaaagagggctcggaaaggtcgggagggccgaggcgccgcttgtgggtcccctcgctggagagggctggctgggcgaggccggctcgaatctctggctcctggcttagagcagttgctcttaaaggggaacgggccacccccggctgctccagtgggctaggctgggtccccgccccgcctgcgctcaccccgcttgtcagccggcgttccgagaacaggggcttctgctcatcttccacccccgccgcccttcccgagctccgtcgagctgtaatctaatgctccggctgcggagtctcccaatgacacggcattttgcacctggctgggcggtcga

SEQ ID NO: 6296 - DNA, 927 bp, Homo sapiens
  SIMILAR (728)..(699): 601254mologous to Homo sapiens Human brain-specific dysferlin protein,accession number W90873,Smith-Waterman Score=41.
atgcctgaagaccggaattctggggggtgcccggctggtgccttagcctcaactcctttcatccctaaaactacatacagaagaatcaaacggtgttttagttttcggaaaggcatttttggacagaaactggaggatactgttcgttatgagaagagatatgggaaccgtctggctccgatgttggtggagcagtgcgtggactttatccgacaaagggggctgaaagaagagggtctctttcgactgccaggccaggctaatcttgttaaggagctccaagatgcctttgactgtggggagaagccatcatttgacagaaatgggatgcccagagctgacgctgctgcagattgctgcagtctgcagacacacagagccatggacatgactttccctgagacagcctgcagcagggtcatcgtgaattccctgataggcaggataggagaaaaggctcgatgtctggctgcagggggctgtagaggggccgtgactccacgtgctccgggaccaggccctgctgctgaagcacatgcagagccagacgctcctccactgggcccagggaatgggtcaaaaactggtgctacaggtggggagaagacatggggtattcctgacccagagaagcctggccaaccatccaacaacatgaacttggagcccactatgtcaaaggccttggctttgggagctgatggtggacacacacatctgtacatgtacccaggtaatggaaaaccccactcaagctacgaaagggaattcaatggctttacagaaatgaaacacccagatgattggtttcaggtaaaggctgatccagctcctcaatgtgagatcattgagagtttgtgttctcaaggttggcttcagtttaaagctggctccattcatcgtgctgggcttgaagctgctctctga

SEQ ID NO: 6297 - DNA, 897 bp, Homo sapiens
  SIMILAR (313)..(891): 421254mologous to Homo sapiens Human beta1,6-N- acetylglucosaminyltransferase protein,accession number R48975,Smith -Waterman Score=440.
atgcctggccccatgtccctctggctcctcctgctggttctgccactgtccctggagcacagtgatctcagaatttgcttccccgggcaggtggtcagcatggaaagcagctccacgggcttcatctggactgatgtcagagcctggcagacatcaaatcggcatgtttcttcttggagggaacccaggcattctcggatgccccctggggccggcctcatggagcggatccaggctattgcccagaacgtctccgacatcgctgtgaaggtggaccagatcctgcgccacagtctgctcctgcacagcaaggtgtcagaaggccggcgggaccagtgtgaggcacccagtgaccccaagttccctgactgctcagggaaggtggagtggatgcgtgcccgctggacctctgacccctgctacgccttctttggggtggacggcaccgagtgctccttcctcatctacctcagtgaggtcgagtggttctgccccccgctgccctggaggaaccagacggctgcccagagggcacccaagcccctccccaaagtccaggcagttttccgaagcaacctgtcccaccttctggacctgatgggcagcgggaaggagtccctgatcttcatgaagaagcggaccaagaggctcacagcccagtgggcgctggctgcccagcgcctggcacagaagctgggggccacccagagggaccagaagcagatcctggtccacatcggcttcctgacggaggagtccggggacgtgttcagccctcgggtcctgaagggcgggcccctaggggagatggtgcagtgggcggacattctgactgcactctatgtcctgggccatggcctgcgggtcacagtctccctgaaggagctgcagagatag

SEQ ID NO: 6298 - DNA, 525 bp, Homo sapiens
  SIMILAR (10)..(525): 411254mologous to Homo sapiens cadherin related 23,accession number AF312024,Smith-Waterman Score=274.
atgaggcgctgccggtgggccgccctggccctggggctgctgcgcctctgcttggctcaggccaacttcgccccgcacttcttcgacaacggggtcggcagcaccaacggaaacatggctctgttcagcctcccagaggacacccctgtaggctctcacgtatacaccctgaatgggacagaccctgagggagaccccatctcctaccacatcagctttgaccccagcactagaagcgtcttttctgttgaccccacttttggaaacatcaccctggttgaagagctggacagagagagggaagatgagattgaagccatcatcagcatttctgatggcctgaatctggtggccgaaaaagtcgtgatcctggtgaccgatgccaatgatgaggcgcccaggttcatccaggagccttatgttgccctggttcccgaggacatacctgctgggagcatcatctttaaggtccatgcagcggacagggacacaggctctggagggagtgtcacctacttcctgcag

SEQ ID NO: 6299 - DNA, 413 bp, Homo sapiens
  SIMILAR (6)..(251): 391254mologous to human herpesvirus 1 latency-related protein 1,accession number J04323,Smith-Waterman Score=95.
cttgatggccgctgacctcaaaactctccatggggggtacccctctgcccactgagggggcacctagggagcctaggggtcccgtgaggccctcccaccatggttccccgcctctgcctctccccgcagctccgaccatgaccatccatcctatgagtgctggctgggctcaagcccgggtactttcctccgtgcccaagcaaccctgtaggaaccacatatcctgggccagacgaatgcaggagctgcctcctctggacacagcggtggctctcacctcccttccatcttggcaggatgagtgcatttgctgcgagaaagcagccccgacggcagggccctagggccccaggccaggccaccacgaccgcgaggaaccaagacaacaagcccactcctgaatcacgcctcaa

SEQ ID NO: 6300 - DNA, 2723 bp, Homo sapiens
  SIMILAR (1)..(2193): 521254mologous to Mus musculus EGF-related protein SCUBE1,accession number AF276425,Smith-Waterman Score=2116.
atgggctcggggcgcgtacccgggctctgcctgcttgtcctgctggtccacgcccgcgccgcccagtacagcaaagccgcgcaagatgtggatgagtgtgtggaggggactgacaactgccacatcgatgctatctgccagaacaccccgaggtcatacaagtgcatctgcaagtctggctacacaggggacggcaaacactgcaaagacgtggatgagtgcgagcgagaggataatgcaggttgtgtgcatgactgtgtcaacatccctggcaattaccggtgtacctgctatgatggattccacctggcacatgacggacacaactgtctggatgtggacgagtgtgccgagggcaacggcggctgtcagcagagctgtgtcaacatgatgggcagctatgagtgccactgccgggaaggcttcttcctcagcgacaaccagcatacctgtatccagcggccagaagaaggaatgaattgcatgaacaagaaccacggctgtgcccacatttgccgggagacacccaaggggggtattgcctgtgaatgccgtcctggctttgagcttaccaagaaccaacgggactgtaaatgtgagataattgggatggcagtgacatgcaactatggtaacggcggctgccagcacacgtgtgatgacacagagcagggtccccggtgcggctgccatatcaagtttgtgctccataccgacgggaagacatgcatcgagacctgtgctgtcaacaacgggggctgtgacagtaagtgccatgatgcagcgactggtgtccactgcacctgccctgtgggcttcatgctgcagccagacaggaagacgtgcaaagatatagatgagtgccgcttaaacaacgggggctgtgaccatatttgccgcaacacagtgggcagcttcgaatgcagttgcaagaaaggctataagcttctcatcaatgagaggaactgccaggatatagacgagtgttcctttgatcgaacctgtgaccacatatgtgtcaacacaccaggaagcttccagtgtctctgccatcgtggctacctgttgtatggtatcacccactgtggggatgtggatgaatgcagcatcaaccggggaggttgccgctttggctgcatcaacactcctggcagctaccagtgtacctgcccagcaggccagggtcggctgcactggaatggcaaagattgcacagagccactgaagtgtcagggcagtcctggggcctcgaaagccatgctcagctgcaaccggtctggcaagaaggacacctgtgccctgacctgtccctccagggcccgatttttgccagagtctgagaatggcttcacggtgagctgtgggacccccagccccagggctgctccagcccgagctggccacaatgggaacagcaccaactccaaccactgccatgaggctgcagtgctgtccattaaacaacgggcctccttcaagatcaaggatgccaaatgccgtttgcacctgcgaaacaaaggcaaaacagaggaggctggcagaatcacagggccaggtggtgccccctgctctgaatgccaggtcaccttcatccaccttaagtgtgactcctctcggaagggcaagggccgacgggcccggacccctccaggcaaagaggtcacaaggctcaccctggaactggaggcagagcaactctttctcctccctgatacacacggccatccaccaccagccagctgtgggctgccctgcctccgacagcgaatggaacggcggctgaaaggatccctgaagatgctcagaaagtccatcaaccaggaccgcttcctgctgcgcctggcaggccttgattatgagctggcccacaagccgggcctggtagccggggagcgagcagagccgatggagtcctgtaggcccgggcagcaccgtgctgggaccaagtgtgtccagtgctccccagggcactactacaacaccagcatccaccgctgtattcgctgtgccatgggctcctatcagcccgacttccgtcagaacttctgcagccgctgtccaggaaacacaagcacagactttgatggctctaccagtgtggcccaatgcaagaatcgtcagtgtggtggggagctgggtgagttcactggctatattgagtcccccaactacccgggcaactacccagctggtgtggagtgcatctggaacatcaaccccccacccaagcgcaagatccttatcgtggtaccagagatcttcctgccatctgaggatgagtgtggggacgtcctcgtcatgagaaagaactcatccccatcctccattaccacttatgagacctgccagacctacgagcgtcccattgccttcactgcccgttccaggaagctctggatcaacttcaagacaagcgaggccaacagcgcccgtggcttccagattccctatgttacctatgatgaggactatgagcagctggtagaagacattgtgcgagatggccggctctatgcctctgaaaaccaccaggagattttaaaggacaagaagctcatcaaggccttctttgaggtgctagcccacccccagaactacttcaagtacacagagaaacacaaggagatgctgccaaaatccttcatcaagctgctccgctccaaagtttccagcttcctgaggccctacaaatagtaaccctaggctcagagacccaatttttt

SEQ ID NO: 6301 - DNA, 353 bp, Homo sapiens
  SIMILAR (70)..(117): 501254mologous to Rattus norvegicus calcitonin-like receptor,accession number X70658,Smith-Waterman Score=42.
tcattgtatcttcatcgcattgtagtcatcttctgctccttttgctcctgtggctgccaccgccactgctgctccttctctttcttctttcttcttctccttctccttcttcttgttcttctttttcctcctcctcctccttctctttcttgtttcttcttctccttctccttcttcttgttcttctttttcctcctcctcctcctcttctcttattcctcttcctacccctccttcttcctccaacttccttcttctacaagcggaatccaatctgtacatgaaagctgtgagagctactcttatcttggtgccattgcttggcattgaatttgtgctgattccatggcgac

SEQ ID NO: 6302 - DNA, 9449 bp, Homo sapiens
  SIMILAR (67)..(9180): 1001254mologous to Homo sapiens Trio isoform,accession number AF091395,Smith-Waterman Score=15771.
gaggcggccaaggacctggccgacatcgcggccttcttccgatccgggtttcgaaaaaacgatgaaatgaaagctatggatgttttaccaattttgaaggaaaaagttgcatacctttcaggtgggagagataaacgtggaggtcccattttaacgtttccggcccgcagcaatcatgacagaatacgacaggaggatctcaggagactcatttcctatctagcctgtattcccagcgaggaggtctgcaagcgtggcttcacggtgatcgtggacatgcgtgggtccaagtgggactccatcaagccccttctgaagatcctgcaggagtccttcccctgctgcatccatgtggccctgatcatcaagccagacaacttctggcagaaacagaggactaattttggcagttctaaatttgaatttgagacaaatatggtctctttagaaggccttaccaaagtagttgatccttctcagctaactcctgagtttgatggctgcctggaatacaaccacgaagaatggattgaaatcagagttgcttttgaagactacattagcaatgccacccacatgctgtctcggctggaggaacttcaggacatcctagctaagaaggagctgcctcaggatttagagggggctcggaatatgatcgaggaacattctcagctgaagaagaaggtgattaaggcccccatcgaggacctggatttggagggacagaagctgcttcagaggatacagagcagtgaaagctttcccaaaaagaactcaggctcaggcaatgcggacctgcagaacctcttgcccaaggtgtccaccatgctggaccggctgcactcgacacggcagcatctgcaccagatgtggcatgtgaggaagctgaagctggaccagtgcttccagctgaggctgtttgaacaggatgctgagaagatgtttgactggatcacacacaacaaaggcctgtttctaaacagctacacagagattgggaccagccaccctcatgccatggagcttcagacgcagcacaatcactttgccatgaactgtatgaacgtgtatgtaaatataaaccgcatcatgtcggtggccaatcgtctggtggagtctggccactatgcctcgcagcagatcaggcagatcgcgagtcagctggagcaggagtggaaggcgtttgcggcagccctggatgagcggagcaccttgctggacatgtcctccattttccaccagaaggccgaaaagtatatgagcaacgtggattcatggtgtaaagcttgcggtgaggtagaccttccctcagagctgcaggacctagaagatgccattcatcaccaccagggaatatatgaacatatcactcttgcttattctgaggtcagccaagatgggaagtcgctccttgacaagctccagcggcccttgactcccggcagctccgattccctgacagcctctgccaactactccaaggccgtgcaccatgtcctggatgtcatccacgaggtgctgcaccaccagcggcacgtgagaacaatctggcaacaccgcaaggtccggctgcatcagaggctgcagctgtgtgttttccagcaggaagttcagcaggtgctagactggatcgagaaccacggagaagcatttctgagcaaacatacaggtgtggggaaatctcttcatcgggccagagcattgcagaaacgtcatgaagattttgaagaagtggcacagaacacatacaccaatgcggataaattactggaagcagcagaacagctggctcagactggggaatgtgaccccgaagagatttatcaggctgcccatcagctggaagaccggattcaagatttcgttcggcgtgttgagcagcgaaagatcctactggacatgtcagtgtcctttcacacccatgtgaaagagctgtggacgtggctggaggagctgcagaaggagctgctggacgacgtgtatgccgagtcggtggaggccgtgcaggacctcatcaagcgctttggccagcagcagcagaccaccctgcaggtgactgtcaacgtgatcaaggaaggggaggacctcatccagcagctcagggactctgccatctccagtaacaagaccccccacaacagctccatcaaccacattgagacggtgctgcagcagctggacgaggcgcagtcgcagatggaggagctcttccaggagcgcaagatcaagctggagctcttcctgcacgtgcgcatcttcgagagggacgccatcgacattatctcagacctcgagtcttggaatgatgagctttctcagcaaatgaatgacttcgacacagaagatctcacgattgcagagcagcgcctccagcaccatgcagacaaagccttgaccatgaacaacttgacttttgacgtcatccaccaagggcaagatcttctgcagtatgtcaatgaggtccaggcctctggtgtggagctgctgtgtgatagagatgtagacatggcaactcgggtccaggacctgctggagtttcttcatgaaaaacagcaggaattggatttagccgcagagcagcatcggaaacacctggagcagtgcgtgcagctgcgccacctgcaggcagaagtgaaacaggtgctgggttggatccgcaacggagagtccatgttaaatgccggacttatcacagccagctcgttacaagaggcagagcagctccagcgagagcacgagcagttccagcatgccattgagaaaacacatcagagcgcgctgcaggtgcagcagaaggcagaagccatgctacaggccaaccactacgacatggacatgatccgggactgcgccgagaaggtggcgtctcactggcaacagctcatgctcaagatggaagatcgcctcaagctcgtcaacgcctctgtcgctttctacaaaacctcagagcaggtctgcagcgtcctcgagagcctggaacaggagtacaagagagaagaagactggtgtggcggggcggataagctgggcccaaactctgagacggaccacgtgacgcccatgatcagcaagcacctggagcagaaggaggcattcctgaaggcttgcacccttgctcggaggaatgcagacgtcttcctgaaatacctgcacaggaacagcgtgaacatgccaggaatggtgacgcacatcaaagctcctgaacagcaagtgaaaaatatcttgaatgaactcttccaacgggagaacagggtattgcattactggaccatgaggaagagacggctggaccagtgtcagcagtacgtggtctttgagaggagtgccaagcaggctttggaatggatccatgacaatggcgagttctacctttccacacacacctccacgggctccagtatacagcacacccaggagctcctgaaagagcacgaggagttccagataactgcaaagcaaaccaaagagagagtgaagctattgatacagctggctgatggcttttgtgaaaaagggcatgcccatgcggcagagataaaaaaatgtgttactgctgtggataagaggtacagagatttctctctgcggatggagaagtacaggacctctttggaaaaagccctggggatttcttcagattccaacaaatcgagtaaaagtctccagctagatatcattccagccagtatccctggctcagaggtgaaacttcgagatgctgctcatgaacttaatgaagagaagcggaaatctgcccgcaggaaagagttcataatggctgagctcattcaaactgaaaaggcttatgtaagagacctccgggaatgtatggatacgtacctgtgggaaatgaccagtggcgtggaagagattccacctggcattgtaaacaaagaactcatcatcttcggaaacatgcaagaaatctacgaatttcataataacatattcctaaaggagctggaaaaatatgaacagttgccagaggatgttggacattgttttgttacttgggcagacaagtttcagatgtatgtcacatattgcaaaaataagcctgattctactcagctgatattggaacatgcagggtcctattttgacgagatacagcagcgacatggattagccaattccatttcttcctaccttattaaaccagttcagcgaataacgaaatatcagctccttttaaaagagctgctgacgtgctgtgaggaaggaaagggagagattaaagatggcctggaggtgatgctcagcgtgccgaagcgagccaatgacgccatgcacctcagcatgctggaagggtttgatgaaaacattgagtctcagggagaactcatcctacaggaatccttccaagtgtgggacccaaaaaccttaattcgaaagggtcgagaacggcatctcttcctttttgaaatgtccttagtatttagtaaagaagtgaaagattccagtgggagaagcaagtacctttataaaagcaaattgtttacctcagagttgggtgtcacagaacatgttgaaggagacccttgcaaatttgcactgtgggtggggagaacaccaacttcagataataaaattgtccttaaggcttccagcatagagaacaagcaggactggataaagcatatccgcgaagtcatccaggagcggacgatccacctgaagggagccctgaaggagcccattcacatccctaagaccgctcccgccacaagacagaagggaaggagggatggagaggatctggacagccaaggagacggcagcagccagcctgatacgatttccatcgcctcacggacgtctcagaacacgctggacagcgataagctctctggtggctgtgagctgacagtggtgatccatgacttcaccgcttgcaacagcaacgagctgaccatccgacggggccagaccgtggaagttctggagcggccgcatgacaagcctgactggtgtctggtgcggaccactgaccgctccccagcggcagaaggcctggtcccctgtggttcactgtgcatcgcccactccagaagtagcatggaaatggagggcatcttcaaccacaaagactcgctctccgtctccagcaatgacgccagtccacccgcatccgtggcttccctccagccccacatgatcggggcccagagctcgccgggccccaagcggccgggcaacaccctgcgcaagtggctcaccagccccgtgcggcggctcagcagcggcaaggccgacgggcacgtgaagaagctggcgcacaagcacaagaagagccgcgaggtccgcaagagcgccgacgccggctcgcagaaggactccgacgacagtgcggccaccccgcaggacgagacggtcgaggagagaggccggaacgagggcctgagcagcggtactctctccaaatcctcctcctcggggatgcagagctgtggagaagaggaaggcgaggagggggccgacgccgtgcccctgccgccacccatggccatccagcagcacagcctcctccagccagactcacaggatgacaaggcctcttctcggttattagtccgccccaccagctccgaaacaccgagtgcagccgagctcgtcagtgcaattgaggaactcgtgaaaagcaagatggcactggaggatcgccccagctcactccttgttgaccagggagatagtagcagcccttccttcaacccttcggataattcccttctctcttcctcctcgcccattgatgagatggaagaaaggaaatccagctctttaaagagaagacactacgttttgcaagaactagtggagacagagcgtgactatgtgcgggaccttggctatgtggttgagggctacatggcacttatgaaagaagatggtgttcctgatgacatgaaaggaaaagacaaaattgtgttcggcaacatccatcagatttacgactggcacagagacttttttttaggagagttagagaagtgccttgaagatccagaaaaactaggatccctttttgttaaacacgagagaaggttgcacatgtacatagcttattgtcaaaataaaccaaagtctgagcacattgtctcagaatacattgataccttttttgaggacttaaagcagcgtcttggccacaggttacagctcacagatctgttgatcaaaccagtgcagagaatcatgaagtatcagctgttactgaaggacttcctcaagtattccaaaaaggccagcctggatacatcagaattagagagagctgtggaagtcatgtgcatagtacccaggcggtgcaacgacatgatgaacgtggggcggctgcaaggattcgacgggaaaatcgttgcccagggtaaactgctcttgcaggacacattcttggtcacagaccaagatgcaggacttctgcctcgctgcagagagaggcgcatcttcctctttgagcagatcgtcatattcagcgaaccacttgataaaaagaagggcttctccatgccgggattcctgtttaagaacagtatcaaggtgagttgcctttgcctggaggaaaatgtggaaaatgatccctgtaaatttgctctgacatcgaggacgggtgacgtggtagagaccttcattttgcattcatctagtccaagtgtccggcaaacttggatccatgaaatcaaccaaattttagaaaaccagcgcaattttttaaatgccttgacatcgccaatcgagtaccagaggaaccacagcgggggcggcggcggcggcggcagcgggggcagcggcgggggtgggggcagcggcggcggcggggcccccagtggcggcagcggccacagtggcggccccagcagctgcggcggcgcccccagcacgagcaggagccggccctcccggatcccccagcctgtccgacaccacccccccgtgctggtctcctctgcagcctcgagccaggcagaggcagacaagatgtcaggtacgtccacccccgggccctccctgcctccccctggcgcggcccccgaggccggccccagcgcgcccagcaggcggccccccggcgcggacgccgaggggtccgagcgagaagcggagccgatccccaagatgaaggtgctggagagccccaggaaaggcgccgcgaacgcctcggggtcgagcccagacgcccccgccaaggacgcgcgcgctagcctgggcaccctgccgcttgggaagccccgggccggggccgcttcgccgctgaactcgccgctctccagcgcggtcccttctctcggcaaggagcccttcccccccagcagccccctgcagaaggggggctccttctggagctccatccccgcctcccccgccagccgacccggctccttcaccttcccgggggacagcgactccctccagcggcagacaccccgccacgcggcccctggcaaggatactgaccgcatgagcacgtgctcctcggccagcgagcagtccgtgcagtccacccagagcaacgggagtgaaagcagcagcagtagcaacatctccaccatgttggtgacacacgattacacggcagtgaaggaggatgagatcaacgtctaccaaggagaggtcgttcaaattctggccagcaaccagcagaacatgtttctggtgttccgagccgccactgaccagtgccccgcagctgagggctggattccaggctttgtcctgggccacaccagtgcagtcatcgtggagaacccggacgggactctcaagaagtcaacatcttggcacacagcactccgtttaaggaaaaaatctgagaaaaaagataaagacggcaaaagggaaggcaagttagagaacggttatcggaagtcacgggaaggactcagcaacaaggtatctgtgaagcttctcaatcccaactacatttatgacgttcccccagaattcgtcattccattgagtgaggtcacgtgtgagacaggggagaccgttgttcttagatgtcgagtctgtggccgccccaaagcctcaattacctggaagggccctgaacacaacaccttgaacaacgatggtcactacagcatctcctacagtgacctgggagaggccacgctgaagattgtgggcgtgaccacggaagatgacggcatctacacgtgcatcgctgtcaatgacatgggttcagcctcatcatcggccagcctgagggtcctaggtccagggatggatgggatcatggtgacctggaaagacaactttgactccttctacagtgaagtggctgagcttggcaggggcagattctctgtcgttaagaaatgtgatcagaaaggaaccaagcgagcagtggccactaagtttgtgaacaagaagttgatgaagcgcgaccaggtcacccatgagcttggcatcctgcagagcctccagcaccccctgcttgtcggcctcctcgacacctttgagacccccaccagctacatcctggtcttagaaatggctgaccagggtcgcctcctggactgcgtggtgcgatggggaagcctcactgaagggaagatcagggcgcacctgggggaggttctggaagctgtccggtacctgcacaactgcaggatagcacacctggacctaaagcctgagaatatcctggtggatgagagtttagccaagccaaccatcaaactggctgactttggagatgctgttcagctcaacacgacctactacatccaccagttactggggaaccctgaattcgcagcccctgaaatcatcctcgggaaccctgtctccctgacctcggatacgtggagtgttggagtgctcacatacgtacttcttagtggcgtgtcccccttcctggatgacagtgtggaagagacctgcctgaacatttgccgcttagactttagcttcccagatgactactttaaaggagtgagccagaaggccaaggagttcgtgtgcttcctcctgcaggaggaccccgccaagcgtccctcggctgcgctggccctccaggagcagtggctgcaggccggcaacggcagaagcacgggcgtcctcgacacgtccagactgacttccttcattgagcggcgcaaacaccagaatgatgttcgacctatccgtagcattaaaaactttctgcagagcaggcttctgcctagagtttgacctatccagaagttctttctcattctctttcacctgccaatcagctgttaatctgaattttcaagagaaaacaagcaaacataactgatcagctgccggtatgttcatcgtgtgaaattgcattccaagtgagctgtgctcagcagtgcttggacacagagctgcaagctgcgctggggtggaggaccgtcacttacactctgccaaggacggaggtcgcattgctgtatcacagtattttttacggatttctgaaaaaaaaaaaa

SEQ ID NO: 6303 - DNA, 8908 bp, Homo sapiens
  SIMILAR (43)..(5661): 741254mologous to Rattus norvegicus Kalirin-12a,accession number AF232669,Smith-Waterman Score=7348.
gaggcggccaaggacctggccgacatcgcggccttcttccgatccgggtttcgaaaaaacgatgaaatgaaagctatggatgttttaccaattttgaaggaaaaagttgcatacctttcaggtgggagagataaacgtggaggtcccattttaacgtttccggcccgcagcaatcatgacagaatacgacaggaggatctcaggagactcatttcctatctagcctgtattcccagcgaggaggtctgcaagcgtggcttcacggtgatcgtggacatgcgtgggtccaagtgggactccatcaagccccttctgaagatcctgcaggagtccttcccctgctgcatccatgtggccctgatcatcaagccagacaacttctggcagaaacagaggactaattttggcagttctaaatttgaatttgagacaaatatggtctctttagaaggccttaccaaagtagttgatccttctcagctaactcctgagtttgatggctgcctggaatacaaccacgaagaatggattgaaatcagagttgcttttgaagactacattagcaatgccacccacatgctgtctcggctggaggaacttcaggacatcctagctaagaaggagctgcctcaggatttagagggggctcggaatatgatcgaggaacattctcagctgaagaagaaggtgattaaggcccccatcgaggacctggatttggagggacagaagctgcttcagaggatacagagcagtgaaagctttcccaaaaagaactcaggctcaggcaatgcggacctgcagaacctcttgcccaaggtgtccaccatgctggaccggctgcactcgacacggcagcatctgcaccagatgtggcatgtgaggaagctgaagctggaccagtgcttccagctgaggctgtttgaacaggatgctgagaagatgtttgactggatcacacacaacaaaggcctgtttctaaacagctacacagagattgggaccagccaccctcatgccatggagcttcagacgcagcacaatcactttgccatgaactgtatgaacgtgtatgtaaatataaaccgcatcatgtcggtggccaatcgtctggtggagtctggccactatgcctcgcagcagatcaggcagatcgcgagtcagctggagcaggagtggaaggcgtttgcggcagccctggatgagcggagcaccttgctggacatgtcctccattttccaccagaaggccgaaaagtatatgagcaacgtggattcatggtgtaaagcttgcggtgaggtagaccttccctcagagctgcaggacctagaagatgccattcatcaccaccagggaatatatgaacatatcactcttgcttattctgaggtcagccaagatgggaagtcgctccttgacaagctccagcggcccttgactcccggcagctccgattccctgacagcctctgccaactactccaaggccgtgcaccatgtcctggatgtcatccacgaggtgctgcaccaccagcggcacgtgagaacaatctggcaacaccgcaaggtccggctgcatcagaggctgcagctgtgtgttttccagcaggaagttcagcaggtgctagactggatcgagaaccacggagaagcatttctgagcaaacatacaggtgtggggaaatctcttcatcgggccagagcattgcagaaacgtcatgaagattttgaagaagtggcacagaacacatacaccaatgcggataaattactggaagcagcagaacagctggctcagactggggaatgtgaccccgaagagatttatcaggctgcccatcagctggaagaccggattcaagatttcgttcggcgtgttgagcagcgaaagatcctactggacatgtcagtgtcctttcacacccatgtgaaagagctgtggacgtggctggaggagctgcagaaggagctgctggacgacgtgtatgccgagtcggtggaggccgtgcaggacctcatcaagcgctttggccagcagcagcagaccaccctgcaggtgactgtcaacgtgatcaaggaaggggaggacctcatccagcagctcagggactctgccatctccagtaacaagaccccccacaacagctccatcaaccacattgagacggtgctgcagcagctggacgaggcgcagtcgcagatggaggagctcttccaggagcgcaagatcaagctggagctcttcctgcacgtgcgcatcttcgagagggacgccatcgacattatctcagacctcgagtcttggaatgatgagctttctcagcaaatgaatgacttcgacacagaagatctcacgattgcagagcagcgcctccagcaccatgcagacaaagccttgaccatgaacaacttgacttttgacgtcatccaccaagggcaagatcttctgcagtatgtcaatgaggtccaggcctctggtgtggagctgctgtgtgatagagatgtagacatggcaactcgggtccaggacctgctggagtttcttcatgaaaaacagcaggaattggatttagccgcagagcagcatcggaaacacctggagcagtgcgtgcagctgcgccacctgcaggcagaagtgaaacaggtgctgggttggatccgcaacggagagtccatgttaaatgccggacttatcacagccagctcgttacaagaggcagagcagctccagcgagagcacgagcagttccagcatgccattgagaaaacacatcagagcgcgctgcaggtgcagcagaaggcagaagccatgctacaggccaaccactacgacatggacatgatccgggactgcgccgagaaggtggcgtctcactggcaacagctcatgctcaagatggaagatcgcctcaagctcgtcaacgcctctgtcgctttctacaaaacctcagagcaggtctgcagcgtcctcgagagcctggaacaggagtacaagagagaagaagactggtgtggcggggcggataagctgggcccaaactctgagacggaccacgtgacgcccatgatcagcaagcacctggagcagaaggaggcattcctgaaggcttgcacccttgctcggaggaatgcagacgtcttcctgaaatacctgcacaggaacagcgtgaacatgccaggaatggtgacgcacatcaaagctcctgaacagcaagtgaaaaatatcttgaatgaactcttccaacgggagaacagggtattgcattactggaccatgaggaagagacggctggaccagtgtcagcagtacgtggtctttgagaggagtgccaagcaggctttggaatggatccatgacaatggcgagttctacctttccacacacacctccacgggctccagtatacagcacacccaggagctcctgaaagagcacgaggagttccagataactgcaaagcaaaccaaagagagagtgaagctattgatacagctggctgatggcttttgtgaaaaagggcatgcccatgcggcagagataaaaaaatgtgttactgctgtggataagaggtacagagatttctctctgcggatggagaagtacaggacctctttggaaaaagccctggggatttcttcagattccaacaaatcgagtaaaagtctccagctagatatcattccagccagtatccctggctcagaggtgaaacttcgagatgctgctcatgaacttaatgaagagaagcggaaatctgcccgcaggaaagagttcataatggctgagctcattcaaactgaaaaggcttatgtaagagacctccgggaatgtatggatacgtacctgtgggaaatgaccagtggcgtggaagagattccacctggcattgtaaacaaagaactcatcatcttcggaaacatgcaagaaatctacgaatttcataataacatattcctaaaggagctggaaaaatatgaacagttgccagaggatgttggacattgttttgttacttgggcagacaagtttcagatgtatgtcacatattgcaaaaataagcctgattctactcagctgatattggaacatgcagggtcctattttgacgagatacagcagcgacatggattagccaattccatttcttcctaccttattaaaccagttcagcgaataacgaaatatcagctccttttaaaagagctgctgacgtgctgtgaggaaggaaagggagagattaaagatggcctggaggtgatgctcagcgtgccgaagcgagccaatgacgccatgcacctcagcatgctggaagggtttgatgaaaacattgagtctcagggagaactcatcctacaggaatccttccaagtgtgggacccaaaaaccttaattcgaaagggtcgagaacggcatctcttcctttttgaaatgtccttagtatttagtaaagaagtgaaagattccagtgggagaagcaagtacctttataaaagcaaattgtttacctcagagttgggtgtcacagaacatgttgaaggagacccttgcaaatttgcactgtgggtggggagaacaccaacttcagataataaaattgtccttaaggcttccagcatagagaacaagcaggactggataaagcatatccgcgaagtcatccaggagcggacgatccacctgaagggagccctgaaggagcccattcacatccctaagaccgctcccgccacaagacagaagggaaggagggatggagaggatctggacagccaaggagacggcagcagccagcctgatacgatttccatcgcctcacggacgtctcagaacacgctggacagcgataagctctctggtggctgtgagctgacagtggtgatccatgacttcaccgcttgcaacagcaacgagctgaccatccgacggggccagaccgtggaagttctggagcggccgcatgacaagcctgactggtgtctggtgcggaccactgaccgctccccagcggcagaaggcctggtcccctgtggttcactgtgcatcgcccactccagaagtagcatggaaatggagggcatcttcaaccacaaagactcgctctccgtctccagcaatgacgccagtccacccgcatccgtggcttccctccagccccacatgatcggggcccagagctcgccgggccccaagcggccgggcaacaccctgcgcaagtggctcaccagccccgtgcggcggctcagcagcggcaaggccgacgggcacgtgaagaagctggcgcacaagcacaagaagagccgcgaggtccgcaagagcgccgacgccggctcgcagaaggactccgacgacagtgcggccaccccgcaggacgagacggtcgaggagagaggccggaacgagggcctgagcagcggtactctctccaaatcctcctcctcggggatgcagagctgtggagaagaggaaggcgaggagggggccgacgccgtgcccctgccgccacccatggccatccagcagcacagcctcctccagccagactcacaggatgacaaggcctcttctcggttattagtccgccccaccagctccgaaacaccgagtgcagccgagctcgtcagtgcaattgaggaactcgtgaaaagcaagatggcactggaggatcgccccagctcactccttgttgaccagggagatagtagcagcccttccttcaaaccttcggataattcccttctctcttcctcctcgcccattgatgagatggaagcaaaggaaatccagctctttaaagagaagcacactacgttttgcaagaactagtggagacagagcgtgactatgtgcgggaccttggctatgtggttgagggctacatggcacttatgaaagaagatggtgttcctgatgacatgaaaggaaaagacaaaattgtgttcggcaacatccatcagatttacgactggcacagagacttttttttaggagagttagagaagtgccttgaagatccagaaaaactaggatccctttttgttaaacacgagagaaggttgcacatgtacatagcttattgtcaaaataaaccaaagtctgagcacattgtctcagaatacattgataccttttttgaggacttaaagcagcgtcttggccacaggttacagctcacagatctgttgatcaaaccagtgcagagaatcatgaagtatcagctgttactgaaggacttcctcaagtattccaaaaaggccagcctggatacatcagaattagagagagctgtggaagtcatgtgcatagtacccaggcggtgcaacgacatgatgaacgtggggcggctgcaaggattcgacgggaaaatcgttgcccagggtaaactgctcttgcaggacacattcttggtcacagaccaagatgcaggacttctgcctcgctgcagagagaggcgcatcttcctctttgagcagatcgtcatattcagcgaaccacttgataaaaagaagggcttctccatgccgggattcctgtttaagaacagtatcaaggtgagttgcctttgcctggaggaaaatgtggaaaatgatccctgtaaatttgctctgacatcgaggacgggtgacgtggtagagaccttcattttgcattcatctagtccaagtgtccggcaaacttggatccatgaaatcaaccaaattttagaaaaccagcgcaattttttaaatgccttgacatcgccaatcgagtaccagaggaaccacagcgggggcggcggcggcggcggcagcggggcagcggcgggggtgggggcagcggcggcggcggggcccccagtggcggcagcggccacagtggcggccccagcagctgcggcggcgcccccagcacgagcaggagccggccctcccggatcccccagcctgtccgacaccacccccccgtgctggtctcctctgcagcctcgagccaggcagaggcagacaagatgtcagagtgaaagcagcagcagtagcaacatctccaccatgttggtgacacacgattacacggcagtgaaggaggatgagatcaacgtctaccaaggagaggtcgttcaaattctggccagcaaccagcagaacatgtttctggtgttccgagccgccactgaccagtgccccgcagctgagggctggattccaggctttgtcctgggccacaccagtgcagtcatcgtggagaacccggacgggactctcaagaagtcaacatcttggcacacagcactccgtttaaggaaaaaatctgagaaaaaagataaagacggcaaaagggaaggcaagttagagaacggttatcggaagtcacgggaaggactcagcaacaaggtatctgtgaagcttctcaatcccaactacatttatgacgttcccccagaattcgtcattccattgagtgaggtcacgtgtgagacaggggagaccgttgttcttagatgtcgagtctgtggccgccccaaagcctcaattacctggaagggccctgaacacaacaccttgaacaacgatggtcactacagcatctcctacagtgacctgggagaggccacgctgaagattgtgggcgtgaccacggaagatgacggcatctacacgtgcatcgctgtcaatgacatgggttcagcctcatcatcggccagcctgagggtcctaggtccagggatggatgggatcatggtgacctggaaagacaactttgactccttctacagtgaagtggctgagcttggcaggggcagattctctgtcgttaagaaatgtgatcagaaaggaaccaagcgagcagtggccactaagtttgtgaacaagaagttgatgaagcgcgaccaggtcacccatgagcttggcatcctgcagagcctccagcaccccctgcttgtcggcctcctcgacacctttgagacccccaccagctacatcctggtcttagaaatggctgaccagggtcgcctcctggactgcgtggtgcgatggggaagcctcactgaagggaagatcagggcgcacctgggggaggttctggaagctgtccggtacctgcacaactgcaggatagcacacctggacctaaagcctgagaatatcctggtggatgagagtttagccaagccaaccatcaaactggctgactttggagatgctgttcagctcaacacgacctactacatccaccagttactggggaaccctgaattcgcagcccctgaaatcatcctcgggaaccctgtctccctgacctcggatacgtggagtgttggagtgctcacatacgtacttcttagtggcgtgtcccccttcctggatgacagtgtggaagagacctgcctgaacatttgccgcttagactttagcttcccagatgactactttaaaggagtgagccagaaggccaaggagttcgtgtgcttcctcctgcaggaggaccccgccaagcgtccctcggctgcgctggccctccaggagcagtggctgcaggccggcaacggcagaagcacgggcgtcctcgacacgtccagactgacttccttcattgagcggcgcaaacaccagaatgatgttcgacctatccgtagcattaaaaactttctgcagagcaggcttctgcctagagtttgacctatccagaagttctttctcattctctttcacctgccaatcagctgttaatctgaattttcaagagaaaacaagcaaacataactgatcagctgccggtatgttcatcgtgtgaaattgcattccaagtgagctgtgctcagcagtgcttggacacagagctgcaagctgcgctggggtggaggaccgtcacttacactctgccaaggacggaggtcgcattgctgtatcacagtattttttacggatttctg

SEQ ID NO: 6304 - DNA, 1341 bp, Homo sapiens
  SIMILAR (1)..(102): 941254mologous to Homo sapiens Trio isoform,accession number AF091395,Smith-Waterman Score=184.
atggcacttatgaaagaagatggtgttcctgatgacatgaaaggaaaagacaaaattgtgttcggcaacatccatcagatttacgactggcacagagagtacgtaaacatgcattgtgcccgatggagcccagtaagtacaacggggaccagaggggcagctctggttggtgtgcccgcgccccctcttcggaggacattctgcggggagccactgggacccaaggagcccacagacgtctacttaccccacctggagctgaacgcaggccatggggtgtccttgccatggaaaaggccagtaaggaaacaggagagtaataaaacaggacaactcatctttgtctctttctctgaaatccgcatgtttgaagaacgatgggatgaattaatggagaaagtaaatggcagaatcatccactttacactgctgtctcctctccacgtgatcccctgtctacccagacaccctgcacccccagtgcttgacccaaccgcctccttatccttcgatgttccttatcctcaaatgtccttagaaacaagagggtaccgagctcgatttcgtccgcgggagtggcagtgggggctggcagccataaagatgctcctaatgattgttggtaccggcaggcggtaccgacctgagttttcagaattaacaatcagttcccacactgaaggctcccagcttttccctgcagtcacactgaggcctaaggagaaactaaaagcctatgagagagggtggtgctcacttgtgggtggatgtgaagggcttgcagtcactgaagtggggatggctgctgccccctccacggacacatgctctcgtctgtcgcaggctccacccaacctgctgcagttacaacccaggaacctactagttggcagttaccaactagcccctgtggaatttgaggatacgccaattccaaccgactaccagtcgcacaatcgacatcaagctaacagaagggggacaggaccacacgcttcaaacgggaacgagcacggggcacaaggggagaagcgcggccagcgcacaacagcgaaaagcacgcaaccagccccaccaaccccaaaacccagcagaccaccaggcaacaagagcgcaacgacacgccccccgcgcaaccgtacagaccccaagaacgcgacgggcacccggggggaagaacaagacagacgacccggacaggccgccaacaacccccatgcaccacagcgaccaaaaaccgagaagaccggccgcaccaaacacgcaagcgacgacacaaagccgggcacgtgcgccagaagacaatgtaatcactgggcatcaattaaaagcaaccagtga

SEQ ID NO: 6305 - DNA, 404 bp, Homo sapiens
  SIMILAR (22)..(123): 701254mologous to Homo sapiens PRO1546,accession number AF116638,Smith-Waterman Score=141.
  misc_feature (1)...(404): n = a,t,c or g
tttaaagacacatgcacacgtatgtttattgcagcactattcacaatagcaaagacttggaaccaacccaaatgtccaacaatgtggcacatatacacgatggaatactatgcagccataaaaaggatgagttcatgtcctttgtagggacatggatgaagctggaaaccatcactctcagcaaactatagcaaggacaaaaaaccaaacaccgcatgttctcactcataggtgggacttgaacaatgagaacacacagacacaggaaagggaacatcgcacaccgcggcctgttgtggggtgggggggaggggggagaggggnnnnnnnnntnntnntatgtttaatgacnagttactgggtgccgnacaccaacatggcgcatgtatacataaataacttaa

SEQ ID NO: 6306 - DNA, 1281 bp, Homo sapiens; identical to SEQ ID NO: 5683
  SIMILAR (797)..(889): 931254mologous to Homo sapiens putative p150,accession number U93574,Smith-Waterman Score=148.

SEQ ID NO: 6307 - DNA, 2823 bp, Homo sapiens
  SIMILAR (1225)..(2475): 951254mologous to Homo sapiens putative p150,accession number U93563,Smith-Waterman Score=2086.
atgagaacaaagacacaacataccagaatctcttgggacgcattcaaagcagtgtgtagagggaaatttatagcactaaatgcccacaagagaaagcaggaaagatccaaaattgacaccctaacatcacaattaaaagaactagaaaagcaagagcaaacacattcaaaagctagcagaaggcaagaaataactaaaatcagagcagaactgaaggaaatagagacacaaaaatcccttcaaaaaattaatgaatccaggagctggttttttgaaaggatcaacaatattgatagaccgctagcaagactaataaagaaaaaaagagagaagaatcaaatagacacaataaaaaatgataaaggggatatcaccaccgatcccacagaaatacaaactaccatcagagaatactacaaacacctctatgctaataaactaaaaaatctagaagaaatggataaattcctcgacacatacaccctcccaagactaaaccaggaagaagttgaatctctgaatagaccaataacaggatctgaaattgtgacaataatcaatagcttaccaaccaaaaagagtccaggaccagatggattcacagccgaattctaccagaggtacaaggaggaactggtaccattccttctgaaactattccaatcaatagaaaaagagggaatcctccctaactcattttatgaggccagcatcattctgataccaaagccaggcagagacacaaccaaaaaagagaattttagaccaatatccttgatgaacattgatgcaaaaatcctcaataaaatactggcaaaccgaatccagcagcacatcaaaaagcttatccaccatgatcaagtgggcttcatccctgggatgcaaggctggttcaatatacgcaaatcaataaatgtaatccagcatgtaaacagagccaaagacaaaaaccacatgattatctcaatagatgcagaaaaagactttgacaaaattcaacaacccttcatgctaaaaactctcaataaattaggtattgatgggacgtatctgaaaataataagagctatctatgacaaacccacagccaatatcatactgaatgggcaaaaactggaagcattccctttgaaaactggcacaagacagggatgccctctctcaccactcctattcaacatagtggtggaagttctggccagcgcaattaggcaggagaaggaaataaaggcccaaaatctccttaagctgataagcaacttcagcaaagtctcaggatacaaaatcaatgtacaaaaatcacaagcattcttatacaccaataacagacaaacagagagccaaatcatgagtgaactcccattcataattgcttcaaagagaataaaatacctaggaatccaacttacaagggacgtgaaggacctcttcaaggagaactacaaaccactgatcaaggaaataaaagaggatacaaacaaacggaagaacattccatgctcacgggtaggaagaatcaatatcgtgaaaatggccatactgcccaaggtaatttacagattcaatgccatccccatcaagctaccaatgactttcttcacagaattggaaaaaactactttaaagttcatatggaaccaaaaaagagcccacatcgccaagtcaatcctaagccaaaagaacaaagctgggggcatcacactacctgacttcaaactatactacaaggctacagtaaccaaaacagcatggtactcgtaccaaaacagagatatagatcaatggaacagaacagagccctcagaaataacgccacatatctacaactatctgatctttgacaaacctgagaaaaacaagcaatggggaaaggattccctatttaataaatggggctgggaaaactggctagccatatggagaaagctgaaactggatcccttccttacaccttatacaaaaatcaattcaagatggattaaagacttaaacgttagacctaaaaccataaaaaccctagaagaaaacctaggcattaccattcaggacataggcatgggcaaggacttcatgtctaaaacaccaaaagcaatggcaacaaaagacaaaattgacaaatgggatctaatgaaactaaagagcttctgcacagcaaaagaaactaccatcagagtgaacaggcaacctacagaatgggagaaaatttttgcaacctactcatctgacaaagggctaatatccagaatccacaatgaactcaaacaaatttacaagaaaaaaacaaacaaccccaacaaaacgtgggcgaaggacatgaacagacacttctcaaaagaagacatttatgcagccaaaaaacacatgaaaaaatgctcatcatcactggccatcagagaaatgcaaatcaaaaccacaatgagataccatctcacaccagttagaatggcagtcattaaaaagtcaggaaacaacagggacatggatgaaactggaaaccatcattctcagcaaactgtcacaaggacaaaaaaccaaacaccgcatattctcactcatacgtgggaactgaacaatgagatcacatggacacaggaaggagaatatcacactctggggactgtgacatcagaactccaggttctctggtctttggattctgggacttacagcagtgggccccttgtgttctcaggtttggggcttgagagttacacgatttgctgtcctgagtctgagaccttgggacttggactgaaccacactaccaacttccttagttctccaacttgcagacaacttaatatgggacttcttagcttctaa

SEQ ID NO: 6308 - DNA, 2604 bp, Homo sapiens
  SIMILAR (1058)..(1147): 861254mologous to Homo sapiens putative p150,accession number U93563,Smith-Waterman Score=131.
atgaacattgatgcaaaaatcctcaataaaatactggcaaacccaatccagcagcacatcaaaaagcttatccatcatgatcaagtgggcttcatccctgggatgcaaggctgcttcaatatatgcaaatcaataaatgtaatccagcatataaacagaaccaaagacaaaaaccacatgattatctcaatagatgcagaaaaggcctttgacaaaattcaacaacgcttcatgctaaaaactctcgataaattaggtattgatgggacgtatctcaaaataataagagctatctatgacaaacccacagccaatatcatactgaatgggcaaaaactggaagcattccctttgaaaactggcacacgacagggatgccctctctcaccactcctattcagcatagtgttggaagttctggcccgggcaatcaggcaggagaaggaaataaagggtattcaattaggaaaagaggaagtcaaattgtccctatttgcagatgacatgattgtatatctagaaaaccccattgtctcagcccaaaatctccttaagctgataagcaacttcagcaaagtctcaggatacaaaataaatgtacaacaatcacaagcattcttatacaccaataacagacaaacacagagcaaaatcatgagtgaactcccattcacaattgcttcaaagagaataaaatacctaggaatccaacttacaagggacgtaaaggacctcttcaaggagaactacaaaccactgctcaaggaaataaaagaggatacaaacaaatggaagaacattccatgctcatgggtaggaagaatcaatatcgtgaaaatggccatactgcccaacgtaatttatagattcaatgccatccccatcaagctaccaatgactttcttcacagaattggaaaaatctactttaaagttcttatggaaccaaaaaagagcctgcatcgccaagtcaatcctaagccaaaagaacaaagctggaggcatcacgctacctgacttcaaactatactacaaggctacagtaaccaaaacagcctgggacatggatgaagctggaaaccatcattctcagcaaactatcgcaaggacaaaaaaccaaacgccgcatgttctcactcataggtgggaaatgaacaacgagaacacctggacacaggaaggggaacatgacacaccggggcctgtcactggataccaacatgagcatgaaacatactccacaaaggagctgttcaacaaggggtcccatgatttcagggccactagtccagaaaaggatattcagtcacggtgcaaaagaagagggtatatgaggacctctttgaagggagctgagagtgagtatcctgatcccaccagcaggaaggaggacatcctgcccttagcaaaacatgctggaatgggtttacagtgggtccgaggacatattctagtgaaagaccaaagccttgccagtcctctaggcacagtcgttatctccctggacaaatgtgtacaagtcactataagataccaagttaaaggaattcacatcattatatctcccagaggacaaagcctagaactttctacattcaagtcagtgaatattggggagtggggaatccatgaattcattatgtggatcaacaaaattgatagactgctagcaagactaataaagaaaaaaagagacaagaatcaaatagacgcaacaaaaaatgataaaggggatgtcaccaccgatcccacagaaatacaaactaccatcagagaatactacaaacacctctacgcaaataaactagaaaatctagaagaaatggataaattcctagacacatacaccctcccaagactaaaccaggaagaagttgaatctctgaatagaccaataacaggatctgaaattgtggcaataatcaatagcttaccaaccaaaagagtccaggaccagatggattcacagccgaattctaccagagatgcagaaaaggtctttgacaaaattcaacaacccttcatgctaaaaactctcgataaattaggtattgatgggacgtatctcaaaataataagagctatctatgacaaacccacagccaatatcatactgaatgggcaaaaactggaagcattccctttgaaaactggcacacgacaaggatgccctctctcaccactcctattcaacatagtgttggaaattctggccagggcaatccggcaggagaaggaaataaagggtattcaattgggaaaagaggaagtcaaattgtccctgtttgcagacgacatgattgtatatctagaaaaccccattgtctcagcccaaaatctccttaagctgataagcaacttcagaaaagtctcaggatacaaaatcaatgtgcaaaaatcacaagcattcttatgcaacaataacagacaaacagagagccaaatcatgagtgaactcccattcacaattgcttcaaagagaataaaatacttaggaatccaacttacaagggacatgaaggacctcttcaaggagaactacaaaccactgctcaaggaaataaaagaggatacaaacaaatggaagaacattccatgctcatga

SEQ ID NO: 6309 - DNA, 1212 bp, Homo sapiens
  SIMILAR (587)..(610): 621254mologous to Homo sapiens putative p150,accession number U93563,Smith-Waterman Score=41.
atggaatactatgcagccatgaaagatgagttcatgtcctttgcagggacatggatgaagctggaaaccatcattctcagcaaactatcacaaggacaaaaagccaaacaccgcatgttctcactcatagaaatacaaactaccattagagaatactataaacacctctacgcaaatgaactagaaaatctagaagaaatggataaattcctcgacacatacaccctcccaagactaaaccaggaagaagttgaatccctgaatagatcaataacaggctctgaaattgaggcaatgattaatagcctaccaaccaaaaagagtccaggaccagacggattcacagccaaattctatcagagcccatcccttactggcaagaatgacaaagagcctgagattttaccctacttccatgctgacttccttgtggttcctggaacgcaccaagcatcccctgtccttatggtcttggggcataagtcatttcctcataggaactctcctccaagcgtctgcatggctaacttctttactcaaaagccaccttctcaatctattcacaacgctgtgaacacccacacggatcctccactgtttctggtgctgctgaaggacagaggattgcttgtcatctggtgccatgagtcacaaggagacgaattgtggcacttggtacttctagattccaagtgctgcttcggcagcatgacacacagaatggaatggtcaggaccctcggctgcaggtctgttggagtttgctggaggtccactccagaccctgtttgcctgggtatcagcagtggaggctgcagaacagcgaatattgctgaacagcaaatgttgctgcctgatcattcctctggaagctttgtctcagaggggtatctggccgtggcagggatccccagtccccaggccctggaccactaccactctgtggcctgttaggaaccaggccacacaacaggagacctccttaatgccttgccagctggaaggaaaagagcctcttgcattgcccacaaaggaagcagagattgaggggagaagaactggagaaattaaaaaagtggaaagagacagcaacacaaataaagaggagctactgctggatttagccttcaaagtctcctcattatttgacaagttagaagaggtagtggaactactagtaattggggaactacaactctatcccagcaagtga

SEQ ID NO: 6310 - DNA, 1965 bp, Homo sapiens
  SIMILAR (1290)..(4): 901254mologous to Homo sapiens putative p150,accession number U93563,Smith-Waterman Score=2117.
tcagttctcacctatgagtgagaacatgtggtgtttggatttctgtccttgtgacagtttgctgagaatgatggtttccagcttcatccatgtccctacaaaggacatgaactcatcattttttatggctgcatagtcttccatggtgtatatgtgccacattttcttaatccagtctatcattgatggacatttgtgttggttccaagtctttgctattgtgaatggtgccacaataaacatatgtgtgcatgtgtctttatagcagcatgatttataatcctgtgggtatatacccagtaatgggatgactgggtcaaatggtatttctagttctagatccttgaggaatcgccacactgtcttccacaatggttgaactagtttcccatcccaccagcagtgtgaaagtgttcctatttctccacatcctctccagcacctgttgtttcctgactttttaatgattgccattctaactggtttgagatggtatctcattgtggttttgatttgcatttctctgatggcctgtgatgatgagcattttttcatgtgtcttttggctgcataaatgtcttcttttgagaagtgtctgttcatatgctttgcccactttttgatggggttgttttttttcttgtaaatttgtttgagttctttgtagactctggatattaggcctttgtcagatgagtagattgcaaaaatgttctcccattctgtaggttgcctgttcactctgatggtagtttctttcactgtgcagaagctctttagtttaattagatcccatttgtcaattttggcttttgttgccattgcttttgttgttttagacatgaagtccttgcccatgcctatgtcctgaatggtattgcctaggttttcttctagggtttttatggttttaagtctaacatttaagtctttaatccatcttgaattaatttttgtataaggtgtaaggaagggatccagtttcagctgtctacatatagctagccagttttcccaacaccatttattaaatagggaatcgtttacccattgcttgtttttgtcaggtttgtcaaagatcagactgttgtagatgtgtggtattatttctgagggctctattctgttccattgatctatatctctgttttggtaccagtaccatgctgttttggttactgtagccttgtagtatagtttgaagtcaggtagcatgatgcctccagctttgttcttttggcttaggattgtcttggcaatgcaggctcttttttggttccatatgaacttgggcattatggccattttcacaatattgattcttcctatcaatgagcatggaatgttcttccatttgtttgtgtccttttttatttcgttgagcagcggtttgtagttctccttgaagaggtccttcacatcccttgtaagttggattcctaggtattttattctctttgaagcaattgtgaatgggagttcactcatgatttggctctctgtttgtctgttattggtgtagaagaatgcttgtgatttttgcacattgattttgtatcctgagagtttgctgaagttgcttatcagcttaaggagattttgggctgagacgatggggttttctagatatacaatcatgtcatctgcaaacagggacaatttgacttcctcttttcctaattgaataccctttctttctttctcctgcctgattgccctggccagaacttccaacactatgttgaataggagtggtgagagagggcatccctgtgttgtgccagttttcaaagggaatgcttccagtttttgcccattcagtatgatattggctgtgggtttgtcatagatagctcttattcttttgagatatgtcccatcgataccaaatttattgagagtttttagcatgaagggttgttgaattttgttaacggccttttctgcatctgttgagataatcat

SEQ ID NO: 6311 - DNA, 541 bp, Homo sapiens
  SIMILAR (529)..(47): 881254mologous to Homo sapiens putative p150,accession number U93568,Smith-Waterman Score=732.
ctatgagtgagaacatccggtgtttggttttttgtccttgcgatcgtttgctgagaatgatggtttccagcttcatccatgtccctaatttattgagagtttttagcatgaagggttgttgaattttgtcaaaggccttttctgcatctatggagataatcatgtgttttttgtcgttggttctgtttatatgctggattacatttattgatttgcgtatgttgaaccagccttgcatcccatggatgaagcccacttgatcatggtggataagctttttgatgtgctgctggattcggtttgtcagtattttattgaggatttttgcatcgatgttcatcagggatattggtctaaaattctcttttttggttgtgtctctgccaggctttggtatcaggatgatgctggcctcataaaatgagttagggagggttccctgtttttctattgattggaatagtttcagaaggaatggtaccagctcctccttgtacctctggtagaattcggctgtgaatccacctgggcaagaccccat

SEQ ID NO: 6312 - DNA, 520 bp, Homo sapiens
  SIMILAR (252)..(293): 571254mologous to Homo sapiens Human secreted protein, SEQ ID NO: 6561,accession number G02480,Smith-Waterman Score=44.
tgcccagacaacccgggagacagaccctggctgggcccgattgttcttctccttggtcaggggtttccttgtctttcttcgtgtccttaacccgcgtggactcttccgctcgggtttgacagatggcagctccactttaggccttgttgttgttggggactttcctgattctccccagatgtagtgaaagcaggtagatttgccttgcctggacttgcctggccttgccttttctttctttctttctttattactttctctttttcttcttcctcttcttcttcttcttcttcttcttcttcttcttcttcttcttcttcttcttcttcttcttcttcttcttcttttttttttgagacagagtcttgctttgtcgcctaggctggagtgaagtggcacgatctcggctcactacaagctccgcctcccaggttcacaccattatcctgcctcagcctcctgaatagctgggactacaggcgcccgccaccatgcctggctattcaggaggctgaggtaa

SEQ ID NO: 6313 - DNA, 603 bp, Homo sapiens
  SIMILAR (163)..(573): 281254mologous to Lytechinus pictus mitotic apparatus protein p62,accession number U76750,Smith-Waterman Score=103.
atgagggtcattatccaagaattaggaaccagaacaccaatggaagggggagtggacacttgtgcagctgtatcctgggttttagtggacactccagggccatatataagtcaggaagatgatgtgaaaaccagaagatccaggtattggaaaaggtggtataaaaaccaactaaccactaacaacattaataacaacaacaaaacaaaaatagagttaacccatactcctttggaggcacattctgacactgttgttgacttcatcaccacgtttaatattgttctcaaggggggtcttccctgctacctatgtctaggtatgcaagattccactacaagattccagaacaaatctcagtcagctaaagtctggcagagaaagcagacaatctttgatctaaatgtcagtgatgtttgcaatggttttgaagaaaagattcccacaaagagcactgaccagcttcagagaaggcaactgcctctgtggacccagggaaggaacaagggacttggaatgattaagagcgaagaagaagaagaagaagaagaagaagaagaagaagaagaagaagaagaagaagaagaagaagaagaagaatag

SEQ ID NO: 6314 - DNA, 990 bp, Homo sapiens
  SIMILAR (553)..(987): 1001254mologous to Escherichia coli Sensor protein FixL (EC 2.7.3.-),accession number D90789,Smith-Waterman Score=738.
atggtagccaatgtcggcggcaaagaatttcaggtttcaaaaacggaaacgaaaagaagaaaagaagaagaagaggaagaagaggaagaagaagaagaagaagaagaagaagaagaagaagaagaagaagaagaagaagaagtagaagaagaagaagaagaagaaatagaagaagtgaagcgacggcaatactcccttgctttcagctcagcaggagcccaagctcagacctatcatgtcagcttcgagactttggccgattaccatcgatggcaacggcaagcatccaaggtgacaaggccaagggagctgcgtgttcccggcggggtggcggccccgtctcccgcggagctgtacctggcgggtttagacggtgcctgcgccgagctcaccacccagaacagggcgcgccgggagctgtgggcgcacgcggcggccacggtctctgtagcggtggggcaccgaggggtcggcactggcggtgaacctaagcgatctggcagcgatgggggccgatccggcctggctgacgctggcattaatgcctggacccacgcctggggtattgacggccaccagctgacggtagaaatcacggaaagcatgatgatggaacacgataccgaaatctttaagcgcattcagatcctgcgtgatatgggcgtgggcttatcggtagatgattttggtacgggcttttccggattatcccgcttagtcagtcttccggtaacggaaatcaaaattgacaaaagttttgtcgatcgttgtctgaccgaaaaacgcatccttgccttacttgaagccattaccagcattgggcaaagcctcaatttaaccgtcgtggcggaaggcgtcgaaaccaaagagcaatttgagatgctacgcaagatccactgtcgcgttattcagggatatttcttttcccgccccctacccgccgaagaaattccaggctggatgagcagcgtgttaccgctgaaaatctga

SEQ ID NO: 6315 - DNA, 444 bp, Homo sapiens
  SIMILAR (82)..(243): 811254mologous to Homo sapiens Human follicle stimulating hormone GPR N-terminal sequence,accession number W03627,Smith- Waterman Score=219.
atggagaaggtggacctgcaaactggaagccagatgctagatgatgaagtcaaatcctacaacttccaagatttcaagaagtgtcaaaaaaaaaaaaagaaagaggagggggaggaggaggagggggaggaggaggagggggaggaggaggagggggaggaggaggagggggaggaggaggaggaagaagaagaagaagaagaagaagaagaagaagaagaagaagaagaagaagaagaagaaactttacacattttccaaaaatgcatccgcactgggttcttggaggaagattatgtcaagcaaagctgtcagaggcatttgaaccaaagcaactccatcttaaataggagccggctggaattacctgcatgcaatcctccttcagggccagtgggaatagagactggcaaggaaagcaccactgactttaccagggaatga

SEQ ID NO: 6316 - DNA, 1197 bp, Homo sapiens; identical to SEQ ID NO: 3217
  SIMILAR (535)..(1191): 461254mologous to Macaca fascicularis unnamed protein product,accession number AB046024,Smith-Waterman Score=510.

SEQ ID NO: 6317 - DNA, 1395 bp, Homo sapiens
  SIMILAR (1172)..(1110): 851254mologous to Homo sapiens PRO1546,accession number AF116638,Smith-Waterman Score=93.
ttaactgcctcctgctgacagagggcgctgttttgaggaaaatggcaatcggagctccctcagaggcctttctaagggttcccagcagaagaggctatcatcagaggctctggttgcattaccatttggcgtttgatggcaatttcttaagttggattccaatttcaactttagaaaaacccgtgacatgtgtgacctgtggcctgtggcagttgtgtcattgcagcaaccataatcgtacaacaaattaccttttagcctttccataaacatttctggaggctggaagtccatgatcaaggtgccaacacagttgattcctcctgaggcctttctccttggcttgaagagggctgcattttcatgtcctcctgtagccttttccctgtataagtgcatccctgttgtctctttccctgttccttcttttggagggcaaattaggacatgattggggttcacatagtatgcgattaacgtctctgagtaatcaggacttccagtaccctgattgtgcctatctgattcttcggggtatccctgctccacaaggagcagtgcttctgctgctgcttcagtacactgctgcttcaataaaagttgctttttaataccactggcttgcccttgaattctttcctgggttaaaccaagaactcttctgggcttagctgtcattttggggcttgcctgtcctgcagcaaattcattgtctctccttaagctggaacattcatcttctcttgccttcacccatgggcagttcttgattattaggagttcagccatgaagggagcttgcaggaatgcttccacacccaagttaaatttgtctgccatctcaatcatagccttatttctttttgcaacctcatcatccttgacaaatcctttgaagtcatgaacaaacttcttgtgtgtcttcttccacatgccattaatgcgatctttggtgacgtcatcctcatcatttacattacatatttcttctaatgctactcctcccacagagccccacccctcaacaggccctggtgtgtgacgttcccctccctgtgtccatgtgttctccttgttcaattcccacttatgagtgagaacatgcggtgtttggttttctgtccttgtgatagtttgctcagaatgatggtttccagcttcatccatgtcccttttttcaaggtttttagcttccttgcaatggtttagaacatgcttctttagctcggagaagtttgttattaccgaccttctgaaggctacttctgtcaacttgtcaaactcattctccacccagttttgttcacttgctggcaaggagttgtgttcctttggaggaaaagaggcattctggtttttggaattttcagcatttcttctctggtttctccccat

SEQ ID NO: 6318 - DNA, 663 bp, Homo sapiens
  SIMILAR (102)..(146): 801254mologous to Homo sapiens PRO1546,accession number AF116638,Smith-Waterman Score=64.
atggaatactatgcagccataaaaaaggatgagttcatgtcctttgtggggacacggatgaaactggaaaccatcattctcagcaaactatcgcaaggacaaaaaaccaaacaccgcatgttctcactcatagggagcggctctccctccgccgcggtctacacagctgtgcttacagcctgcaccgctggctgggtgcccgccacgcacagaagggcagtaggaacacaaaagggtgtggtggccagggtcccagaacaagtgaaaggggacctgcgagcggggagttttctgaaaactgcacaagccttcttgggcagcgtggtgtcttttcaccaggacgcagggctctgctacactcccccagtgatggcatctgtgcccttgggtgctgttgactcttctccctccagccagcacgagaagggactggagccattgggccgtgggcaagccatcaccggagagagaaccagctgggaaagtaacatgaactacaaggcagctgcagcctgcgtcaccctgaagagagcatccattgctcaactcccaacatggccactgcctgaagatctcattaccactgctgcccacagtgctgtctccctctcctcctttgagtctttgctcaaatgtcactttctcaacaaggccactgactga

SEQ ID NO: 6319 - DNA, 1317 bp, Homo sapiens
  SIMILAR (439)..(729): 791254mologous to synthetic construct Pax3-forkhead fusion protein,accession number AF178854,Smith-Waterman Score=407.
atggtgtcccgaatatggtcctggatttctgaggcacagtgcccattgtgtaggcccagtggtacctatgggccaggggaagctgcattattgctatggctttgcattgaggctgctgctgctgctgctgctgctagaagcaccaccactcctatcatcactaatcaccagagcaacacgattgcagaacagaatccaccaagacatgagaatggagatcccaagacttacattattcatgtactcgctgagcaggtcctggagcgcctgccgcacggcgttgcactccgccacgatcctctcgcgccggtcgtctcgcgtgcaggaggagtcggccatcagcgctgcgccgctgatgatgctctccagcctctcctccagggacggccggaacctggcctcgctgaacgtcatggggtccaggataatcttattctgaaagtatcacacacacacacacaaaaatcagcagagaagagagctgtgtcagatcccagcagcaccgttcacagacctcaaccgcttcctccaagcactgtacaccaaagcacgattccttccaacccagacagcagctctgcctactgcctccccagcaccaggcatggattttccagctatacagacagctttgtgcctccgtcggggccctccaaccccatgaaccccaccattggcaatggcctctcacctcagagagtacattaccagcaccttcctacacatgcaggaggaaaaaggaatgctgccttggaatatggagtaccgaggaagtactaccatatgctcaagataactgcttcagattatgaaaaaacgaaaccttttcaagtgggagataaagtaatgggaagtggctggagaaaggtaggaatgcagacagtaaaacagcacagagtgactctgattaagatcttggggaatctgagacatcaggttctgttttaccatgccctccacctagtgcctccttccctctctgcccatgatttagttctggcactttccagtaactgctgtcgtgaagtagacctggcccagttcactttccatctcttatccttgaaggtttatggcatatcaaggttaactggagagaaaagtgggcaggattctcagttttctggattcaatggctatattaccaaacgtagttcctttagcttaaaaaagaagaagaggaagaaagagaagaagaagaaggaggaggaggaggaggaagaagaagaagaagaagaagaagaagaagaagaagaagaagaagaagaagaagaagaagaagaagaagaagaaaacagcctaagcttgacagaataa

SEQ ID NO: 6320 - DNA, 1788 bp, Homo sapiens
  SIMILAR (628)..(1527): 581254mologous to Mus musculus homeobox protein NKX2- 6,accession number AF045150,Smith-Waterman Score=787.
atgcaccgctttggtttgcatctgggctccgcgatgtgtcccaagcaccctctcaagaaagcttctgtgtgcaattccccattcactggagctgtttcccgggcgcctaagctaagtgactttctcataatggccactgtttccttcaagaagaagaaggagaaggagaaggaggaggaggaggaggaggggaagaagaagaagaagaagaagaagaagaagaagaagaagaagaagaagaagaagaagaagaagaagaagaagaggaggaggaagaagaagaaggagcagcagctggaaatatttggaaccgtcaatacgaaccaaacctcccaggaaggcgactggggactggagaggattcgacgggcgcgggaagaaagcgctgggggaggaaggtgcagagctagcacgtggtttctgcgagaaccaatggggggctacggtctcgtcacccggccctggacccgggcctaccagcatggcccagaggaaggcgctgtctgggacgctgggcgtctgtcccagagcttgggtctgtctgcggggcctgcagcgacaagacgggaagttcagggtgccgctcctcacccggacctcctcggccccgccccatccgccttcgggatgctgctgagccccgtcacctccacccccttctcggtcaaggacatcctgcgactggagcgcgagcggagctgccccgcggcttcgccacatccgcgggtgcggaagagcccggaaaactttcagtacctgagaatggacgcagagccgcgagggtcagaggttcacaacgctggtggcggcggcggtgacagaaagctggatggttcggagcctcctgggggtccctgtgaggcagtcttggagatggacgcggaacggatgggggagccacagcccggcctgaacgcggcctcgcccctcggcggcgggaccagggtgccagagcgcggcgttggcaacagcggcgacagcgtgcggggtggccgctcggagcagcccaaggcgcggcaacgacggaagccgcgcgtgctcttttcgcaggcgcaggtgctggccctggagcggcgcttcaagcagcagcggtacctgtcagcgcccgagcgcgagcacctggccagcgcgctgcagctcacgtccacgcaggtcaagatctggttccagaaccgacgctacaaatgcaagagacagcgccaggacaagtcgctggaactggctggccaccctctaacgccgcgccgagtagctgtgcccgtcctggtgcgcgatggcaagccctgcctgggccccgggcccggcgcacctgccttccccagcccctacagtgcagcagtgtcgccctactcttgctacggaggctacagcggagcaccctacggcgcaggctacggcacctgctacgcgggcgcgccctcgggtcctgcgccacacacaccactggccagcgcgggcttcggacacggtggccagaatgccaccccgcagggccatctggcagccacgctgcagggtgtcagggcctgtcacccagttaaaggccccgcctgggacgttcttcccccaaaagaagacccctccaccggtcacccaccaagcaacacagggactgaagaacaccaaggctggctggcagtttggggtgtgggagcagtactaaggcgcgtgacttttggggcttcaaccccagaggcccgagaggctcttgcatctgtacgcagcagccccggggcatcggcggtgaatggagatggtgatctagcgggcctaccatcctccaattaa

SEQ ID NO: 6321 - DNA, 495 bp, Homo sapiens; identical to SEQ ID NO: 2966
  SIMILAR (124)..(303): 911254mologous to Arabidopsis thaliana putative protein,accession number AL162506,Smith-Waterman Score=279.

SEQ ID NO: 6322 - DNA, 948 bp, Homo sapiens
  SIMILAR (25)..(225): 271254mologous to Homo sapiens bA42M11.1 (alpha thalassemia/mental retardation syndrome X-linked (RAD54 (S. cerevisiae) homolog)),accession number AL121874,Smith-Waterman Score=80.
atgaagaggtacccaggagcatgtcaaaaaagaagaagaggaagaggaggaagagtaggaagagagaagaagaagaagaagaagaagaagaagaagaagaagaagaagaagaagaagaagaagaaagaaggagaaggggaaggggaagaggaagaggaagaggaagagggaaaagaaaaaatagatccctctcatcttgagttgaaaatggtcagaaacaagaacacaatgtatgaagtatgcttaatgccaattggaataaaacctcaggtaaatgtaggtgccatgcaatgtattcttgtggcaccttatatttcacctattgtgggagtaatcaatttcaacgaccaggttaattctcaaggaggagggagtaaaatggaagacggaatacatttccgagggaaggttatgttacatgttgggaaacgtaagcaaagagtaaagaaaggtcttgggtatgcctttatcagcagcatgaaaacgaacgaatacactaaattggtaccagtagagtggggtcttgctgaaaagatacccaaaaatgtggaagcgactttggaactgggtaacaggcggagcaaaaagactggtggcattttgcccctgctcctgtggaactttgaacttgagagagatgagttaggttacctggtggaagaaatttctaagcagccaagcattcaacagatgacttgggtgctgttaaaggcatttagatttatacaggaagccgaacctaaaagttcagaaaacttgaacccagacaatgtgatagaaaagaaaaacccattttctgaggggaaattcatgctggctgcagaaatttgcataagtaatgaggagtggaatggcaatgttaatccccaggactatgggggaaaatggctccagggcatggcagaggtcttcacagcaaccccttcaatcacaggcctggaggcctag

SEQ ID NO: 6323 - DNA, 804 bp, Homo sapiens
  SIMILAR (1)..(414): 771254mologous to Homo sapiens putative p150,accession number U93564,Smith-Waterman Score=569.
atgggcaaggacttcatgtctaatacaccccaagcaatggcaacaaaagccaaaattgacaaatgggatctaattgaactaaagagcttctgcacagcaaaagaaactaccatcagagtgaacaggcaacctacagaatgggagaaaatttttacaatccaccaatctgacaaagggctaatacccagaatctgcaaagaacccaaacaaatttacaaggaaaaagcaaacaaccccatcaaaaagtgggttaagaatatgaacagacacttctcagaagaagacatttatgcagccaacaggcacatgagaaaatgctcatcatcactggtcatcagagaaatgcaaatcaaaaccacaatgagataccatctgatgccagttagaagggacatggatgaagctggaaaccatcattctcagcaaactatcacaaggacagaaagccaaacaccgcatgttctcactcaaaggtgggaattgaacaatgagaacacttggacacagggcagagaacatcacacactggggcctgtcaagggtcggaggctggggaagaattcatctagcctatctctggccatgggtaggagtttcaagtttcaggagaaaaaaacaaaaacagaaatcaaaacagccttctctgcctcaagaacagaagcgcaggtcacagcaggaaaacaactctacagagaactgccttctctgccattgtcttcaggaagaaatctgtgtcaggctattggcagtgtaccaccaatggtttcacttcttttggcccagaattacattgtgtgtatttaa

SEQ ID NO: 6324 - DNA, 884 bp, Homo sapiens
  SIMILAR (498)..(797): 961254mologous to Homo sapiens T cell receptor V-alpha 24,accession number U50405,Smith-Waterman Score=491.
ttttgttgtaaaactgtaaaataagcaaggccaaatatttattgtttggcaacacatagagatatatagagttttacatgtaaaattacctataaatgtcaacagcacattgacatggtaaatacgaagttcaaaatgggatatccctggcatggaatagagagctgggatggcggagggccacacgggaagctgcaatagaatttttgatgtttgcttcattctctaggtgatgtgttcactggtgttcatcttatcatgtttttaaattgacaagcatgttacatatacaccacagaatactatgcagccataaaaaatgatgagttcatgtcctttgtagggacatggatgaagctggaaaccatcattctcagcaaactgtcacaaggacaaaaaaccaaacaccgcatgttctcactcataggtgggagttgaacaatgagaacacatggacacaggaaggggaacatcacacaccggagactgttgtgggggggaatggcaaaaaccaagtggagcagagtcctcagtccctgatcatcctggagggaaagaactgcactcttcaatgcaattatacagtgagccccttcagcaacttaaggtggtataagcaagatactgggagaggtcctgtttccctgacaatcatgactttcagtgagaacacaaagtcgaacggaagatatacagcaactctggatgcagacacaaagcaaagctctctgcacatcacagcctcccagctcagcgattcagcctcctacatctgtgtgaggacactggaaggccaggggatcctggcagacacagtcactctcaggcagcagaacaactgtgccaggcttttcaaccatcagtgttctagaaaagagacttag

SEQ ID NO: 6325 - DNA, 591 bp, Homo sapiens
  SIMILAR (103)..(420): 631254mologous to Homo sapiens Human follicle stimulating hormone GPR N-terminal sequence,accession number W03627,Smith- Waterman Score=323.
atgattattattaaaactcaaaaactaacagatgctgccaaggttgtggagaaaaagaaacacttatacactgttgttgggaggccaaatggttacaaataccaagaagaagaaggagaagaagaggaagaagaggaggaagaggaagaagaagaagaagaagaagaagaagaagaagaagaagaagaagaagaagaagaagaagaagaagaagaagaagaaaaagaagaagaggaagaagaggaagaagcagaagaaaagaagaagaagaaggaggaggaggaggagaggaagaagaaggaggaggaggagggggaaggggaagaaacagggaacaaggaattacagagtagagacagggatgatctaggtggagaagaaaaagtccagccagtttggccttatggaggacaattctcatatgaaaatctcaagccatgctctttgcaaattgtctgcacatttgtcatagctcacattctccctctgccaatcctgtttcttcccattcttttcacaggtgtggatcctgataaataccttaagactcacattctgtattattttctgcttccggagtacccatcataa

SEQ ID NO: 6326 - DNA, 5339 bp, Homo sapiens
  SIMILAR (1)..(858): 951254mologous to Homo sapiens putative p150,accession number U93572,Smith-Waterman Score=1386.
atgaacattgatgcaaaaatcctcaataaaatactggcaaacccaatccagcagcacatcaaaaagcttatccatcatgatcaagtgggcttcatccctgggatgcaaggctgcttcaatatatgcaaatcaataaatgtaatccagcatataaacagaaccaaagacaaaaaccacatgattatctcaatagatgcagaaaaggcctttgacaaaattcaacaacgcttcatgctaaaaactctcgataaattaggtattgatgggacgtatctcaaaataataagagctatctatgacaaacccacagccaatatcatactgaatgggcaaaaactggaagcattccctttgaaaactggcacacgacagggatgccctctctcaccactcctattcagcatagtgttggaagttctggcccgggcaatcaggcaggagaaggaaataaagggtattcaattaggaaaagaggaagtcaaattgtccctatttgcagatgacatgattgtatatctagaaaaccccattgtctcagcccaaaatctccttaagctgataagcaacttcagcaaagtctcaggatacaaaataaatgtacaacaatcacaagcattcttatacaccaataacagacaaacacagagcaaaatcatgagtgaactcccattcacaattgcttcaaagagaataaaatacctaggaatccaacttacaagggacgtaaaggacctcttcaaggagaactacaaaccactgctcaaggaaataaaagaggatacaaacaaatggaagaacattccatgctcatgggtaggaagaatcaatatcgtgaaaatggccatactgcccaagcttccacaacctccaccctcaggcatataaggctataccgcaccctgcttcccttgggaaaacctgatataatcaggacaataacaatgctggtaaactcttcaaagccaacaggaacccagctttgggttgtcagcagccagtatgttcaaagacagatggcttcagattctaagggaatgaacacctgtagtatggtcaaagccaggaaatattcaaagcctctgctggtgacacccaggcaaacagcatctggagtggacctccagcaaactccaacagatcttcagctgagggtcccgactgttagaaggaaaactgacaaacagaaaggaaatccacaccaaaaccccatccatatgtcaccatcatcaaaaaccaaaggacacagttcctcaccagcaacggaacaaagctggatggataatgactttgacgagctgagagaagaaggcttcagacgatcaaattactctgagctatgggaggacattcaaaccaaaggcaaagttgaaaactttgaaaaaaatttagaagaatgtataactagaataaccaatacagagaagtgcttaaaggagctgatggagctgaaaaccaaggctcgagaactacgtgaagaatgcagaagcctcaggagccgatgcaatcaactggaagaaagggtatcagtgatggaagatgaaatgaataaaatgaaggacatggatgaagctggaaaccatcattctcagcaaactatcacaaggacaaaaaaccaaacactgcatgttctcacttataggtgggaattgaacaatgagaacacttggacacaggaaggggaacatcacacactggggcctgtcgtggggtgggaggacgtgggagggatagcattaggagaaacacctaagggcactggcagagttctacttggtgctggccacactgagttccaatgcaaagtcccagaatggctgagctctccttcccccaagcatacagattctctctccgcaccatgtggccactgcctggagatgagggaagggtggtgttggcatttcaagactgtctttgctatcctcttcagtgcctctgtcagcgatatgaagttaaaaccagttgttgaaagtgatacactaacaattgagtctggaccacttgctagtgaagataaaccactttcgtgtggtacaaactctggaaaagaacaagaaataaatgagactctgcctatcacaactgtagctcagagttcagttctacttcatcctcaagaagcagcagccaggattagaatgtcagcaaggcagaaacagataatggaaatagaagagcagaagcaaaagcaattggaattacttgaacaaattgaacagcagaaattaagattagaaactgactgcttcagggctcagctggaagaagaaaaaagaaaaaaaactcaaccgactggggtaggatgcagaaaatctcatcactacataaatcatttgcattcttttagttctctgcctgttaaagttgagtcaggaaaaattcaagaacccttttcagccatgagcaaaagtacagtttccacaagccattctataatcagccaaatgcatgataggcctttgctgccgtcagagaatatcacagcccagcaaggtaatatgaaggccctccaagaacagttagacctacagaagaaagttcttcaggcaactcaggaagctcaggaacagttgcttttgtgcaaacagaaagaagtggaacagcaaacgggcctctcggtattccttcccttggtaactccagattcatctgctttattgccttctgccaaagcagatttggggagaatccaggaatcttcaccaaccaagaataatattgcagtttcctcagaccatcatgtgatctcacaacttcaggataagcgtttgagtctttcacagcctatcctatcacagcaaaataattttaaatttctccaagagcagttgaatattcagaaggatagccttcaggctaggcgagaagcccaggaagtattgtatgtacataaacagagtgaattggatagaagagtatgttccgaacaggctgagccctctttcccatttcaggtagctcagcatacatttacttcactaccatctgctgatacaaaatctggaaaaatacaggagcaacattcatctaagagcgagaaaggacttgtttcatgccaatctgacatccccatatctcaggatgggtctttgagtttcctacagcagttcctacctctacatgatagtttgaagttgctccaagaacagttgactaaacagagggatactcttcaggctaggcatgaagctcaggtggaattacttttacatagacaaagagatttgggggacagtaagtctgggctggtgagctcttcatcctcaccagtggttgttcagcattcagttgcttcacaagcttctgctaaagctgagcctaggagaattcaggagctttatttatctgagaaggagaatgtggatgaatctgagagattccaggaatgtatatcaatcaagagtgacagtaccattcccttaagccatcctaagatcccaagatgtcaggaaagacttttgagagtttcacaacatatgctacctctacaagataatttggaggaacaccaagcatggctagacactgagaaagaagcctttcatttcagccagaaaacccaagaaaatacatcttctgaacaaactggttcatcttcattcataccccagttggtacagctttcatttacttcgttagcttcagctgagtctggcacaatcctggaacctctttttacagagagtgaaagtaaaattttttcaagccaccttcagatcccacaattgcaggataggcttttgaggatatcgcaacttatccagcctcaacaagataatttgaaggcacttcaagaacagttagctacacagagagaagccatcattctagctagacaagaagctcgggaagaattacttttacatcagagtgaatgggagggaagaatatctcccgagcaggttgacacctcttccttacccctagtaccacagcattcattcgcctcattacctcttaatgaatctgaaagaaaccaagaaccatgttcaattaacagtgataatatagtatcctcaggtcactcagagataccaacattgcctgatgggctgttgggtttatcacatcttgttttacctcaacaagataatttgattgcacttgaagaacacttgcatgcacagacagatttccttccttctattgagaaaacccagaaagaattggttttgtcaaaaccatgtaaatttgaggaaaaggtatcttctgagcattttatccagtctcaccatggtgatttgcaggcacttcaacagcagttagatacacagaagaaagccattcgatctatacaggaagtccaagaagaattgcttttgcaaagattaagtgaattggagaaaagggtatcatctgaacaagtttgctcctcttcatttgtatcccagcaagataacttgggacttcagaaacagttggatctacaaagagaagttctgcattatagccagaaagcccaggaaaaattgcttgtacagagacaaacagcattgcagcagcagatacagaaacatgaagagactttgaaggatttctttaaagacagtcagataagtaagcccacagttgaaaatgatttaaaaacccagaagatggggcagctcagagactggtttcctaatacacaagacctagcaggaaatgatcaagaaaatattaggcatgcagataggaacaactctgatgataatcatttggcttcagaagatactagtgccaagcaaagtgggagacatgagacatcaatcaacacatgtacgataagcattggtttggttcggaaaagtttcctctttgtggcaaagctgaactctggacttagcaggcttccctatggtcagtgtgcatttagagtctgccgaagatcatgtactctccactatgtcaaaactgcccatattttgtacaagttaattgcagaggttacaaggggatttggccacctccttaactttttcccacagcacatggcaagcacaaccccccagctggattcagggcacaaaggaaaagattgggagggaagcagagggagatgtgacactgacaaaaaagaaggcaaggtggccacagaggcagagactagagtcacgcagctgcaagtcaaggaatgccagcagccaccagggctgaagcggcaaggaacgggttctcccctggagcctctggagggaggctggccctgccaacaccttgatctgcaacttctttccagcttccagaactgtgagagaagaagttctgttgttctaagccatcaacttgtggtaatttggtatagcagccataggaaaccctatgcaaacagtgaactaaataatgagcggtatttgtag

SEQ ID NO: 6327 - DNA, 3387 bp, Homo sapiens
  SIMILAR (3034)..(3075): 641254mologous to Homo sapiens putative p150,accession number U93563,Smith-Waterman Score=52.
ctaagggtttccagcagaaggggccatcgtcagaggctctggttgcatgattgtttggagtttgatggcccttttgctggcatgttgggtttttgggttccctttccctgaggccaatcctaagccaaccagtgtaagggctgggaaattaactctttccagtttggaggatgcatccgagggacgtgtcccatagtacagagacacagtcaccatagtgacacaggatttttcttggtcactttgccagtcggagacctctggttggtaacacccctgtccgggttttgctgggcctgggttcatcacaggagatgccccacacttggcctgccagttcatgcccggtctgcagtttgtcatggatcccacggccactgtgactgtgtattcaacctcgccatctggaatggatggcggtgtgttaaccactctttcagccccttgccccagtttggcctgtggctgcaggcctggctcagccccattgctgctttctgttgtgtggggcagctgccctctatgagtgagaacatgcggtgtttggtttttttgtccttgtgataagtttgctgagaatgatggtttccagcttcatccacgtcccgacagaggacataaactcatcatttttttatggcttgcatagtattccatggtggtatatggtgccacattttcttaatccagtctatccattggatgggacattttggggttgggttccaagtctttgctattgtgtgaatagtgccgcagtaaacataccgtgtgtatgtgtctttatagcagcatgatttataatcctttgggtatacacccagtatatacccagtaatgggggtggctgggtcaaatggtatttctagttctagatccctgaggaatcgccacactgacttcctcaatggttgaactagtttacagtcccaccaacagtgtaaaagtgttcctatatctccacatcctctccagcacctgttgtttcctgactttttaatgattgccattctaactggtgtgagatggtatctcattgtggttttgatttgtgtttctctgatggccagtgatgatgagcattttctcatgtgttttttggctgcataaatgtcttcttttgagaagtgtctgttcatatcctttgcccactttttgatggggttgtttgtctttttcttgtaaatttgtttgagttcattgtagattctggatattaccccttggtcagatgagtaggttgcaaaaattttctcccattttgtaggttgcctgttcactctgatggtagtttcttttgccgtgcagaagctcttgagtttaattagatcccatttgtcaattttggcctttgttgccattgcttttggtgttttagacatgaagtccttgcctatgcctatgtcctgaatggtattgcctaggttttcttctagggtttttatggttttaggtctaacacgtaagtctttaatccatcttgaattaatttttgtataaggtgtaaggcaggtatccagtttcagctttctacatatggctagccagttttcccagcaccatttattaaatagggaatcctttccccattgcttgtttttgtcaggtttgtcaaagatcagatagttgtagatatgtggcattatttctgagggctctgttctgttccattgatctatatctctgttttggtaccagtaccatgatgttttggttactgtagccttgtagtatagtttgaagtcaggtagcgtgatgcctccagttttgttcttttggcttagggatgacttggcaatgagggctctcttttggttccatatgaactttaaagtagttttttccaattctgtgaagaaagtcattggtagcttgatggggatggcattgaatctgtaaattaccttgggcagtatggccattttcacgagattgattcttcctcctacccatgagcatggaatgttcttccatttctttgtatcctcttttatttcattgagcagtagtttgtagttctccttgaagaggtccttcacatcccttgtaagttggattcctaggtattttattctctttgaagcaattgtgaatgggagttcactcatgatttggctctctgtttgcctgttattggtgtataagaatgcttgtgacttttgtacattgattttgtatcctgagactttgctgaagttgcttatcagcttaaggagattttggactgagacaatggggttttctagatatacaatcatgtcatctgcaaacagggacaatttgacttcctcttttcctaattgaataccctttatttccttctcctgcttgattgccttggccagaacttccaacactatgttgaataggagtggtgatttttgcaatctactcatctgacaaagggctaatatccagaatctacaatgaactcaaacaaatttacaagaaaaaaacaacccaatcaacgggctaaggatatgaaaagacccttctcaaaagaagacattgatgcagccaacaaacacatgaaaaaatgctcatcatcactggccatcagagaaatgcaaatcaaaaccacaatgagataccatttcacaccagttagaatggcgatcattaaaaagtcagggaacaacaggtgctggagaggatgtggagaaataggaacacttttacactgttggtgggactgtaaactcattcaaccattgtggaagtcaatgtggcgattcctcaaggatctagaactagaaataccatttgacccagccatcccattactgggtatatacccaaaggattataaatcatgctgctataaagacacatgcacacgtatgtttattgtggcactactcacaatagcaaagacttggaaccaagccatatgtccaacaatgatagactggattaagaaaatgtggcacatatacagcatggaatactatgcagccataaaaaatgatgagttcatgtcctttgtagggacatggatgaagctggaaaccatcattttcagcaaactatcgcaaggacagaaaaaccaaacaccgcatgttctcactcacaggtattttagtgcaaaatcagaagagtctgcatcagaggctacagtcatactatacatactcgctgttgaaagtgaatggtccttttggagactcctgggccatatatatgaatcctattcctaaaaccagtcttgaggaagaacagaacctcagggctactgacagcgcctcctctctcattgctcttggaacactaaatagcaatgaaaatggaagacgcacagctacacataactggcagagatccttacaccttatacaaaaattaattcaagatggattaaagacttacatgttagacctaaaaccataa

SEQ ID NO: 6328 - DNA, 2245 bp, Homo sapiens
  SIMILAR (28)..(2043): 1001254mologous to Homo sapiens protein kinase C alpha (AA 1- 672),accession number X52479,Smith-Waterman Score=3643.
ggagcaagaggtggttggggggggaccatggctgacgttttcccgggcaacgactccacggcgtctcaggacgtggccaaccgcttcgcccgcaaaggggcgctgaggcagaagaacgtgcacgaggtgaaggaccacaaattcatcgcgcgcttcttcaagcagcccaccttctgcagccactgcaccgacttcatctgggggtttgggaaacaaggcttccagtgccaagtttgctgttttgtggtccacaagaggtgccatgaatttgttactttttcttgtccgggtgcggataagggacccgacactgatgaccccaggagcaagcacaagttcaaaatccacacttacggaagccccaccttctgcgatcactgtgggtcactgctctatggacttatccatcaagggatgaaatgtgacacctgcgatatgaacgttcacaagcaatgcgtcatcaatgtccccagcctctgcggaatggatcacactgagaagagggggcggatttacctaaaggctgaggttgctgatgaaaagctccatgtcacagtacgagatgcaaaaaatctaatccctatggatccaaacgggctttcagatccttatgtgaagctgaaacttattcctgatcccaagaatgaaagcaagcaaaaaaccaaaaccatccgctccacactaaatccgcagtggaatgagtcctttacattcaaattgaaaccttcagacaaagaccgacgactgtctgtagaaatctgggactgggatcgaacaacaaggaatgacttcatgggatccctttcctttggagtttcggagctgatgaagatgccggccagtggatggtacaagttgcttaaccaagaagaaggtgagtactacaacgtacccattccggaaggggacgaggaaggaaacatggaactcaggcagaaattcgagaaagccaaacttggccctgctggcaacaaagtcatcagtccctctgaagacaggaaacaaccttccaacaaccttgaccgagtgaaactcacggacttcaatttcctcatggtgttgggaaaggggagttttggaaaggtgatgcttgccgacaggaagggcacagaagaactgtatgcaatcaaaatcctgaagaaggatgtggtgattcaggatgatgacgtggagtgcaccatggtagaaaagcgagtcttggccctgcttgacaaacccccgttcttgacgcagctgcactcctgcttccagacagtggatcggctgtacttcgtcatggaatatgtcaacggtggggacctcatgtaccacattcagcaagtaggaaaatttaaggaaccacaagcagtattctatgcggcagagatttccatcggattgttctttcttcataaaagaggaatcatttatagggatctgaagttagataacgtcatgttggattcagaaggacatatcaaaattgctgactttgggatgtgcaaggaacacatgatggatggagtcacgaccaggaccttctgtgggactccagattatatcgccccagagataatcgcttatcagccgtatggaaaatctgtggactggtgggcctatggcgtcctgttgtatgaaatgcttgccgggcagcctccatttgatggtgaagatgaagacgagctatttcagtctatcatggagcacaacgtttcctatccaaaatccttgtccaaggaggctgtttctatctgcaaaggactgatgaccaaacacccagccaagcggctgggctgtgggcctgagggggagagggacgtgagagagcatgccttcttccggaggatcgactgggaaaaactggagaacagggagatccagccaccattcaagcccaaagtgtgtggcaaaggagcagagaactttgacaagttcttcacacgaggacagcccgtcttaacaccacctgatcagctggttattgctaacatagaccagtctgattttgaagggttctcgtatgtcaacccccagtttgtgcaccccatcttacagagtgcagtatgaaactcaccagcgagaacaaacacctccccagcccccagccctccccgcagtggaagtgaatccttaaccctaaaattttaaggccacggcttgtgtctgattccatatggaggcctgaaaattgtagggttattagtccaaatgtgatcaactgttcagggtctctctcttacaaccaagaacattatcttagtggaag

SEQ ID NO: 6329 - DNA, 588 bp, Homo sapiens
  SIMILAR (304)..(555): 971254mologous to Homo sapiens protein kinase C alpha (AA 1- 672),accession number X52479,Smith-Waterman Score=453.
atggcagagctgctgctccagcctttgctgcagcaagactgtgatggcagctgctccatcccggtgggtccccgaatgcaaccagcagaggcctctctgaccctcaacgtacagatgaaagccacacgtccccctgatggcacagaaaggaacatctcaagattaaacaagaggattctgtacaagcgctggtccttgctctgcctttctgacgctaagctcaaggttacgcagccaaagggggagcattacggaatttcccatgaacgctttcctcctgtgccatcccgccagagtgaccgggaacctccatttgatggtgaagatgaagacgagctatttcagtctatcatggagcacaacgtttcctatccaaaatccttgtccaaggaggctgtttctgtctgcaaaggactgatgaccaaacacccagccaagcggctgggctgtgggcctgagggggagagggacgtgagagagcatgccttcttccggaggatcgactgggaaaaactggagaacagggagatccagccaccattcaagcccaaagtgctggacagctgcagagcacccccgcacgactag

SEQ ID NO: 6330 - DNA, 2436 bp, Homo sapiens
  SIMILAR (22)..(1788): 271254mologous to Streptococcus parasanguinis fimbriae- associated protein Fap1,accession number AF100426,Smith-Waterman Score=269.
atggacaatcatttaaaccccagcagcagtgttctggaatcctatgtgagagagaaacattcagacactcgtagcagtgttctggaatcctatgtgagggacaaacactcagaacccagctgcagtgttctggaacactatgttagggacaaacattcagaccacagcaggattgttctggaattctatgtgagggacacacattcagaaaacagcaggagtgttttggaatccaacttggaggacaaatattcagaccctcgtagcagtgttctggaatcctatgtgaggagcaaacattcacataatcgtagcagtgttctggaatcctatgtgagggacaaacattcagaacttcataacagtgttcttaaatccaatgtgagggacaaacattcagactgtcgtagcggtgttctggaatcctatgtgagagacaaaccctcagaacacagcaagagtgttttggaatcctatgtgagagacaaatattcagatcctcatagcagtgttctggaatcctatgttagggacaaacattcagactatcgtagcagtgttctggaatcctattgctttggaatcctatgtgagcacaaacattcggaccccagcagcagtgttctggaatcctatttgaggcacaaacattcagaccctcgtagcagtgttctggaatgctatgtgatggagatccattcatactacagcagcagagttctggaatcttgtgtgagggacagacattcagaccacagccggagtgttatggaatcctatattagggacaaacattcagacacttgtagcagttttctgaaaccctatgtcagagagaaacattcggacctcagcagcagcgttctagaatcctatatgaggcacattcattcagaccctcgttgcagtgatctggaatcctatgtgagggacaaacactcagaacacagcaggagtgttttggaatcccctgtgaggaacaaacattcagaccctcataacaatgttctggaatcctatgcgagggaccaacattcagacaatcgtagaagtgttctggaatcctatgtgagggacaaacattcagaaaaccgtagcagtgttctggaatcctatgtgagggacaaacattcaaacaagagcgggagtgttctggaatcctatgttaggaacgacatacatatagactccagcagcattgttctggaatcctatgtgagggacaaacattcacaccccagcagcagcgttctggaatcctatatgagggacaatcattcagatgcttgtagcagtgttctggaattctgtgtgagggacaaactttcagatgctcgtagcagtgttctggaactctgtgtgagggacaaactttcagaccctcgtagcagtgttctggaatcctgtgtgagggacaaactttcagatgctcgtagcagtgttctggaattctgtgtgaggaacaaaccttcagaccctcttagcagtgttctggaatcatatgtgtcggacaaacatttagacctcagcagcactgttctagaatcctatgtgaggagcaatcattcagacactcgcagcggtgttcaggaatccgatgtgagggacaaacactcagaacccagcagcagtgttctggaaccctatttgagggacaaacagtcagatcacagctgtattgttctgaaatcctatgtgaggaacaaacattcagacattcgtaacggtgttcttgaatcctacgtgagggacaaacattcagacgccagcagcattgttttggaatcctatcgggcccgagagggccctgagttggaaccggcgatccatggtaaccggagcccaacccagggactgatgggaaggcacttttgtccgtgggggacccaggccccggttctccggggcgctttttttttttatttcctgccacgggggctttctgcccactttgaggtatccctagtgggcccgagacgctccttgtgttcaaccagtgacgccagggtccccaggcccagagcagaggctgatgggaaggcacattcgtccctgggggacccagtctcggcttctcgacggctcgggtacactcaagaaagtaaatggaaatggcacatacaagaccaggctaagccggaaccaaaacaggtatcatttttaaatgaggatgtgcaaaacttgccagctcagcaaaccactgagcaagtcctgcagataaggaaggaaacctcccctgcccaatggggcaaatcctttaaagaaccaagcccagacgatcagagacatgcttggtttgctgatgattccaccaaatatattgatgggacccgatgctgggaggccgtggcttataatcctgttaaaaacataagcatttctgaggaagggaggggtgttagcagccagctggctgaactagaatctgttctctga

SEQ ID NO: 6331 - DNA, 457 bp, Homo sapiens
  SIMILAR (10)..(426): 931254mologous to Homo sapiens SIRP-beta1,accession number Y10376,Smith-Waterman Score=661.
tttcgtcctccttgtcctttcctgctgctgactctattgctgggactcacaggagtggcaggtgaggacgagctacaggtgattcagcctgaaaagtccgtatcagttgcagctggagagtcggccactctgcgctgtgctatgacgtccctgatccctttggggcccatcatgtggtttaggggagctggggcaggccgggaattaatctacaatcagaaagaaggccacttcccacgggtaacaactgtttcagaactcacaaagagaaacaacctggacttttccatcagcatcagtaacatcaccccagcagacgccggcacctactactgtgtgaagttccggaaagggagccctgacgacgtggagtttaagtctggagcaggcactgagctgtctgtgcgcgaagcagcgctggctcctactgctccactcctcgtagctctcctcctgg

SEQ ID NO: 6332 - DNA, 425 bp, Homo sapiens
  SIMILAR (65)..(424): 991254mologous to Homo sapiens Bit,accession number AB023430,Smith-Waterman Score=616.
cctgcttctggtgtgcatccagtcaatgaacgtcattgataaacacttgaggaaacacagaggatcacgagtggcgggtgaggaggagctgcaggtgattcagcctgacaagtccgtgttggttgcagctggagagacagccactctgcgctgcactgcgacctctctgatccctgtggggcccatccagtggttcagaggagctggaccaggccgggaattaatctacaatcaaaaagaaggccacttcccccgggtaacaactgtttcagacctcacaaagagaaacaacatggacttttccatccgcatcggtaacatcaccccagcagatgccggcacctactactgtgtgaagttccggaaagggagccccgatgacgtggagtttaagtctggagcaggcactgagctgtctgtgcgcg

SEQ ID NO: 6333 - DNA, 5158 bp, Homo sapiens
  SIMILAR (1425)..(2159): 881254mologous to Homo sapiens Bit,accession number AB023430,Smith-Waterman Score=1152.
tccttcttccaaaatgcttccagcttcccctgtgatcttacttgaaagcacttatcgttagtgattgtcatctgagtcatgtctcctgattatcgatggtccttttggcgagggccacacctcagcacacagtgagcttcacctgcgagtcccacggcttctcacccagagacatcaccctgaaatggttcaaaaatgggaatgagctctcagacttccagaccaacgtggaccccgcaggagacagtgtgtcctacagcatccacagcacagccaaggtggtgctgacccgcgaggacgttcactctcaagtcatctgcgaggtggctggagccctccctggatctgtctgtgccacaaggtcagagcttctgccctgtgctgtttcagttccacccaccttggaggttactcaacagcccgtgagggcagagaaccaggtgaatgtcacctgccaggtgaggaagttctacccccagagactacagctgacctggttggagaatggaaacgtgtccaggacagaaacggcctcaacccttacagaaaacaaggatggtacctacaactggatgagctggctcctggtgaatgtatctgcccacagggatgatgtgaagctcacctgccaggtggagcatgacgggcagccagcggtcagactgagagaaggggctggtgagaagcttccccagactgagctccaaacacctcccctcccaggacatcttcctgcccacaggctcctgttgctcctttgcagagtccttgattctccagagcagtcttcattcatggtcctgagcagaggccatgggatggggctctggggagtgactcatgacacctccctaggattggcatgaggtaagagtctctgggacatagagcaggctctatgtcagtcaacctctctccagtactgtccaaggctcccaggtctgggaaccccaagcacagacgtcagcaacttcctagcagtggcaactgtgtccacttcctctttcacaatggaagatgcacagttcacaatagggttggcactcctatgagaatctaatgctgccactgatctgacaggaggcagaactcaggcgataacgctcactcactggctgctcacctccggctgtgcggcccagttcataacacacattaaagagatgtttgattttctctgttgcccagtcattctcatatcacatgaatcttctttgaagaggtgttaccaatgttatatcatcttgtgctcttggagaaaggtggatgtcattattgatattggaacaggatcctcgcttcaggatggagagccatggcagcactccaaaaggcaacacaaagctgtacatagcatagcagcttataagaaggaggaagattaattcttgaggaaacacagagaatcaggtaaggatgaagaaatgactgctttgtgctcctttccaggagtggcaggtgaggacgagctacaggtgattcagcctgaaaagtccgtatcagttgcagctggagagtcggccactctgcgctgtgctatgacgtccctgatccctgtggggcccatcatgtggtttagaggagctggagcaggccgggaattaatctacaatcagaaagaaggccacttcccacgggtaacaactgtttcagaactcacaaagagaaacaacctggacttttccatcagcatcagtaacatcaccccagcagacgccggcacctactactgtgtgaagttccggaaagggagccctgacgacgtggagtttaagtctggagcaggcactgagctgtctgtgcgcgccaaaccctctgcccccgtggtatcgggccctgcggtgagggccacacctgagcacacagtgagcttcacctgcgagtcccatggcttctctcccagagacatcaccctgaaatggttcaaaaatgggaatgagctctcagacttccagaccaacgtggaccccgcaggagacagtgtgtcctacagcatccacagcacagccagggtggtgctgacccgtggggacgttcactctcaagtcatctgcgagatagcccacatcaccttgcagggggaccctcttcgtgggactgccaacttgtctgaggccatccgagttccacccaccttggaggttacttcacagcccattgagggcagagaaccaggcaaacgttacctggcaggtgagcaatttctacccccggggactacagctgacctggttggagaatggaaatgtgtcccggacagaaacagcttcgaccctcatagagaacaaggatggcacctacaactggatgagctggctcctggtgaacacctgtgcccacagggacgatgtggtgctcacctgtcaggtggagcatgatgggcagcaagcagtcagcaaaagctatgccctggagatctcagcacaccagaaggagcacggctcagatatcacccatgaaccagcgctggctcctactgctccactcctcgtagctctcctcctgggccccaagctgctactggtggttggtgtctctgccatctacatctgctggaaacagaaggcctgactgaccctcagtctctgctgcctcctcctttcttgagaagctcagcctgagagaaggagctggcgagaaccttccccacactcagctccaaacgcctcctctcccaggtcatctgcctgcccacacgctcctgttccaccttcacaagaccatgatgccccaaagcagtgtctctattcacggtcctgagcaggggccatgggattgggctctgggcactgactcatggcacctccctagaaggtgagaaacactccaaatctaaacacaccaggacttctcccatccgtcgccttgggactggccataaaccacagactctctccaggctctcaagagttatcctgtcttctggattcctgcctaccccaactcccccagccttgttgaggttctctactgcctcctgaatacacatgaacccctataccaattttaagaaaaaaatgattctctttcctctttgtccaagcatcctatccctcaaacccaaaaagaaagaagctctcccttctctctctgtgatggagacagtatttcttctagtatcctgcagccttcccagtcctgctgcttgtggtagaaattgctgccacagcccaacattgaggagccctcgatgactgccctttacaactcatattcagttctgcctccaaaatgcatgtgtccacttacatgagatggtaaatgtttaacaatggactttctgaaagggaaaaaccaaaagctgttttgcagtgcttgccaatttctctagtgtaataactcccaacctgaccaatttcagcactgccaacagttaaacaaccagattcgaagattcctgaaatttaacaattggttttcagggcccagtccaagcctgctgctggaaacctcagagttaaatccctattctccacacctctcacctccaccacccctccctgtcccagccagcatcatctctttggggaccactcctctggctttcatttttcagccacagtgattctttggaaaagtcaaatcatatcacttctctgcttcttccccaacacagctgcatggctcccgctctccctccttcaagtctctgctcaatgtcacttcattaaaggcggccttctataaactaccttgtataaaatattatttattttctctatcccggcattctaatttctcttatcctaattaatttttctttagcccttattttgatgagtattatgccgaatacaggcagccctcacttttcatggccagtgcaagattgcaaaaatgactgtgcaacctgaaacccaggaaagcagtctccatagtcaatcagaaaaacaatgatcattctgtgacctttaccattttttgtcaaaatattagaaactctcacactctcagttacaaatgtagaggacaatgaaaatataatgaaataaatatttatttgtgcactacaattcaaagcattagaaacattgagagttcaagtgctgtttctttgtaaaaatgtatccagatgaggttggaagagtgcttgcctttttttgtatatttctaatatggagtgatatagtttggctctgtgtctccatccaaatctcatcttaaattgtaatctgcatgtgttgtgggaatgggacctaggtaggaggtgactgaatacatgggggcggacttcccccttgctgttcttgtgatagtgagttctcataagatctcagtgagttctcatgagatctggttttttgaaagtgtgtggcaagtcccccttcgctctctctctctctctccctcctgccaccatgtgaagaaggtgcctgcttccttttctccttccaccatggttgtaagtttcctgaggcctcccagtcatgcttcctgttaagcctgtggaactgtgagtccaattaaacctcttttattcataaaatatccagtttctggtagttctttatagcagtgtgagaatgggctaatacacggagcaagcattgtttcttttcatttgtttattttatttttatttttttgagatggagtttcacccttattgcccaggctggagtgcaatgtcgtgatcttggctcactgcaacccccgcctccagggttcaagtgattctcctgcctcagcctcctgagtagctgggattacaggcatgtaccaccacacccagctaattttgtatttttagtagagatggggtttctccatgttgatcagactagtcttgaactcccgacctcaggtgatccacctgtcttggcctcccaaagtgctgggattacaggcatgagccaccatgcctagccagcaagcatcatttctattataccttggtgttttgccatctttctaagtttggactagcttccaacatcttatcccttgaattttcaatattgtggaatcactccagaagatcctttcatgtgaagttttttgctggcatttcaacctttgggacatcttcagcccttttattaccactcctctcccatttgtggcagtttgcgtttactacctccctctggctgcctatctgaagttcctgcatcagggtctacattgccacagtcaactatttgtacttctagaattc

SEQ ID NO: 6334 - DNA, 2981 bp, Homo sapiens
  SIMILAR (1012)..(2451): 941254mologous to Homo sapiens Bit,accession number AB023430,Smith-Waterman Score=2335.
atggagcccgccggcccggcccccggccgcctcgggccggtgctctgcctgctgctcgccgcgtcctgcgcctggtcagcttccaggcagctccctgcagttcaggtgctccgcggggatgttacctgtggctctgaccatgtctttctgttggcctacatcaaacacctggctgtcgccggcaggcgggctctgaaggctactgtgcatgttcaccaaaggacccttctccgaccaggaggctgtggttcagtccctggcaaacgagcagtgacgctgattagcaagtgctccgatgggcagcctgcctttcctggggcaccggctgggaacaccaacacctttcttgtctgcagttgtggattcccggacctgcaaagcagtagggggcctgagagagccctctgtgctttcatccagtgccttatggtgcggccagaagaacagagagaaaaaaactggccgggcccacgcgggagatccatggcaaggcccggctggaacgccaagcctcctgtggtccaggccaaggcttttaaaaactgggctgtgctggaactttccactgtttcagccagaaatctgacaggatcccgaattccccgggaaaacactaaagtaatactaataggaaccatctgggttctctgcttcctgggctcagcacttggtgtgtgtgaccctggtggtactcacagccacctggcgatgcacgtcgttatcttcggacccgttggatctaacaaccctagtattgttatcatcatcatcatcatcagacccattctacagataaagagccagaggtccagagtgggcgagacattccctggagtctcatgggtagcagagttggaatccaaatcaaaacatactttcagccagtgccaggcactgctccaaccctggggaagaaaactcagttcctgctctcaaaggacttataacctgcttctggtgtgcatccagtcaatgaacgtcattgataaacacttgaggaaacacagaggatcacgagtggcgggtgaggaggagctgcaggtgattcagcctgacaagtccgtgttggttgcagctggagagacagccactctgcgctgcactgcgacctctctgatccctgtggggcccatccagtggttcagaggagctggaccaggccgggaattaatctacaatcaaaaagaaggccacttcccccgggtaacaactgtttcagacctcacaaagagaaacaacatggacttttccatccgcatcggtaacatcaccccagcagatgccggcacctactactgtgtgaagttccggaaagggagccccgatgacgtggagtttaagtctggagcaggcactgagctgtctgtgcgcgccaaaccctctgcccccgtggtatcgggccctgcggcgagggccacacctcagcacacagtgagcttcacctgcgagtcccacggcttctcacccagagacatcaccctgaaatggttcaaaaatgggaatgagctctcagacttccagaccaacgtggaccccgtaggaggagagcgtgtcctacagcatccacaagcacagccaaggtggtgctgaacccgcgaggacgtcaactctcagtcattctggtaggggcccacagtcaccttgcagggggaccctcttcgtgggactgccaacttgtctgagaccatccgagttccacccaccttggaggttattcaacagcccgtgagggcagagaaccaggtgaatgtcacctgccaggtgaggaagttctacccccagagactacagctgacctggttggagaatggaaacgtgtcccggacagaaacggcttcaaccgttacagagaacaaggatggtacctacaactggatgagctggctcctggtgaatgtatctgcccacagggatgatgtgaagctcacctgccaggtggagcatgacgggcagccagcggtcagcaaaagccatgacctgaaggtctcagcccacccgaaggagcagggctcaaataccgccgctgagaacactggatctaatgaacggaacatctatattgtggtgggtgtggtgtgcaccttgctggtggccctactgatggcggccctctacctcgtccgaatcagacagaagaaagcccagggctccacttcttctacaaggttgcatgagcccgagaagaatgccagagaaataacacaggacacaaatgatatcacatatgcagacctgaacctgcccaaggggaagaagcctgctccccaggctgcggagcccaacaaccacacggagtatgccagcattcagaccagcccgcagcccgcgtcggaggacaccctcacctatgctgacctggacatggtccacctcaaccggacccccaagcagccggcccccaagcctgagccgtccttctcagagtacgccagcgtccaggtcccgaagaagtgaatgggaccgtggtttgctctagcacccatctctacgcgctttcttgtcccacagggagccgccgtgatgagcacagccaacccagttcccggagggctggggcggtgcaggctctgggacccaggggccagggtggctcttctctccccacccctccttggctctccagcacttcctgggcagccacggccccctccccccacattgccacatacttggaggctgacgttgccaaaccagccagggaaccaacctgggaagtggccagaactgcctggggtccaagaactcttgtgcctccgtccatcaccatgtgggttttgaagaccctcgactgcctccccgatgctccgaagcctgatcttacagggtggggaggagaaaatcccacctcccctgacctccaccacctccaccaccaccaccaccaccaccaccaccactaccaccaccacccaactggggctagagtggggaagatttcccctttagatccctgccccttggcctcacctctccctcccact

SEQ ID NO: 6335 - DNA, 408 bp, Homo sapiens
  SIMILAR (220)..(399): 701254mologous to Rattus norvegicus p105 coactivator,accession number U83883,Smith-Waterman Score=194.
atggtcatgctggagccagaatggggaactctggaagaggaggaggattcaggggagcaactgcaatctctgaagcttcaccaacctggtgagatttcagaataccaagagagtgacaaaggagtagagtggtactcaatagaatggatggaagttagatgtaacgcctgcttcactggaggtgtcaggggaccgtccttattggacagcaagcctagcattgaatgccccagaggagcccgaaacctcccaggcttggtgcaggaaggagagcccttcagcgaggaagctacacttttcaccaaggaactggtgctgcagcgagaggcagcctctatcttgcccacagtgcacgacagtgcaggaactctcctggagctgagccaccgctgggatggccgcagttga

SEQ ID NO: 6336 - DNA, 2926 bp, Homo sapiens
  SIMILAR (268)..(1947): 911254mologous to Homo sapiens 100 kDa coactivator,accession number U22055,Smith-Waterman Score=2596.
ggcggagatcgcgtctctttcgctccgtgtccgctgctgctcctgtgagcgcccggcgagtccgtcccgtccaccgtccgcagctggtagccagcctgcccctcgcctcgactccctttcaccaacaccgacacccacattgacacctccagtccggccagccgctccactcgttgcctttgcatctccacacatggcgtcctcgcgcagagcggcggctcctccgggggacccgcggtccccaccgtgcagcggggcatcatcaagatggtcctctcagggtgcgccatcattgtccgaggtcagcctcgtggtgggcctcctcctgagcggcagatcaacctcagcaacattcgtgctggaaatcttgctcgccgggcagccgccacacaacctgatgcaaaggatacccctgatgagccctgggcatttccagctcgagagttccttcgaaagaagctgattgggaaggaagtctgtttcacgatagaaaacaagactccccaggggcgagagtatggcatgatctaccttggaaaagataccaatggggaaaacattgcagaatcactggttgcagagggcttagccacccggagagaaggcatgagagctaataatcctgagcagaaccggctttcagaatgtgaagaacaagcaaaggcagccaagaaagggatgtggagtgaggggaacggttcacatactatccgggatctcaagtataccattgaaaacccaaggcactttgtggactcacaccaccagaagcctgttaatgctatcatcgagcatgtgcgggacggcagtgtggtcagggccctgctcctcccagattactacctggttacagtcatgctgtcaggcatcaagtgcccaacttttcgacgggaagcagatggcagtgaaactccagagccttttgctgcagaagccaaatttttcactgagtcgcgactgcttcagagagatgttcagatcattctggagagctgccacaaccagaacattgtgggtaccatccttcatccaaatggcaacatcacagagctcctcctgaaggaaggtttcgcacgctgtgtggactggtcgattgcagtttacacccggggcgcagaaaagctgagggcggcagagaggtttgccaaagagcgcaggctgagaatatggagagactatgtggctcccacagctaatttggaccaaaaggacaagcagtttgttgccaaggtgatgcaggttctgaatgctgatgccattgttgtgaagctgaactcaggcgattacaagacgattcacctgtccagcatccgaccaccgaggctggagggggagaacacccaggataagaacaagaaactgcgtcccctgtatgacattccttacatgtttgaggcccgggaatttcttcgaaaaaagcttattgggaagaaggtcaatgtgacggtggactacattagaccagccagcccagccacagagacagtgcctgccttttcagagcgtacctgtgccactgtcaccattggaggaataaacattgctgaggctcttgtcagcaaaggtctagccacagtgatcagataccggcaggatgatgaccagagatcatcacactacgatgaactgcttgctgcagaggccagagctattaagaatggcaaaggattgcatagcaagaaggaagtgcctatccaccgtgttgcagatatatctggggatacccaaaaaagcaaacgagttcctgccttctcttcagcggacaggtcgttctgaagctgtggtggaatacgtcttccagtggttctcgtctcaaactctatttgccaaaggaaacttgccttatcaccttcttgcttgcaggcattgaatgccccagaggagcccgaaacctcccagggcttggtgcaggaaggagagcccttcagcgaggaagcttcacttttctaccaaggaactggtgctgcagcgagaggtggaggtggaggtggagagcatggacaaggccggcaactttatcggctggctgcacatcgacggtgccaacctgtccgtcctgctggtggagcacgcgctctccaaggtccacttcaccgccgaacgcagctcctactacaagtccctgctgtctgccgaggaggccgcaaagcagaagaaagagaaggtctgggcccactatgaggagcagcccgtggaggaggtgatgccagtgctggaggagaaggagcgatctgctagctacaagcccgtgtttgtgaccgagatcactgatgacctgcacttctacgtgcaggatgtggagaccggcacccagttccagaagctgatggagaacatgcgcaatgacattgccagtcacccccctgtagagggctcctatgccccccgcaggggagagttctgcattgccaaatttgtagatggagaatggtaccgtgcccgagtagagaaagtcgagtctcctgccaaaatacatgtcttctacattgactacggcaacagagaggtcctgccatccacccgcctgggtaccctatcacctgccttcagcactcgggtgctgccagctcaagccacggagtatgccttcgccttcatccaggtgccccaagatgatgatgcccgcacggacgccgtggacagcgtagttcgggatatccagaacactcagtgcctgctcaacgtggaacacctgagtgccggctgcccccatgtcaccctgcagtttgcagattccaagggcgatgtggggctgggcttggtgaaggaagggctggtcatggtggaggtgcgcaaggagaaacagttccagaaagtgatcacagaatacctgaatgcccaagagtcagccaagagcgccaggctgaacctgtggcgctatggagactttcgagctgatgatgcagacgaatttggctacagccgc

SEQ ID NO: 6337 - DNA, 448 bp, Homo sapiens
  SIMILAR (2)..(286): 931254mologous to Homo sapiens bA149I18.1 (novel protein),accession number AL133463,Smith-Waterman Score=518.
ggaccaggactacaagtacgacagtacctcagacgacagcaacttcctcaacccccccagggggtgggaccatacagccccaggccaccggacttttgaaaccaaagatcagccagaatatgattccacagatggcgagggtgactggagtctctggtctgtctgcagcgtcacctgcgggaacggcaaccagaaacggacccggtcttgtggctacgcgtgcactgcaacagaatcgaggacctgtgaccgtccaaactgcccaggaattgaagacacttttaggacagctgccaccgaagtgagtctgcttgcgggaagcgaggagtttaatgccaccaaactgtttgaagttgacacagacagctgtgagcgctggatgagctgcaaaagcgagttcttaaagaagtacatgcacaaggtgatgaatgacctgcccagctgcccc

SEQ ID NO: 6338 - DNA, 648 bp, Homo sapiens
  SIMILAR (58)..(258): 771254mologous to Homo sapiens bA149I18.1 (novel protein),accession number AL133463,Smith-Waterman Score=289.
atgtttaacctgacaatctttagtcttcaacgaaaggctaaattggatactgttgaggaggaaaattccacagatggcgagggtgactggagtctctggtctgtctgcagcgtcacctgcgggaacggcaaccagaaacggacccggtcttgtggctacgcgtgcactgcaacagaatcgaggacctgtgaccgtccaaactgcccagaggtgctgaagagctgtcagagccacactcaaagcttaactgaagcactcacatttcctttccttctggcctctggttaccgaaaacatttgctgaaaattgctgtcccactcaagaactgtcaaagggtaacccgaaaacacccccctcataaaatatgcccacagcccactcccctgagggaggtggatgatgttgacaaacaccttggaacaaaaccacccaagatcgatcaaaccacagctgacctgcagatttatgatccccgaacagcaaaggaagcactcaagtccaggatgggaatgagcttggctggtttgagtttacagaatggccagcgaagctgttggggagagaaggagggaagaaccataggtgatgaggatgaagagacaggaatagccaaagaaaaagtcacgaaaaggcattctgaaatctaa

SEQ ID NO: 6339 - DNA, 297 bp, Homo sapiens
  SIMILAR (4)..(162): 731254mologous to Homo sapiens Human secreted protein, SEQ ID NO: 8172,accession number G04091,Smith-Waterman Score=195.
atgccaaaagcaattgaaacaaaagcaaaatttgacaaatgggatctaattaagctaaagagcttctgcaaagcaaaagaaactatcaacagagtaaacagacagccaacaggatgggagaaaaattttgcaaactatgcatctgacaaagctcaggcctctggatcacccttcacccccactgccaactacaattggttagctctgagtccacagttgccagagaaaagggctctcagcaccagactagcattcaacgacccaagcaacctgcctctaagagaaaaggccatgtga

SEQ ID NO: 6340 - DNA, 463 bp, Homo sapiens
  SIMILAR (462)..(358): 371254mologous to Human immunodeficiency virus type 1 nef protein,accession number AF174703,Smith-Waterman Score=61.
cgagaacgtcctttgggagtagaggggcagggagcatacgcaagggattccaggtgcaggtaaaaggtggcactagttcaaggttttgctgactcagtctggtagtcagagttttcagttataagacagttcaaggcagggcctggaggattggatcagtttagggacaggtcaaaggctggcttagagaccttagaggcaggttgcttgggtcgttgaatgctagtctggtgctgagagcccttttctctggcaactggggactcacagctaaccaattgtagttggcagtgggggcgaagggtgatccagaggcctgagctgcagagggcacaagagagaaaagatgtcttagaaagagctttgagaacatgccttggctgctggcagggaccttggatggggtattctacacccggaagtgcctgcctgccatcctctagtggctgccttgctccatttc

SEQ ID NO: 6341 - DNA, 1602 bp, Homo sapiens
  SIMILAR (190)..(552): 381254mologous to Homo sapiens transmembrane protein 2,accession number AF137030,Smith-Waterman Score=233.
atggcgaatgctgcacgcctgggtcccgctcccagtcgcagtttcctcaccccagaggtcaccctgacccggaaacagtacccagagcagctgtcgggcgtcgagggaggtctggtggaagggcgaaaggaaggagaatttgctacacagacctgtctccaaggaaagtttggagaagaaataggaagtgaccaatttggaggctgcgttatgtttcatgctcctgtacctggtgctaacatggtaactgggagaatagaatatgtagaggtattccatgctggccaggctttccggttggggcgatatccaatacattggcacctgcttggagacttacagtttaaatcttatgtaagaggctgtgcaattcaccaggcctataacagagctgttactattcataacacacaccatcttctggttgagaggaatattatatatgatattaagggaggagcattttttatagaagatggtattgaacatggcaatatcctccagtataacttggcagtatttgtacagcaaagtaccagtcttctgaatgatgatgtgaccccggctgcattttgggtcaccaacccgaacaataccatacgacacaatgctgttgctggtggcactcactttggcttttggtaccggatgaacaaccaccctgatgggccatcctatgacagaaacatttgtcaaaaaagagttccccttggcgaattttttaacaatactgtccattctcaaggttggtttggaatgtggatctttgaggaatatttccccatgcaaacgggatcttgtacatctacagtgcctgcgcctgcaatatttaactcacttactacttggaattgtcaaaaaggagctgaatgggtcaatggaggtgcccttcagttccataactttgtgatggtgaataactatgaggctggaattgagactaagaggatcctggctccttatgttggagggtggggtgaaaccaatggagcggtgattaaaaatgccaaaatagtcggccatcttgatgaactgggaatggggtctgcattttgcacagcaaaaggcctggttctcccatttagtgaaggcttgactgtctcttctgtgcactttatgaactttgaccgtcccaactgtgtagctttgggagtgacatccatctctggagtttgtaatgacagatgtgggggttggagtgcaaagtttgttgacgtccagtattctcacacaccgaacaaggctggctttcgctgggaacatgaaatggtaatgattgatgttgatggctcacttacagggcacaaaggacataccgtcattccacacagctcattgctagacccttctcattgtactcaggaagctgagtggagcattgggttccctggatcagtctgtgatgcttcagtcagctttcaccgtttagcgttcaaccagccttctccagtatctctgcttgaaaaggatgtggttctttcagactcttttgtcaaagccatcctgggctatatgaggcccacaggcagcagactggacaaggttgctcgagaaattataaacaaatatagagtgacagaaaatatcagcagtgccttgtaa

SEQ ID NO: 6342 - DNA, 564 bp, Homo sapiens
  SIMILAR (418)..(552): 661254mologous to Homo sapiens Human tissue plasminogen- activator 39 kDa protein,accession number R56282,Smith-Waterman Score=149.
atgcccaccagcgaggatgcactgctgcaagtccaggtgcaacagtggagcatctttaatgtccagccgggctctggcttgcaagaatgtgggagtgcaggcattcttccagtgccctgtgctttgaaaaatacgcagaaaagccagaattatggagggcagcctcctgggcttgtgggtgttgggcaggtggagggagacgtatggaatcttctggtctccaggcagctgtgcagtgcaccggtcgtgctccgggggtacacagcccagcccagggtcgccccggccatgtgcccccagcaccagcccctgggccttttatatgtttctgggatgctgcctgtcttccagtgccatcaggaaaggctcggggagctgggcctcactggacgccatacccctcccgctgggacagtgcagttcgaggagcccagggtgattgacctgtgggacctggcgcagtccgccaacctcacggacaaggagctggaggcgttccgggtgaagaagcatctgcaggacctgtccggcaggatctccagagctcggcacaacgaactctga

SEQ ID NO: 6343 - DNA, 2226 bp, Homo sapiens
  SIMILAR (1192)..(1575): 671254mologous to Homo sapiens alpha-2-macroglobulin receptor -associated protein,accession number M63959,Smith-Waterman Score= 430.
agcacgctcgcctcctcggagggtcagggtggtttctggcgggggccccgggcgctgatactgctgctgctcttcctcgggccctgccacgctcgaagccacgacggcaagtactcgcgggagaagaaccagcccaagccgtccccgaaacgcgagtccggagaggagttccgcatggagaagttgaaccagctgtgggagaaggcccagcgacaggaaaggtacccgtgccggcgacgacgccgtgtgaagcaggtggcggccggcaccccgagggtgttcctgaaaacacctgaaatgggtgttttcgaactatgccgaccatctgggcctcattatctcatctcaaatgcaggagtcagattagatctgctcaatagtccagttttaagcattcctgagtctttgagagggaaagtaaatgatttgcagaataagaaggaacttttggaacgaaaagggagaggagaaacaggactcgccaggccaatgcatgacctcacagcagctcaaggcgggtacggctgtgcccttgtccacggagctcaggtggaaggagctggggcacagggctgggctgggacagtgcatgccacctgccgtggtgagacaggtacagcgtgccaggaagccttggtcaccgccacagcctgctcctcatgccaaagagggcagacccgggcccctcaaggccagcacacacttgagagcatgggcctgaattgcctgccccagggtgctgcttctggctcagaccatcactgtgggcctcgcatctcagacctcccgggcagtgcagcacgaacctcccggtggccagcctcctccgagctgcatcttcctcccgtgaggctggccgagctccacgctgatctgaagatacaggagagggacgaactcgcctggaagaaactaaagcttgacggcttggacgaagatggggagaaggaagcgagactcatacgcaacctcaatgggcactggcgggcagaggacgcacaccaggacggtggtgtgaacaagtgggatatccccactgtggtgggggtgggggtggctgccatcgcacttgttgctgtcaaactgtttttcctcccaataaatataagatgtgtgctgtcagaaagccctgccaccctgcacagtctgcaggtggcctctgtcctgtggtccttagagtttttgccctatggcagcagatctccagtggtcatccaggaaacagtcatcttggccaagtatggtctggacggaaagaaggacgctcggcaggtgaccagcaactccctcagtggcacccaggaagacgggctggatgaccccaggctggaaaagctgtggcacaaggcgaagacctctgggaaattctccggcgaagaactggacaagctctggcgggagttcctgcatcacaaagagaaagttcacgagtacaacgtcctgctggagaccctgagcaggaccgaagttcacccgggaccacaagatggcgtggcgagcacggggagggaacactcacctatggaaaccttgttccaggaggagctcaagcacttcgaagccaaaatcgagaagcacaaccactaccagaaagcagctggagattgcgcacgagaagctgaggcacgcagagagcgtgggcgaccggcgcagcgtgtgatccgcaagcccgcgagaaagcacgccctgcttggaagggcggaccaaaggagctgggctaccacggtgaaagaagcatcttcaggaccctgtccggcaggattctccagagctcggcacaaacgaactctgaaggcattggggagcccagcccggcagggaagcaggccagcgtgaaggacctgcgcctcttggccgtggcattttccgtggacagcccgccgtcatggtggctggggctggcacggttggtctagtgagtgtgaggattgtgttgctggtggactgcaggcgctgccggtcgcgacacagggcttggaggtggtagcatttgggtctgagatcggcccagctctgactgaaggggcttggcttccactcagcatcagcgtggcagtcaccaccccagtgaggacctcgatgtccagctgctgtcaggtctgatagtcctctgctaaaacaacacgatttacataaaaaatcttacacatctgccaccggaaataccatgcacagagtccttaaaaaatagagtgcagtatttaaaccaaaaaaaaaaaaaaaaaa

SEQ ID NO: 6344 - DNA, 373 bp, Homo sapiens
  SIMILAR (137)..(18): 391254mologous to Cunninghamia konishii cytochrome c oxidase,accession number AF020560,Smith-Waterman Score=65.
gacttttttgacaattctgcccaggttaccattgcaggcattccatgtgatattagacacgtgtctcccaggaagattgagtgcaccactcgggctccaggaaaagatgtgaggctcaccacccctcagccaggcaatcgagggcttctttttgaagttggagatgctgttgagggactggaactgactgaagccaccccagggtacaggtggcagattgtccctaatgccagttctccatttgggttttggtcacaggaaggacaacctttcagagcacggctcagtgggttctttgtggctccagagacaaataattacactttctggattcaggcagacagccaagcttccttgcatttcagatggtcag

SEQ ID NO: 6345 - DNA, 1515 bp, Homo sapiens
  SIMILAR (781)..(1458): 251254mologous to Mus musculus plexin 1,accession number D86948,Smith-Waterman Score=110.
atgtcaaagcttgatcgtaggagaggaaagaatgagataaagctaaattctgaggactatgtgtcatattactgtaggaaggctcttagctttattcaggtgcttagtgacattgcacttctagctccagccagctgtatggccagtggcgtccagaagagaccatggtctagaaagcataactgccctcaagatattgttatagctactggaagaaacccccaaactgcccgccttcattcaatgggcaatcgagggcttctttttgaagttggagatgctgttgagggactggaactgactgaagccaccccagggtacaggtggcagattgtccctaatgccagttctccatttgggttttggtcacaggaaggacaacctttcaggtatgttgtaggaaaagtgggagcccacatcaaaagcacctttgctaacctagatgtccctgtacaaatttctgctcatcaccttcaccagctcttacagaataatgccgatgacttcacatccaggtacctcaatgccagtgacttcactgtgaaggaggatctatacacttgctacgaacacgtgtggaccttgtcctggtccactcagattggggatttgcccaattttatcagggtctctgatgaaaaccttactggagtgaatcctgctgcagccacgcgtgtggtatatgatggtggagtttttcttggacccatatttggagacatgttggctactgccaaccagcatactcaggtggttgtgcgagtgaatgatgtaccagctcattgcccaggttcctgctctttccagtacctccaagggtcaactccctgtgtccattctgtgtggtactccattgatggtgacatcaacctaatgatttacattaccggaactggtttctctggtgactcccagttcttgcaggttacagtgaacaaaacgagttgcaaagttattttctcaaaccagaccaatgtagtctgtcagacagatttgctacctgttggaatgcatcggatcttgatgttggtgagaccctctggtcttgccatcagtgccactggagaagacctcttcctaaatgtgaaacctagactggatatggtggagccttccagagctgcggatattggagggctctgggccaccatccgaggctctagtttggaaggtgttagcctgatattatttggatcttactcgtgtgccatcaatgtcgctacaagcaattcaagcagaattcagtgcaaagttccacccagggggaaagatggacgcattgtgaatgtgactgtgatcagaggggactattctgcagttcttcccagagcatttacatatgtctcttccttaaatccagttattgtgactctgagcagaaacataagcaatatagcagcctctggtgctgtcaacactattcatgatttacctggaagtaacagtacatccagagatttagtaatccaagactttcagctgggaaacttctcccaaatggtagtagcaatataa

SEQ ID NO: 6346 - DNA, 268 bp, Homo sapiens
  SIMILAR (4)..(189): 271254mologous to Allium grayi maturase,accession number AB017307,Smith-Waterman Score=84.
ctaggcctgcacagggtcaggatcatcaatatcactgtcttctacctccacatcttgtcccactggaaggtcttcaggggcaaaaacatgcatggagctgtcatctcctatcataacaaagccttcttctggaataccttcatctttacctgcatctttgttacctgcatcttgcaaataagcaagagttaactttaacctggtataaggagtaatgtaccttttttcttccttcagtttaaaatccattccaccaaaacctggccgt

SEQ ID NO: 6347 - DNA, 626 bp, Homo sapiens
  SIMILAR (531)..(421): 431254mologous to Homo sapiens Human secreted protein, SEQ ID NO: 7638,accession number G03557,Smith-Waterman Score=82.
atgaaagtacaaagtgaaggagcagcaagttatccagaagatgtagataagaccattgatgaaggtggccacactaaacaacagattttcaatgtagatgaagtggcattctattggaagaagatgccatctaggactttcatagctagagaggagaagttaatgccaagcttcaaagaacaggttgtgattctcttattagggggcagtagcaacaaaagatgctgtcatttgaaggtgaaagtcatccaggacacaatcaagcaaaataagttcaagtccctaacatctcatggccagaagctcaaagaccctgaagaacaaggtgaggctccaggaaagtatctacagcactgcttagccttcgcctacacacttaaatacccggcgcttccgctagctagatgtgggccttcttgggttatggtcagggcaacaacattggaaagcctgccaagagacggagttgagataagtaagaaaaactacaaaaggaaatgaaatgcttgggcacttttcttggagacagaaagagctttagacttttctgggacacaacaggtgtccagagagcatcactgaaaatctggccaggttttgtgatcccttaacccccttttttggaa

SEQ ID NO: 6348 - DNA, 2568 bp, Homo sapiens
  SIMILAR (46)..(615): 911254mologous to Homo sapiens josephin MJD1,accession number U64821,Smith-Waterman Score=867.
atggcccctgaacagggcagagtatccattcttcagacactcttcatagaataccatggttattctatatttgtcgttaagggtgatctgccagattgcgaagctgaccaactcctgcagatgattagggtccaacagatgcatcgaccaaaacttattggagaagaattagcacaactaaaagagcaaagagtccataaaacagacctggaacgagtgttagaagcaaatgatggctcaggaatgttagacgaagatgaggaggatttgcagagggctctggcactaagtcgccaagaaattgacatggaagatgaggaagcagatctccgcagggctattcagctaagtatgcaaggtagttccagaaacatatctcaagatatgacacagacatcaggtacaaatcttacttcagaagagcttcggaagagacgagaagcctactttgaaaaacagcagcaaaagcagcaacagcagcagcagcagcagcagcagggggacctatcaggacagagttcacatccatgtgaaaggccagccaccagttcaggagcacttgggagtgatctagcgttgttgctcacacaaagcctgtttggtagtctcttcacatggacgcgtgtgacatttggtgctgaagacccgggacaggaggactccttcaggagacgggtcccctgtccttgccctcactccgtgaggagatccacctacgacctcgggtcctcagaccaaccagcccaaggaacatctcatgaatttcaaatcgggctgctcctcaccaggctgagccaggtcccaattcttcctcagcctccggtcccccaccctataatccttttatcaccccctcctcacaccgtgtctggcttacagtttctttctgtgactagccctcccctacctgcccaacaatttcttcttaaagaggtggctggagctgaaggcatagccaaggttatccccacctgcccagttcccttattaggccaagacattttaaccaaattatctgcttccctgattattcctggactacagccacatctcattgccacccttcttcccaacccaaagcctccttcgcctcttcctctcgtatcccccaaccttaacccacaagtatgggacacctccactccctccctggcaaccgatcaaacacccattactatcccattaaaacctaatcacccttacctggctcaatgccactattccatcccacaactggctttaagaggactgaagcctgttatcactcgcctgctacagcatgggcttctaaaacctataaactcttcttacaattctcccattttacctgttcaaaaaccggacaagtcttacaggttacctcaggatctggatcttatcaaccaaattgttttgcctatccaccctgtggctagcccccacattattcctgataccacacctgacccccatgactgtatctctctaatccacctggcattcactccatttccccatacttccttctttcctattcctcaccctgatcacacttggtttattgatggcagttccacctggcctaatcgccattcaccagcaaaggtgggctatgctatagtagtatcttccacatctatccttgaagctaccgctctgcccccctccactacctctcagcaagctgaactcattgccttaactcgagccctcgctcttgcaaaaggactacatgtcaatatttatactgactctaaatatgccttccatatcctgcaccacaatgctgttatatgggcagaaagaggtttcctcagtacgcaaaggtcctccatcattattgcctccttaataaaaactcttctcaaggccgctttacttccaaaggaagctggagtcattcactgcaagggccatcaaaaggcatcagatcccatcgctcagggcaatgcttatgctgataagacaaaattcctcgatttggccttcccacctctcagactgtcctttacttgtcaaatcacccaagcagtttctcaggctcttggtattcaatggaaccttcataccccttaccgtcctcaatcttcaggaaaggactggacagtatttttacctcttgcccttcacagaattagagcccgtcctcgagaagctacagggtacagtccatttgaacttttatatggacgcactttcttgctcagccccaacctcgttccagacaccagccctctaggcgactatcttccagtcctctggcaggctagacaggaaatccaccaggctgctaatcttctcttgtctactccagattcccaactatatgaagacaccctagctggacgatcagttcttattaagaacctgacccctcaaactctacaacctcgatggactggaccctacttagtcatctatagtaccccaactgccgtccgcctgcaggatcctccccactgggttcaccgttccagaataaagctgtgcccatcggacaaccagcctaatctctcttcttcctcctggaagtcacaagtactccccactacttcccttaaagtcactctcatttctgaagaacagtaa

SEQ ID NO: 6349 - DNA, 2553 bp, Homo sapiens
  SIMILAR (856)..(2328): 351254mologous to Baboon endogenous virus strain M7 gag-pol precursor polyprotein,accession number D10032,Smith-Waterman Score= 728.
atgaataaacttaaaaacatcctggtagatgaaaaatcagggtctttgtgtcaacctcctatctcatcgtgtgataaagaatgcctgtttgcagatgacatgattgtatatttagaaaaccccattgtctcagcccaaaaactccttaagctgataagcaacttcagcaaagtctcaggatacaaaatcaatgtgccaaaatcacaagcattcctatacacgaataacagacaaacagagagccaaatcatgagtgaactcccattcacaattgcttcaaagagaataaaatacctaggaatccaacttacaagggatttgaaggacctcttcaaggagaactacaaaccactgctcagtgaaataaaagaggacacaaataaatggaagaaccttccatgctcatggataagaagaatcaatatcgtgaaaatggccatgctgcccaagcggctgaagactgacgctgcccgatcacctcggaagcctcctggactatcacagacgctttgggtaactcttacagtggaggctcccttattaggtcgagacattttaactaaattttctgcttctctgactattcctgggctacagccacacctcattgctgccttttcccccagttcaaagcctccttcacctcctccccttgtatctccacaccttaacccacaagtatgggatacctctactccctccttggcgaccgatcatgcaccccttaccatctcattaaaacctaatcacccttaccctactcaacgccaatatcccatcctgcagcacgctttaaaaggattaaagcctgttatcactcacctgctacagcatggccttttaaagcctataaactccccttacaattcccccattttatctgtccaaaaaccggacaagccttacagctccttcaggtatgtatactcactctttgttgagtctcccacaattaccattgttcctggtccagacttcaatctggcctcccacattattcctgatactacacctgacccctatgactgtatctctctgatccacctgacattcactccatttccccatgtttccttctttcctgttcctcacccttttcacacttggtttattgatggcagttccaccaggcctaattgccacacaccagcaaaggcaggctatgctatagtatcttccacatctatcattgaggtcaccactctgccccactccactacctctcagcaagccgaactcattgccttaactcggaccctcactcttgcaaagggactatgcgtcaatatttatactgaccccatatcctgtaccaccatgctgttttatgggctgaaatgtttcctcactatgcaagggtcctccatcattaatgcctctttaataaaaactctactcaaggccgctttacttccaaaggaagctggagtcatacactgcaagggccctcaaaaggcatcagatcccatcgctcaggacaacacttatgctgataaggtagctaaaaaagcagctagcgttccaacttctatccctcacagcagtttttctccttctcatctggtcactcccacctactcccccactgaaacttctacctatcagtctcttcccacacaaggcaaatggttcctggaccaaggaaaatatctccttccagcctcacaggcccattctattttgtcatcattttgtaacctcttccatgtaggttacaagccactagcccgcctctcagaacttctcatttcctttccatcgtggaaatctatccttaaggaaatcacttctcagtgttccatctgctattctgctactcctcagggattgttcaggccccctcccttccctaaacatcaagcttggggatttgtccccacccaggactggcaaattgacttcactcacatgcctcaagtcgggaaactaaaatacctcttggtctgggtagacactttcactggatgggtagaggcctttcccacggggtctgagaaggccactgtggtcatttcttcccttttgtcagacgtaattcctcggttttgccttcccacctctatacagtccaataacggactggccatgattagtcaaatcacccaagcagtttctcaggctcttggtattcagtggaaactttgtaccccttaccatcctcaatcttcaggaaaggtaaaatgggctaatggtcttttaaagacacacctcaccaagctcagcctccaacttaaaaaggactggacagtacttttacctcttgcccttctcagaattcgggcctgtcttcggaatgcgacaggatacagcccatttgagctcctgtatagatgctcctttttattaggccccagtctcattccagacaccagaccaacttggactgcgcccccaaaaacttggcatccctactatcttctgtctagtcatactcctattcaccggtctcaactactcatacatgccctgctcttgtttacactgccggtttacactgtttctccaagccaccacagctgatatctcctggtgctatccccaaaccgccactct

SEQ ID NO: 6350 - DNA, 1098 bp, Homo sapiens
  SIMILAR (394)..(1095): 941254mologous to Homo sapiens bA119E20.1 (KIAA1202 protein),accession number AL121865,Smith-Waterman Score=1086.
atgctggtgactgagaaggggcatggaacagaaaaaaggggtatgaacagttggcctgatgctgtagtccaagaaggagtctgtgcaaggactcagatagtggcagctgaaggagcaattgaagatggaggcaaggcagctttgtcccagaagatgaggactggtgatgagctggtgaatatcaatggcactccattatatggctcccgccaagaggccctcattctcatcaaaggctccttccggattctcaagctgattgtcaggagcagccaagtaagactgctccaagagaaacagacactcccaggttattgccgaaggaaatatttgcaagatccaggaagtgagacgcaaggaggatacacagggaggggagaaggacccagagagcctgttgctgccacccctgcttgcccccgggcccacagaaattcaacttattacaatatttctgtggccaaggcagagctgctgaacaaactgaaagaccaacctgagatggcagagattggcctaggagaggaggaagttgaccatgaactggctcaaaaaaagatacagcttatcgaaagcatcagcagaaaactttctgtcttgcgggaggcccagcgagggctgctagaggacatcaatgccaattctgcccttggggaggaggtggaggccaacttaaaagccgtctgcaaatccaatgaatttgaaaagtaccacttgtttgttggggacctggacaaagtggtcaacctgttgctgtcactctctggacgactggcccgggtggagaatgctctgaacagcatcgattcagaggccaaccaggagaagttggtactgatagagaagaagcagcagctgacggggcagttggcagatgccaaggagctgaaggagcacgtggaccgccgggagaagttggtgtttggcatggtctcccgctacctgcctcaggaccagctccaagattaccagcactttgtcaagatgaaatctgctctcatcattgaacagcgagagctggaggagaagatcaagctcggggaagagcaactcaaatgtctcagggagagtctactcctggggcccagcaatttctaa

SEQ ID NO: 6351 - DNA, 1044 bp, Homo sapiens
  SIMILAR (1)..(972): 1001254mologous to Homo sapiens bA119E20.1 (KIAA1202 protein),accession number AL121865,Smith-Waterman Score=1706.
  misc_feature (1)...(1044): n = a,t,c or g
atggctcattccaagactagcttttcatgggcaacccctttccatccttgccttgagaacccagcactggacttgtcaagctaccgagcaatttcttctcttgacctccttggagacttcaaacatgctttgaaaaaatcagaggaaacttcagtttatgaggaggggagctcccttgcctccatgccccacccactgcgcagccgtgccttctcagagagtcacatcagcttggcgccccaaagcacccgggcctgggggcagcataggagggagctctttagcaaaggtgatgagacccagtcggatcttctcggagccaggaagaaggcctttcctcctcctcgccctcctcctcccaactgggagaagtacaggctctttcgtgcagcccagcagcagaagcagcaacagcagcagcagaagcaacaggaggaggaggaggaggaggaagaagaagaagaagaggaagaggaagaggaggaggaggaggcagaggaggaggaagaggagctgccaccccagtatttcagttcagaaacctctggttcctgtgctctcaatcctgaggaggtcctagagcagccacaacccctcagctttggccacctggagggctcgagacagggttcacaaagtgtcccagcagagcaagaatcctttgcactccattccagtgatttcttgcctccaataaggggtcacttgggatctcaacctgagcaggctcagcccccttgctactatggcattggtgggctttggaggacatcgggacaggaagccactgaatccgccaaacaagagtttcagcacttttcgcctccttcaggggccccaggaatccctacctcttactcagcttattacaatatttctgtggccaaggcagagctgctgaacaaactgaaagaccaacctgagatggcagagattggcctaggagaggaggaagttgaccatgaactggctcnnnnnnnnnnnnnnnnnnnttttttattaaggggcccgaagctttttccctttaagggggggaaattttaa

SEQ ID NO: 6352 - DNA, 898 bp, Homo sapiens
  SIMILAR (431)..(658): 421254mologous to Homo sapiens bestrophin,accession number AF057170,Smith-Waterman Score=111.
ctagatagttatcttcttcccatagaaggctgtttggtctacattgaaaagctgttgtgtagtgtagccacctttatcaattttcttagctagatcttctggataacttgctacagcttctgcatcagcacttgctgcttcaccttgcacttttttggaaacagcttcttttcttttctttcttttcttttttttagatggagtctcgctgcgtcgcccagcctcagtgacactgccttcttggatttcttgcccaccatccccaccactggctgtttgtgtgctgtcccaccttttatgctctcctggatctttctgacatttacctccttcttgacttttgagttcttgcccattccataaacattggttgacactttctccagtgtaagactgaaggaacactagaaaggggccgtaagactgatcatcaagccggtcatggtggcgtgtccccgtggtctcagctactcgggaagctgaggcaggaggatctcttgagccttgggatgattcatagttccaaacagctttttcctccagctcctcttgtctttctgttgttttgggtttccttgctatattttgaatgtccacacacgtgtcctgcctttccttcacagccatggggtgtcttcctttgccatactgtctaggctcagacagtgttcctttcaatgtggtcttgtctgtgagattccaactgagactgaagttctctgcatccctagcacttagcactgtgttaagttgttttcccctgtgaccaggactcaaaatctcagtcaccttttgcttcactctctgtattctcattagtccatctgcaacacctcccttcccagtgagtctggaatctgtactgcctccaccctggtccaggccccattcacataat

SEQ ID NO: 6353 - DNA, 991 bp, Homo sapiens
  SIMILAR (883)..(743): 611254mologous to Homo sapiens Human secreted protein, SEQ ID NO: 7077,accession number G02996,Smith-Waterman Score=137.
ggatgcctctctgattgttcacccacgtttcaaagctgtcacaccatacagggacgcctgccttggtccttcacccttagcggcaagtcccgctttcctgggggaggggcaagaaaccctcaaccccttctccttcacccttagtggggagtcccgctttcctggggcaggggcaactgtttcatcattcaataaaactccccaacttgctcactcattgattgccagcatatcctcattcttcttggatgctggacaagaatttgggacccaccaagagcagacacccagaaagtctgcctcacaggccttctgccctcactggcagagggcagccaccactcacaaaagggccaggggccaactgagtggccaaccagatcctgcactcacttgctcacatgctccttcctgcaaggaattgagtgtagcaggccaagtagacatggcaaccctgctaattccatattccctaagacacaagaatattgaaattatggcaattaataaccctacggtgacctctaagttttcaaatggaagaaagaatctcatttatctgactttaaacctaaagctagaaataattaagcttaagagccccaacagtcccccaagccaaagcctaatccagagcaagcccctaactctcttcaactctataaaggctgagacagataaagaagctgtagaagaaatgattgaagccagaagaggttggttcatgaggtttaagaaaagaagctgtctccgtaatataaaagtgcaaggtgaagcaacaagtgctgatgtagaagcagtagcaagttatccagaagatctagccaagataattgataaagatggctatactaaacaacaaattttcaatgtagatgaagtagccttatattggaagaagattccatctaagacttttatagctttagagaaaatgtcaatgtttgacttcaaagcttcaaatgtcaagctgactccagttagggactaa

SEQ ID NO: 6354 - DNA, 906 bp, Homo sapiens
  SIMILAR (282)..(413): 401254mologous to cotton leaf curl virus AC4,accession number AJ002452,Smith-Waterman Score=66.
atgcattttccctgtggagttccattaatagagcctcttgggtacacacagtatatccgagaagaaattttagaagaagttctgggaaaactgatgagtgtagaactctatccacagaagaacctaacaggctgccaccaggaagctcaatggctggatttccactcctatttcaaagctgctttgcctgtatctgcttcagataaagatttcctatgggaagatggggatgcttccagggtggtgacagtagtgaggggtgaggaatcggccaaagctaagaagctcctgaaaagagctcccagacttttacttctgcccctcctcccactcttatcagcacccagaagtatcttaggccagcagttatgcctcctacaagtggccaaaaacccatatgttgtcaatctgccattaaactacacattcaaaaaatcactaactgatctgaaagctccccacaaagcagaagagctgaaattctttgagcccctgaatactggaactgaaatgttggtaaaatatcaagcctgcatcccagatctcccctgggtgaatctaggttcacagctcccctactcagaggctctcggctcctccctctgcggctgcaggctgctctctctgtccctgcccgctggcctagtgggtggtgacacagcacggtgcattcctgcaggcaggctcaggcccctgtgtagttggcttgacccaggcaagctcctgcacttgtcgctgaagagcaagggctcaggtgggcgttccggtgcgggaaccttgcaggaaggcaatcagtcggtttgtattcaagctgaaaagccccctctgaagcctgcgatccagacacaaagcgggatgaatgtgcttcgctgcagagcgtacagctgggttattgactgggactga

SEQ ID NO: 6355 - DNA, 676 bp, Homo sapiens
  SIMILAR (32)..(526): 831254mologous to Xenopus laevis bicaudal-C,accession number AF224746,Smith-Waterman Score=713.
agccatctagaccagcgtggtggaattcttccaagctatgttaaagaaaccagtggtgacggaggtcagaacgcccacaaatacctggagtggcctgggtttttctaaatccatgccagctgaaactatcaaggagttgagaagggccaatcatgtgtcctataagcccacaatgacaaccacttatgagggctcatccatgtccctttcacggtccaacagtcgtgagcacttgggaggtggaagcgaatctgataactggagagaccgaaatggaattggacctggaagtcatagtgaatttgcagcttctattggcagccctaagcgtaaacaaaacaaatcaacggaacactatctcagcagtagcaattacatggactgcatttcctcgctgacaggaagcaatggctgtaacttaaatagctctttcaaaggttctgacctccctgagctcttcagcaaactgggcctgggcaaatacacagatgttttccagcaacaagaggtcagtcattatttattttcccaagtatctttgttttgattgtgtgtatgatgacttctagaatgaaatcacttattgacctatgagtatgctttcatgagcatttattcaagtctcatagcttgtccttgctactaagaaaaatgtcatctcatttcttatttagag

SEQ ID NO: 6356 - DNA, 2921 bp, Homo sapiens
  SIMILAR (1146)..(1667): 1001254mologous to Homo sapiens KIAA1197 protein,accession number AB033023,Smith-Waterman Score=919.
gactgttaaagattcactccagtcagtccagtccgcagcaggccgtcctgacgattcccagccagctcaaaccactcagcgtaaacacatctggaggggtgcagacgatcctgatgcctgtgaataaagtggttcagtcattttctaccagcaagccacctgccattctgcctgtagctgccccaactccagttgtccccagctctgctccagcagctgttgcaaaaggtgaagatgccagctgcttttctgcaaagtctgtggagcagtactatggctggaacattggaaaaaggagagccgctgagtggcaaagagcaatgacaatgcgaaaagtcttacaagaaatcctggagaagaatccgagatttcaccacctgactcccctcaaaaccaagcacatcgctcactggtgccgctgtcatggctacaccccaccggaccctgagagcctgaggaatgacggggactccatcgaggacgtgctgacccagatcgacagcgagcccgaccatgggtctcttggagacggaaagtcctcttccgttggccccacagctgttgtaacactgcttgcctgtcatttagagtgcccatcatcattctcctctgctgacaacctctgccgcaaactggaggacctgcaacagttccagaaaagggaacccgagaatgaggaggaggtggacatcctcagcctctccgagccagtgaagataaacatcaagaaggagcaggaagagaaacaagaggaagtcaagttctacctgccaccaaccccagggtctgaatttattggggatgtcacacagaagggaggtatgcttgtttggagagaggctgtttctaaagcagcgatacgaacaaacggctttcttctgcttttccagattgggatcaccctgcagcccgtggcactccacaggaacgtgtatgcgtccgtggtggaggacatgatcctgaaggctacagaacagctggtgaatgatatcctgagacaggctttggcagttggataccagacagcttctcacaacaggtattactatctctgcagtctgtggtgtgaggcttacacctctttcctaacagttgaattgcccatgaaggtgttttatacttacatcaatccagtaggagatggaggatcaaagacatgtgatacaatggtttttaatcatcctgctatcaagaaatttttggaatcaccatctaggtcatcatctcctgccaatcagagagcagaaacaccatcagccaatcattcagaaagtgattctttatctcagcacaatgacttcttatctgacaaagataataacagcaatatggatatagaggaaagactctcaaacaacatggagcagagaccaagccgaaatactggaagggatacttctagaattactggctcccataaaacagaacagcggaatgctgatctcacagatgagacttcacgactttttgtaaagaaaacaatagtagtgggcaatgtgtccaagtatatacctccggataagagggaagaaaatgaccagtcaactcataagtggatggtatatgtccgagggtcccgtagagaacccagcattaatcattttgtcaagaaggtttggttcttccttcatcctagctataaaccaaatgaccttgtggaagttaggtacaagatagtggtgactagatatgtgctaggctcagggcgtgataaagggactgtgaagatgagcacggggccttggctttgggaaaccaaaaaggtcttcctgcccttgagaataaaatacctaggaatccaacttacaagggatgtgaaggacctcttcaaggagaactacaaaccactgctcaaggaaataaaagaggatacaaacaaatggaagaacattccatgctcatgggtaggaagaatcaatatcgtgaaaatggccatactgcccaagactgagaggggtgaggaagcttcagaggaaaagtatgaagctagcagatgttggttcgtgaggtttaaggaaggatgccgtctccataacatacagttgcaaggtgaagcagcaagtgctgatggagaagctgcagcaagttatccagaagatccagctaagatcattgatgaaggtggctacaccaaacaacatattttcactgtatatgttgtcggtggctatgatgggcaaaacagacttagcagcgtagaatgttatgattccttttcaaatcgatggactgaagttgctccccttaaggaagccgtgagttctcctgcagtgactagctgtgtaggcaaactgtttgtgattggtggaggacctgatgataatacttgttctgataaggttcaatcttatgatccagaaaccaattcttggctacttcgtgcagctatcccaattgccaaaaggtgtataacagctgtatccctaaacaacctgatctatgttgccggtggactgaccaaggcaatatactgttacgatccagttgaagattactggatgcacgtacagaatacattcagccgtcagagaggagagcttggtgtttttgtggtgccaagtgcaggattcccagctagcactgaagctgaacgacacactccgttttatgctttgccatcttcattggaaagaacacccaccaaaatgactacatcccagaaagttaccttttgttcccatggcaattcagctttccagccaatagcatcaagctgcaaaattgttccacaaagtcaggttcctaatcctgagtcacctggaaaatccttccagcccatcaccatgagctgcaagattgtgtcagttcttctaagcagtgttatgtttaacaaaaggaagtttatcactgttgattggcaaagctgtcacaaggcaaaaacaaagctcattcatacggaaatgaatggaggagataaatga

SEQ ID NO: 6357 - DNA, 2391 bp, Homo sapiens
  SIMILAR (982)..(2319): 741254mologous to Xenopus laevis bicaudal-C,accession number AF224746,Smith-Waterman Score=1660.
atgcaaggtgaagcagcaagtgctgatgtagaagctgtagcaagttatccagaagatctagctatgaaaattgatgaagactccaccatgatgagtaatcggaggtgcaaggaaaatagagacctgaaggtgcagcgcctgtttcaacaggaccggggcaaccggggctctggacagatgtgttctggtgactgccagtctaagatcaagagtttcaaggtgaaaaaaaaaacaaaacccagcgcattaaaccaagtacgaggcccgtctaagcgtggatccctgggcgactgcattggtcacatgcccacgaagccagccctgccccaaagcaagagattcagtaaggttctggttcccacactgaaattctgcctcctaaatcagattcagactccaattcccaaaatctgttccaaacacattcatggcctaacccttgagaaagagaacttcaagctccacttgcctcctttcagatatatccgagaagaaattttagaagaagttctgggaaaactgatgagtgtagaactctatccacagaagaacctaacaggctgccaccaggaagctcaatggctggatttccactcctatttcaaagctgctttgcctgtatctgcttcagataaagatttcctatgggaagatgggattgaaaggattgaaagaagaattcccagacacaatcagatctacagttcacttggctcaactcagcaaactatcactgaaagggacacaaaagaagtatttgcaggaactataaaactgcactgtctggcatcaggaacaaagcatgaagggaaactgcccaaggatcccccaccttcctttaaagatagtccaattccatttcggtctctccagttatcagattcgcttccacctcccaagtgctcacgactgttggaccgtgaaagggacatggatgagccctgtaaacagacaaagccagataaggaaatatttaatcagggttgtcttcctcttgtgttgatgtttgatatgaaggaagaaattgaagtagatccacaattcattgcgcagttgatggaacagcttgatgtcttcatcagtattaaaccaaagcccaaacagccaagcaagtctgtgattgtgaaaagtgttgagcgaaatgccttaaatatgtatgaagcaaggaaatgtctcctcggacttgaaagcagtggggttaccatagcaaccagtccatccccagcatcctgccctgccggcctggcatgtcccagcctggatatcttagcttcagcaggccttggactcactggactaggtcttttgggacccaccaccttatctctgaacacttcaacaaccccaaactcactcttgaatgctcttaatagctcagtcagtcctttgcaaagtccaagttctggtacacccagccccacattatgggcacccccacttgctaatacttcaagtgccacaggtttttctgctataccacaccttatgattccatctactgcccaagccacattaactaatattttgttgtctggagtgcccacctatgggcacacagctccatctccccctcctggcttgactcctgttgatgtccatatcaacagtatgcagaccgaaggcaaaaaaatctctgctgctttaaatggacatgcacagtctccagatataaaatatggtgcaatatccacttcatcacttggagaaaaagtgctgagtgcaaatcacggggatccgtccatccagacaagtgggtctgagcagacatctcccaaatcaagccccactgaaggttgtaatgatgcttttgttgaagtaggcatgcctcgaagtccttcccattctgggaatgctggtgacttgaaacagatgatgtgtccctccaaggtttcctgtgccaaaaggcagacagtggaactattgcaaggcacgaaaaactcacacttacacagcactgacaggttgctctcagaccctgaactgagtgctaccgaaagccctttggctgacaagaaggctccagggagtgagcgcgctgcagagagggcagcagctgcccagcaaaactccgaaagggcccaccttgctccacggtcatcatatgtcaacatgcaggcatttgactatgaacagaagaagctattagccaccaaagctatgttaaagaaaccagtggtgacggaggtcagaacgcccacaaatacctggagtggcctgggtttttctaaatccatgccagctgaaactatcaaggagttgagaagggccaatcatgtgtcctataagcccacaatgacaaccacttatgaggcagcttccttccagctcttcaagcaagtgagccatacggccactcacacagctgctctcgataaaggattaatggcttaa

SEQ ID NO: 6358 - DNA, 481 bp, Homo sapiens
  SIMILAR (293)..(382): 1001254mologous to Homo sapiens myosin-IXb,accession number U42391,Smith-Waterman Score=142.
atgctggagacgtgcgcatcggaggtcaggtacagcgccaagtacacgttccagggcctggccacagggctgcaggtcccgcccaaggagcatgttaagtttatacagattctccctttcagctgctcaatgctagatttctcatttgacggctctgaggagttcgatattaacgcttttgaggacatcattgctttctatgaaagcaagaagtgctccagtggggatcctctagagtcgagcctggcggtgcgggtgtctgggtatgttgtaggcggctggccgggtgctggtgaagcgagaaatcttggtggaggttctgaccaaaagaaaaacggtgaccgtcaacgacaagcttatccttccctacagcctcagcgaggtatgtccgctcagtatcaccaggacatacaaggcacaaaactgcgtggagtcgagacacacgcacgtacgaggaggctaccactatgaagctcggtaa

SEQ ID NO: 6359 - DNA, 3819 bp, Homo sapiens
  SIMILAR (229)..(2946): 181254mologous to Homo sapiens Human 160kD mediator of inflammation protein,accession number R10534,Smith-Waterman Score= 166.
atgggtcactttaagtttgtgggtaaattcctgaatggtccatttaaaggaagtggtgcgaaagcagggaactcagtctgccagtttcagaaattcaacaagaacggttttgatccttttctaaggaatataaacaaaatgtcagtcagaaaaagaaaagatcaagatatatacaaatatagaaatatcttaggtgcagaggtcatagagcatgaagaccaggatcctccttatccagcacaatcaaaaactgcaggacctgctaatacaacctgggcccatgaccctaatatcttcacaacaaagatgttagaaactgagaataagttagcccctgatcctactatcaatacaataaagggtttagatacaaagaatagtttaaaagaaaatctaccaaatgtatctttaccaagcatcaaaggagaatcatcaagggctggaaatgtacaggcaaacacatgtcacctctcgaagtctttaaattttaccccccatatagaatatttaaaacaatcaatgatactcaagtcaattttaagtgaaaatctgcaagacctttcagacaaattattttctaaaccagaagttagtatgaacagtgaagcaagagagaaaagtagttctccacttctaagcattcatgataaatcatcaagtagtatggaagacaacgtattggaaaaaaaacaagatttaaacaactggctttcagaaaaagacattttaaattcaaagactactttaagtcaaataattaaaaatattcctgcagattcattttcagaaggtagtcaaataattgaaaatattcctgcagattcacttttagaaggtggtcaagtaattaaaaatattcctgaatattcactttcagaagggggtcagataattaaaaatattcctgcagattcatttttagaaagtggaccaggacaatctccagaggtagaagaacatgtctctaaaaaacacttcgaagctgatgagagagattttccaattaaaaaaaatagtagtaccaaaaagaaacatttaataagcgaagtacctaactccaaatcaggttcaagtggcactgtacatgactacattatgaggcaaatattcactgcaccaatattctcagaattggagatagaagtgaaagagccaagtgaaacaccaatgaacttggaaaatcaattacctacaccttggaagagaagtttgtcatcacatattctatttcatgaagaaaatgctgatgaaatagaattgccacagcccagatctgctacaagccagataatacaagcatttcctatagatacacttttagaatctgggataatcaaagtgatagaattagataaagaacaccataagagttctttgctgggtacggggatcacttctcctaaaggaaacctaaaggattcccaagagtattattcagaaatcagaagcgagacagaacctctttctgagcagagtatacccatcattcccaaagacactacttctgttagtagagctgaatttatacaggaagaccaaaatatgttcccacaagattcaagttattattcaatagcaaataaagaactgtatttgccaagaaatggtcagaggctttgtaaagacaaaaatgatctcagttctactttagaaagtttaactaactcattaatggataaacttagtgaatcagatgaaataatgttaaaatcctttttaaaaaacatcttcaatgtttttttcaaatataatcattctgaaagaagaggacaaccagaaaaagaattagaaagactaattcaaccttcttttacaagtgacacagaacaccttgaagaactccaagaggattttgataaagcagacaaattagacagaaaacctattttgagtccaaagttgcgtgtgtttctagaagaactctcagagtcagaagtaaaacatttaaaatctgaattaagtaaacaaatccagcattaccttgtagaaagactttcagaatcaggacatatcaccaaggaggacttaccaaaaatctatcaaaatctgtatctgatgaatgagaaagcagagcagaaagggccaaacagttttcaggggaaatattctgaaactgtgaaagaaatcatgtcttttgtcaacaatttcaatcatcatttcatagataaacatttggaaataaagctgagatcttttttaaaagagattctccaaaactatttcctaaaaaacatttcagaaagcagtttatttaatgagacagcatctgagactatatacccaaacatatcttctctaaggactaaaagtgtctcaatatcttttcatgaactagaacaagatatttcaaaggggagttttggtagaaggtttgaaataaacatgaaatatcctttaagtaaatctctacaaaactatctgatagctttatcagaaaatgaattattacatctaaaagctgatttaagcaaacacctccagagtctttttatagaaaaactttcaaaatcaggactaatgacaaaaaagcaattagaagggatcaaccagcatataaatttgcttaattctagttctataccattaaaatatataaaaacacatttaccttttagagatgactgtcactttgtggagaagcattcagaaaagcaaaataaatattcaagaattgttcaacaaaccactttacaaacggtttctgaggataaacttagagaagcagaattgattcgagagaaagaaaagaaatattttcccttacagaatttaaagggaaattcatctttaattaaggaacagaaaagttattacactaaggaagaagctaaaacaccaagtttaatcaaagtacaaccttcttccaatgaaaatatccaggcaagtccattaagtaagtcatcagaaatacttacagatatactgcttaagaaactaaggaaagaacatgtattcacgcagcttcctcaagcagaaaattctgttcataaaacagagattcaagacccatatagttggggtggtaaatcaaaaataactcaatcaaaagcttggtgtgaaaagacactgaaaatgaagtcccttgatagaaaggagcatgtaaacatctataaatggactgttcaggaaaaacctgaagcagtattaacatcgtatccaagaattcctaatgccagaatgccaagggaagatgagtacttaaacagaatcactttcccttcctggcaaagtagcactttaactcatttcaatacagagactggggaaaaatcaaaattagaagaccagtattgtcagacattgaaaggaaataataacaataataaaaagcatttagtaacatttgcacaatacaaaaaagaaatacaaactctttatataaaaccagatgaaatttgcagtgaaaaatgtgccaagttccctgaaatacagtcattccaatataaggttgtagaagatgagaaaaacttgaaaccacacctcttcccagaattatttaagatagaagatctaaaacccaaggattgttcagataaatttgaggatttacatgacatgacctcatttacacaccttaaaaaagtaaaatcaagatcaaggcttttaggaaaaagctcagatgatatccataaccatgccagacactctgcaagaccatatactgctccggaggttaacaagcaacgagaaagctacagtggaaagtttacaagtcgtcgaatggtttcatcaggcttagttcatataaatgataaaacatcagattatgaaatgcataaaatgcggccaaaaaaaattaaaagaggatattgaaaaaaa

SEQ ID NO: 6360 - DNA, 2694 bp, Homo sapiens
  SIMILAR (70)..(1047): 1001254mologous to Homo sapiens delta 4-3-oxosteroid 5 beta- reductase,accession number Z28339,Smith-Waterman Score=1732.
ccctaggacacctttctaaaaagactccctgtggtgttcagaatcactcctacagtcaggttctccacaatggatctcagtgctgcaagtcaccgcatacctctaagtgatggaaacagcattcccatcatcggacttggtacctactcagaacctaaatcgacccctaagggagcctgtgcaacatcggtgaaggttgctattgacacagggtaccgacatattgatggggcctacatctaccaaaatgaacacgaagttggggaggccatcagggagaagatagcagaaggaaaggtgcggagggaagatatcttctactgtggaaagctatgggctacaaatcatgtcccagagatggtccgcccaaccctggagaggacactcagggtcctccagctagattatgtggatctttacatcattgaagtacccatggcctttaagccaggagatgaaatataccctagagatgagaatggcaaatggttatatcacaagtcaaatctgtgtgccacttgggaggcgatggaagcttgcaaagacgctggcttggtgaaatccctgggagtgtccaattttaaccgcaggcagctggagctcatcctgaacaagccaggactcaaacacaagccagtcagcaaccaggttgagtgccatccgtatttcacccagccaaaactcttgaaattttgccaacaacatgacattgtcattactgcatatagccctttggggaccagtaggaatccaatctgggtgaatgtttcttctccacctttgttaaaggatgcacttctaaactcattggggaaaaggtacaataagacagcagctcaaattgttttgcgtttcaacatccagcgaggggtggttgtcattcctaaaagctttaatcttgaaaggatcaaagaaaattttcagatctttgacttttctctcactgaagaagaaatgaaggacattgaagccttgaataaaaatgtccgctttgtagaattgctcatgtggcgcgatcatcctgaatacccatttcatgatgaatactgactgccgggagttcctgaacagatttttcactcccatgagtgccaagacggtgcaatgggtagtcccctagatgtgaaaatgaagagagagggttttaccatcctgagaagaaataatgatggaaacatgtttaatgtttgtgcagtgtaaatgactttgactcagtcacattgaagtaaaaatattaaaatctgttgaaataactcttaggaaattatcaactaattttttcagatcagtatcttctagattccagacagaaaaaaattacacttcagaaaagacatcaaaggcaacatatgacaacaagtaatttatgaatctgggtagtagcgttggtaatctgagttctttaagggttcacaggacaacgaagtgcatgtggcagtgtgctggcagtggccttgaggctttggaccattggttacaaaacagacacagccaagataagatccacacacacattattaacaaggaagtgatttgctgcaccttgagttgagaggactacatgtagaaaagtcttaaaatagagctaaacaccacagtggtcaacaaagccatcataatgttggtgtttgtttccctccaatgtatgtatgtttagtttttatccaacctgaggaatgaaaacttaactggatctctcttgcatccttaaagggcctgagtctcaacatggctgctgatccatacttacacatcttactgtcaatcttgcctacattgattatagaaccactattacgtgaaaaggcttgaaacaaccaacatatacaaataaaaccctgccttgtaaaatagtaaaagagaagccatatattggcttttcttcttaacttgggagatatattgaaacaaggtgctttataagattattgtacttaagactttaatagtgttacttggatagcttatatgaattttgagaattttatatgaattttgagaaagcaagttcaaaagaactctggtaattttcctgtatgtacaatttaaagagtgaataagattattagaattcagcaatagagatatatctattttcaattcaactacagaaatatattttattggccgggtgcggtggctcatgcctataatcccagcactttgggaggccaaggtgggcagatcaggaggtcaggagatcgagaccatcttggctaacaaggtgaaaccccgtctctactaaaaatacaaaaaattagccaggcgcggtggcgggggcctgtaatcccagctactcaggaggctgaggcagaagaatggcatgaacccgggaggaggagcttgcagtgagccgagatagcgccactgcagtccggcctgggtgaaagagcgagactccgtctcaaaaacaaaaaaaaaaaagaaaagaaatatattttattcattcacattaggtcactgtcatactgtcataggctgagagagttcttcaaaaattatgttttcccaagatcagttgcttatagataatgttcaatgacctcaagacatatatttttgagaaattatcattttaaaaaatttggtctatactgattgttttcactgattccaatattattacttataacactgacctctggaaaatattttgttcacaagaaataataaagtataatgatttgttgcatc

SEQ ID NO: 6361 - DNA, 708 bp, Homo sapiens
  SIMILAR (88)..(261): 961254mologous to Homo sapiens delta 4-3-oxosteroid 5 beta- reductase,accession number Z28339,Smith-Waterman Score=301.
atgagttttggaggggacaaaaataatcaaaccatagcaaatgaaaaatcagtgttcagggaacaggatatgctcattcttatgtttaacacccctaagggagcctgtgcaacatcggtgaaggttgctattgacacagggtaccgacatattgatggggcctacatctaccaaaatgaacacgaagttggggaggccatcagggagaagatagcagaaggaaaggtgcggagggaagatatcttctactgtggaaagatgcaggtgtcagctgtacagagtgagaggacagtgcacacaagacagccaggagatgaaatataccctagagatgagaatggcaaatggttatatcacaagtcaaatctgtgtgccacttgggagacaccagttgcaagttcaggcctccagaaacttctgaccaatcagcttcaagttggggtttccgcagccccctcttcgggttcagttaatttgctagagcagttcacagaactcagggaaacatttacaggtttttgcatttctgacaatggatggccccacctggacctgccaaccagtcctgtggccccaacccaggaacttacccaccataagagggcagctttgattccctatgatttcatctctgacccaaccaatcagtatgcccctaccttaggcccctgctcatcaaaagatcctgggaaaaaccctaatctttga

SEQ ID NO: 6362 - DNA, 638 bp, Homo sapiens
  SIMILAR (326)..(201): 601254mologous to Mus musculus Pro-Pol-dUTPase polyprotein,accession number Y12713,Smith-Waterman Score=113.
ggattttttacgagattacaatctagaaacttattggcaatcagatgggtcccagcctcatttagtgaacatccaattcagaagaaaaacaacagtgaagacattatgtatttatgcagactacaaatctgatgaaagctatactccaagcaagatctcagtcagagtaggaaataattttcacaaccttcaagaaattcgggtggcagcgttcctccctctgaaactaagacgtctaggccagcagaacgtaatgtcgtgggaacaggaagcaaaaatgttgccagtggatcaccaggggtgatggtggtaccattttcacttccaccccttgattcctggaactgtgaatcctggctatgggagaaactgtaccatatattggaccctgattcagagcatacacagccttctggagaactttgccccagtcctgcaaagtattgtcatctagttggcattgtgattgtgacttcaaaaggctattccaccattctgtctatccagctgcttcaggatgatggggaacatggtaatttgcctgagaaaagtgaagagtgtattgtagctttatttttaatagcgcaaacctggaaacaacccaaatatacgacagctgaatggataaacaatgtgtg

SEQ ID NO: 6363 - DNA, 912 bp, Homo sapiens
  SIMILAR (11)..(316): 551254mologous to Mus musculus Pro-Pol-dUTPase polyprotein,accession number Y12713,Smith-Waterman Score=231.
tcagtgaagtggggcctgttgagatattccttctaaagtgaaagataagttgctgcatttgacccatcttacaaccacgaaagagccacaatgcttagtgggcctatttggatttttggatgtaacacattcctcatttgggagtgttactctggcccatttattgagcgacctgaacagctgccagttttgaatggggtccagaacagaaggctctgcaacaggtccaggcagctgttctgctgctctgccacttgggccatatgacccagcagatccaatggtgcttgaggtgtcaatggcagatagggatgcatcaccccatgatccactagcaaaatttttgtttcctgttcccatgacattacattctgctctcctagaggtcttagttccagagggaggaacgctgccaccaggagacacaacaacaattccattaaattggaagttaagattgccacctagacactttgggttcctcctacatttaagtttacaggctgcaggctcaacaccatgtggaagctgccaaggcttggggcttccaccctctgaagcaacagcctgagatgtaccttgacctcttttagtcacgactggagtggctgggatgcaggacaccaagtcattagaccccatggctttgcagggtacaacacctgtggctgttttcataggctgatgctgagtgcctgtggtttttccaggcaaatggtgcaagctgtcaatggatctaccactctggggtctggaggatgacagccttcttcttacagctccactaggaagtgccccactggagattctgtgcgggggctccaacttcacattttccctctgcattgtcctagcagtttctccatgagggctccacccccgcagcaaacttctgcctgaacattcaggcat

SEQ ID NO: 6364 - DNA, 685 bp, Homo sapiens
  SIMILAR (10)..(162): 451254mologous to Homo sapiens Human secreted protein, SEQ ID NO: 6595,accession number G02514,Smith-Waterman Score=82.
atgagcctggtgcagtggctcacagctgttattctggcactttgggaggccaagatatggagagcagatggtcaacattctcctcataaccttccagggaatggaagatacccgttgaagccctcccaggtcacaaaacctaagccttgtgcctactggaaagaagaagcagtggagtccttgacagaagcagtggtgctggaacctggtgctaggcgctgggccaagcactttacatactgtgtgttatgtaatcttcacagcaatatgaggctcactgggttagaattaaaaagaggaaagcaggttacctcatggagaagagacagtgaccagatcatgcccagagtacctgaccatggaagaacctcatttgtcctttgccctgaacgtagtgcaggacagtggacctggaaccacagtcccccaaactttgaaacacttgaacattttaaggagaaactttgccttctaagaaaggggcactttctcaagaatgagagcagcgaggttaaaagcatgatgcgtagctttcctggcagcttgtactactttcaactctgggaccacatcctggaaaacgaagagtttatgaagtgtttagatggaaatatagttagttgggaagaagacgtctggcttgtcaacaagatcatcccaactgttgacaggacactgcgctgct

SEQ ID NO: 6365 - DNA, 1362 bp, Homo sapiens
  SIMILAR (1)..(633): 991254mologous to Homo sapiens osteoinductive factor OIF,accession number AF100758,Smith-Waterman Score=1079.
atgaagactctgcagtctacacttctcctgttactgcttgtgcctctgataaagccagcaccaccaacccagcaggactcacgcattatctatgattatggaacagataattttgaagaatccatatttagccaagattatgaggataaatacctggatggaaaaaatattaaggaaaaagaaactgtgataatacccaatgagaaaagtcttcaattacaaaaagatgaggcaataacaccattacctcccaagaaagaaaatgatgaaatgcccacgtgtctgctgtgtgtttgtttaagtggctctgtatactgtgaagaagttgacattgatgctgtaccacccttaccaaaggaatcagcctatctttacgcacgattcaacaaaattaaaaagctgactgccaaagattttgcagacatacctaacttaagaagactcgattttacaggaaatttgatagaagatatagaagatggtactttttcaaaactttctctgttagaagaactttcacttgctgaaaatcaactactaaaacttccagttcttcctcccaagctcactttatttaatgcaaaatacaacaaaatcaagagtaggggaatcaaagcaaatgcattcaaaaggtttgtcctcactggaatagacacttactccggatatgggtttgcctatactgcatgcaatgcttctgccaagactaccatcgtggactcacagaatgccttatccaccatcacagtatgccatacagcattgcctctgatgaaggcactcactttacggctaaagaagtgcagcaccaagattcatgggtccaggaatcaaggggtggaagtggaagtggaagtggcaccactcaccatcacccctagtgttccactagcaaaatttttgcttcctgttcccatggcattatgttctgctggcttagaggtcttagttccagagggaggaacactgccaccaggagacacaacaacaattccattaaactggaagttaagattgccacctggacactttgggcttctcctacctttaagtcaacaggctaagaagggagttacagtgttggctgggatgactgacccagactatcaagatgaaatcattctactacttcacaatggaggtaaggaagaatatgcatggaatagcagagattcattacggcttctcttagtattaccaagccctgtaagtaaggttaatgggaaactacgacagcccaatccaaacaggactacaaatggcccagatccttcaggaatgaaggtttgggtcgctccatcaggaaaaaaacacgaccccctgaggtgcttgctgaacgcaaagggaatacataatgggtag

SEQ ID NO: 6366 - DNA, 7715 bp, Homo sapiens
  SIMILAR (915)..(6986): 241254mologous to Homo sapiens mucin,accession number L21998,Smith-Waterman Score=975.
gtaggaggaacccaaagtgtccaggtggcaatcttaacttccagtttaaggagatcgatgttgtgtctcttggtggcagcgttcctccctctggaactaagacctctaggccagcagaatgtaatgtcgtgggaacaggaagcaaaagttttgctagtggatcattaggggtgatggtaagaaaatgtattcttattatctctttcaatgtctcatgtatagtaggttatagaaataaaccatttgaaaaatactaccaatggagatttgctgggctgcctcttaatggtcaccttttggtcaatatggctacagaagaagctgaagcatcaatatggagagcagatggtcaacattctcctcataaccttccagggaatggaagatacccgttgaagccctcccaggtcacaaaacctaagccttgtgcctactggaaagaagaagcagtggagtccttgacagaagcagtggtgctggaacctggtgctaggcgctgggccaagcactttacatactgtgtgttatgtaatcttcacagcaatatgaggaggaggaggaggaagcccccccccaagaagaagaagaagaagaagaaaaagaagaagagtagtaggaggaggaggaggaggaggaagaagaagaggaagaagaagaagaagaagaagaggaggaggaggaggcagcagcagcagcagcagctatgtaaagaagataaaactaaaaccaaaataaggcactttctcaagaatgagagcagcgaggttaaaagcatgatgcgtagctttcctggcagcttgtactactttcaactctgggaccacatcctggaaaacgaagagtttatgaagtgtttagatggaaatatagttagttgggaagaagacgtctggcttgtcaacaagatcatcccaactgttgacaggacactgcgctgctttgttcctgaaaatatgacaattcaagaaaaaagtacaactgtttcacaacagatagatatgaccactccatcccaaattactggagtaaaaccacaaaatactgcacattcctctacactattgtctcaaagcatacctatatttgcaactgattacacaaccatatcatattccaatacaacatctccacctctggaaacaatgactgcacaaaaaatcttaaagacactggtagatgagacagctacatttgcagtggatgttttatcaacttcatcagccatctctctgcctacccagagtatatccatagacaatactaccaattccatgaaaaaaacgaaatctccatcttcagaaagcacaaagacaacaaaaatggttgaagccatggctactgaaatctttcaaccacctacaccttctaatttcctatccacatccagatttaccaagaattcagttgtatctacaacttcagcaattaaatctcagtcggctgttacgaagacaacatctttattttcaactattgagtcaacatctatgtctacaacaccttgtctcaaacaaaaatccacaaatactggggcactccctatctccacagctggccaggagttcattgaatctacagctgccggaactgtaccttggtttacagtggaaaagacttcacctgcatctactcatgttgggactgcatcatcattcccacctgagcctgtgctcatctccacagctgctccagtagattctgtatttcctagaaaccagacagcatttccattggcaacaactgatatgaaaatagcatttacagtccattcattgactctcccaactaggcttattgagaccacacctgccccaaggacagctgaaacagaattgacatctacaaattttcaggatgtctctttacccagagtggaagatgccatgtctacttccatgtcgaaagagacctcctctaagaccttttctttcttaacatccttttcatttactgggactgagagtgtacagacagttattgatgctgaagctacacgtacagccttaactcctgaaatcacacttgcatctacagtggctgaaactatgctttcctccacaatcacaggacgagtttacacccagaatacacctacagctgatggacacttgcttactttgatgtccactagatcagcttccacatccaaggcacctgagtcaggtcccacatccacaactgatgaagctgcccatctgttctccagcaatgagaccatttggacttctaggccagaccaggccctgctggcatctatgaacacaaccaccatactcacatttgtgcctaatgaaaattttacatcagcatttcatgagaatactacttatacagaatatttatccgcaactaccaatatcaccccactgaaagcatctccagagggcaaaggtaccactgccaatgatgctactacagccagatatacaacagctgtatccaaattgacatcaccatggtttgctaatttctccatagtttctggaaccacatccataaccaatatgcctgaatttaaacttaccactttactactaaaaacaatacctatgtctacaaaacctgcaaatgaacttcctttgacaccaagggagactgttgttccatcagtagatataatatctactcttgcttgcattcaaccaaatttttctactgaggaaagtgcttctgagaccacacaaacagaaataaatggtgcaattgtatttggaggtacaacgacccctgtaccaaagtcagcaacaacacaaagattaaatgccactgtgacaagaaaagaagcaacttcccattatcttatgagaaaatcaactatagcagcagtggctgaggtttctccattttcaacaatgctggaagtgacagacgaatcagcacaaagggtgacagcttctgtcactgtttcctcttttcctgatatagaaaagctaagtaccccattggataataaaactgcaacaactgaggtgagagaaagttggcttttgacaaaattggtgaaaaccacacctaggagttcatacaatgaaatgacagaaatgtttaattttaaccacacctatgtagcacattggacttcagagacatctgagggaatttcagctggatctcccacttctgggagcacacatatattcggtgaacccctgggtgcttctaccacaaggatatcagaaaccagtttctccactacccctacagacaggacagctacgtccttgtctgatggtatcttacctccacagcctacagctgctcattcctcagcaacccctgtgcctgttactcatatgttctcattgccagttaatggcagttctgtggtggctgaggagactgaggttaccatgtctgagccttctacactggccagggctttttctacatctgtgctctcagatgtctcaaatctatcctcaactacaatgaccacagcattggtaccacctttggatcagactgcttccacaaccattgttattgtgcctacccatggagacttgattcgtaccacttcagaggccacggtaatctctgtcaggaagacatccatggcagttccttctctgacagaaacaccatttcattcactgagactctccactcctgtgacagctaaggctgagaccacccttttctctacctcagttgatacagtaaccccatctacacacactcttgtctgctcaaaacctccccctgacaacattcctcctgcgtcctccactcatgtgatctcaactacgtctacaccagaagcaactcaaccaatatctcaagtagaggagacttctacctatgctctcagcttcccatatactttcagtggtggtggagttgttgccagcttggctactggcaccacagagacctctgttgttgatgagaccacaccctcacacatctctgccaataagttgactacttcagtaaacagtcacatttcttcatctgccacatatcgtgtacacacaccagtgtccatccagttggtgactagcacctctgtcttatcttccgacaaagaccagatgaccatatccctgggaaaaacccctagaactatggaggtgacagaaatgtccccatcaaagaattcttttatttcatactcccggggtactccatctttggaaatgacagatacaggatttcctgagaccacaaaaatttccagtcaccaaacacattcgccttcagagattccacttgggactccctctgatggaaatttggcttcatctcccacttctggaagcacacagattacaccaaccttgacctcaagtaacacagtaggtgttcacattccagaaatgtctaccagtcttgggaaaacagctctcccctcacaagctctgacaatcaccacttttttgtgtcctgaaaaggaaagcacgagtgcccttccagcatatactcccaggactgtggaaatgatagtaaactccacctatgtgactcactctgtctcatatggccaggatacttcatttgtagataccacaacttccagctcaacaaggatatcaaatcctatggacatcaatacaactttttcacacttgcattcacttaggacacaacctgaggtgacttcagttgcctctttcatttctgaaagcacacagactttccctgagtccttgtctctttccacagctggactatataatgacggttttacagttctctccgacaggatcactacagccttttctgttccaaatgtacctacaatgcttcctagagaatcctctatggcaacgtccactcctatttaccagatgtcctcattgccagttaatgtaactgccttcacctccaaaaaagtttctgacactcccccaatagtgataactaaatcttctaaaacaatgcatccaggttgtttgaaaagtccctgtacagccacttctgggcctatgtctgagatgtcctcaataccagttaataactctgctttcacacctgcaacagtctcttctgacacttccacaagagttgggttattctctactttattgtcttcagttacccccaggactactatgaccatgcaaacatctacattggatgtcacacctgtgatatatgctggggctacttcaaaaaacaaaatggtttcctctgctttcactacagaaatgatagaggcaccttccaggatcacacctacgacctttctctctccaacagagccaactttgccctttgtaaaaaccgttcccaccaccattatggctgggatagtgactccatttgtaggcaccactgccttctctccactcagttctaagagcactggagctatttcctccattccaaagaccacattttcaccatttctatcagcaactcaacagtcatcacaagcagatgaggctacaactttgggcatattatctgggattactaacaggtccctatctactgtgaacagtggtacaggggtagctctcacagatacttattccagaatcactgttcctgaaaatatgctttcacctactcatgcagatagtctccatacttccttcaatattcaggtttccccatctctgactagctttaagagtgcttctggacccacaaaaaatgttaaaacaaccaccaattgcttttcttctaatactagaaagatgacttccttgttagaaaagacttccttaacaaactatgccacatctttgaatacccctgtttcataccctccatggaccccatccagtgcaactctaccctctttgacatcatttgtttattcacctcatagtactgaagctgagatctctactccaaagacctctcctcctcccacatcccaaatggttgaatttccagttctgggaacaagaatgacatctagtaatacccaacctctgcttatgacttcctggaacatacccacagctgaaggttctcagtttccaatttccaccactattaatgtacctacatccaatgagatggaaacagagactctacaccttgttcctgggcctttgtcaacattcacagcctctcagactggtctagtatctaaagatgtcatggcaatgtcatcaattcctatgtcaggaattcttcctaaccatgggctttctgagaacccttcattatcaacatctttaagagctatcacttccacattggctgacgttaagcacacatttgagaaaatgaccacatctgtaactcctgggaccacactcccatcaattctttctggtgccacttcaggatctgtaatttcaaagtcacccattctgacatggctcttatctagtctcccttctggctcccctccggcaactgtatctaatgcccctcatgttatgacttcctctacagtagaggtgtcaaaatcaacatttctgacatctgacatgatatcagcgcacccattcactaacttgacaacactaccctctgctactatgagcaccatactcacccgaaccattcctacacctacactgggtggtatcactactggcttcccaacttctctccctatgtctataaatgtcacagatgacattgtgtacatttccacacaccctgaggcatcctccagaaccacaataactgccaaccccaggactgtgtctcatccttcatccttcagcagaaagactatgtcaccttctacaactgaccacactctatctgttggtgccatgcctctgcctagctctacaataacatcttcatggaacagaattccaactgcatcatcaccctctactttaattattcctaagcccacactggactcccttctaaatataatgactactacatccactgttcctggagcctcatttccactcatatccactggggtgacatatccttttacagcaactgtgtcttcaccaatatcgtccttttttgaaacaacttggctggactccacaccttcctttctatctacggaagcatcgacttcgcctactgccaccaagtccacagagcctggaaattgcaaagctgatgaaacagcctctaaatacaaagggacctataagtggctattaaccaaccctacggagacagcccaaaccagatgcataaaaaatgaggatggaaatgccacaagattctgttcaatcagcatcaacacgggcaaatctcagtgggaaaagccaaagtttaaacaatgcaaattgcttcaagaacttcctgacaagattgtggatcttgctaatattaccataagtgatgagaatgctgaggatgttgcagagcatattttaaatttgataaatgaatccccagccctgggtaaagaagagacaaagattattgtttctaaaatatcagatatttcacaatgtgatgagataagtatgaacctaactcatgttatgttacaaataatcaacgttgttttggaaaagcaaaacaattccgcctctgatctgcatgaaataagcaatgaaattctgaggataattgagcgtactggtcacaagatggagttttctgggcagatagcaaatctgacggtggccgggctggctttggctgtgctgcggggggaccacacgtttgatggcatggctttcagcattcactcctatgaagaaggcacagaccctgagtctcatttacctaccatggctccttcccatcatttcggctccaggcactttactcaggcctcagtggaggaactacagttctccctctaccggaggtgttga

SEQ ID NO: 6367 - DNA, 726 bp, Homo sapiens
  SIMILAR (259)..(567): 861254mologous to Homo sapiens PPAR gamma coactivator- 1,accession number AF106698,Smith-Waterman Score=471.
atgaatttggagtttgagaaagacatgatctttgtgttctggaatgggcattctagatttcacaagatagatgaagagaatgaggcaaacttgctagcagtcctcacagagacactagacagtctccctgtggatgaagacggattgccctcatttgatgcgctgacagatggagacgtgaccactgacaatgaggctagtccttcctccatgcctgacggcacccctccaccccaggaggcagaagagccgtctctaactgagaattcatggagcaataaagcgaagagtatttgtcaacagcaaaagccacaaagacgtccctgctcggagcttctcaaatatctgaccacaaacgatgaccctcctcacaccaaacccacagagaacagaaacagcagcagagacaaatgcacctccaaaaagaagtcccacacacagtcgcagtcacaacacttacaagtttgtttttataaatgtgccatatcttccagtgaccccaagggttccccatttgagaacaagactattgaacgcaccttaagtgtggaactctctggaactgcagagccagtgcaccactggactcacagaagatgctcatcactgatgttctataggtgtttctgggattcctgtgacaatataaaaggcaacaagtgcatagtgacaaatgccaaagagatgcagaaaccacaagatggaggactcgcctttggcaaataa

SEQ ID NO: 6368 - DNA, 531 bp, Homo sapiens
  SIMILAR (96)..(185): 581254mologous to Daucus carota glycine rich protein (AA 1 - 96),accession number X15706,Smith-Waterman Score=91.
atgacccttattgatcatgagtttaaaggagtgaagttgcagaccttcccggtgagtgttacagctcatgaaggcagtgtggacccaaagagactgggcgccgaggagcagggggcggcgctcatcggggaggctccggccgcacaggagcccacagtgggggtgggaggctcgggcatggcgggctgcaggtccggagccctgccccgcgggaaggcagctaaggctcggcgagaaattgagcgcagcgccgaacattttaatagaatatgtttaaaactcactgaaacactatttgaggcaagtaccctaggaagccagcaggaagcatgcccatctgtgcccttggagacaggcctgcagactgcacaccctaaagaaccctttacttgccctactgaacaaggtcttggaggcagccagcctgtcaaggtccagacaggatccacagctgccctagtacctggtaacaggtttgccaaacaaagaactaactgcagacccaccaaaagccgcatcaaccagctttga

SEQ ID NO: 6369 - DNA, 530 bp, Homo sapiens
  SIMILAR (92)..(136): 931254mologous to Homo sapiens Human secreted protein, SEQ ID NO: 7102,accession number G03021,Smith-Waterman Score=78.
atgaacaacttgagacgcgctgccttaagagctgtaacactcaccgcgaaggtctgcagcttcactcctgagccagcgagaccacgaaccccaccagaaggaagaaactccgaacacatccgaacatcagaaggaaaaaactccggacacgccgcctttaagaactgtaacactcaccgtgagggtccacggcttcattcttgaagtcagtgagaccaagaacccaccaattccagacacaaaactgagaggcggaggttgcaagggttcggtctcgctggctttaggagtgaagctgcagaccttcgccgtgagtgttacagctcataaaggcagtgtggacccaaagacccttgggtggtcgatgggactgggcgccgtggagcaggaggtggtgctcgtcggggaggctccggccgcacaggaaccaatggagtgggtgggaggctcaggcatgggggctgcaggtcccggagccctgccccgcgggaaggcagctaaggcccggcgagaaatcgagcacagcgccg

SEQ ID NO: 6370 - DNA, 649 bp, Homo sapiens
  SIMILAR (370)..(645): 561254mologous to Homo sapiens NAG13,accession number AF194537,Smith-Waterman Score=231.
atgaggggcttagcacctaggccagcggctgcggagggtgtgctgggtccccccatcagtgctggcccactggcgctgcgctcgatttctcgccaggccttagctgccttcccgcggggcagggttcgggacctgcagcccgccatgcctgagcctccccacgactccccgcctcttcccatcgaccacccaagggctgaggagcgtgggcgcacggtgccggactggcaggcagctccacctgcagccccagtgcgagatccactggatgaagccagctgggctcctgagtctgcttcactcctgagccaccgagaccacgaaccccaccagaaggaagaaacttcgaacacttccgaacataaggaacaaactccggacacgacgcctttaagaactgtaacactcacggcgagggtccacggcttcattcttgaagtcacactggaagtcctagccagagcaatcagagaagagaaagaaacaaagggcatccaaatcagtaaagaggaatttaaactgtcactgtttgatgctgatatgattgcttaccttgaaaaccctaaagactcctccagaaagctccaagaactgataaaagaattcagcaaagtttccagatacaaaattaatgtacacaaatcagtag

SEQ ID NO: 6371 - DNA, 990 bp, Homo sapiens
  SIMILAR (89)..(12): 841254mologous to Homo sapiens microtubule-associated proteins 1A/1B light chain 3,accession number AF183417,Smith- Waterman Score=110.
atggtgttttacactgacaatttcattccaattgtctcctgggagacacagaccatgtacaggaatccatcttcatccttctcactctgctacaatgctgtgtctgttcaccgccaggaggaaggcttgattagcactgagctggaaggaccttctaatgatcttgatgagctcactcaggttgatgtggtccagtacaaggaacattgctttatccaggacgggaagctgcttctcagccttgtatcgttctgttactaccaagattttgggtggatgctgctctcggagaagtcaaacttctactctttgttcaaagccattttcaatgtggatgactccgtggttgatctggagaccctggcagccttatatgaaaacctatttaaaactgtgctctcctgtaaatctgtcattgatcctacctctctcttgagttatggcgcagggacagtttctggtccagcagcccctggtagtctgcatcctagggcctgtcaggctagagatgatgagctgctggagcctttaacaggaggctattacgtggttatacgtaaaagcaggaacaagtacatcgtgttggaacacaaagaaggcccgtgtggctggagtttagtgggcaggaggggtgagtggtgtgagagaagactggaaaggcagaagtggttaaatcagtttgtacggcatgagtatgaggttggatttgattccaagaggaatgaagatgaaataacagagtgctgtgacctatgcggcaggtggagacaaaggaagaccaagagtggaagcagagaaacctgcttgatatgggccagaacacaccagcatccattgagtaaagtgcagactgcaaggcctctcaggaatttaagtactacctcacacctcctgagaacctggtttctggaggcagcccttgaaagacgactctattttgatcagcaggaaataatggggggaatgcggtatgaagaaattatccagtga

SEQ ID NO: 6372 - DNA, 927 bp, Homo sapiens
  SIMILAR (91)..(288): 771254mologous to Mus musculus formin, isoform IV,accession number X62379,Smith-Waterman Score=243.
atggtaggagatgagtttggaagtgtaattgaggcgaggcagggaatgagcttaacaaccaggccaaggagtttagacttcgccgagtgtttaaaggaagatattggagccattttcaatgtggatgactccgtggttgatctggagaccctggcagccttatatgaaaacagagcccaagaggatgagctggttaaaataagaaagtattacgagacatccaaagaagaagaactgaagctgctggataaacctgagcaccagctaaatcacaacaccgtcattcctgtgacctgttgcatgcagcaggatgaccctgctgccgggaaaagcagcgctgagatttgtgctgttggatacagccaaccctctcaatctagagatgaggcaagtgtagaaaatgaagcagaaatggagctatcagatcagggttaccagtcagccctagaaacttccaaggttctccggcttgcactggagttccatgccttgtcccttgggtcctctagaaacgggtccccaacccctgggccacagactggtaccagcccatggcctgttaggaaccaggccacacagcaggagatgggaccatctagttgcaggaagctagagggaccatcagggctcccactaatcctagattatgttctatatgttagaagtctgacatgggactcacaggctaaactcaaggtgctgacagggctgtactcccttttagaggctctagggagaatctgttccttgccttttccacttctagaggcttcccacattccttggctcacggcccacttcctccatcttcaaagccagcgacattacatctctctgatcattcttacgtcgttatatctccctctgatcatagccagggaaagtcctcagcgtttaaagactgactttaaagattcatgtgattag

SEQ ID NO: 6373 - DNA, 438 bp, Homo sapiens
  SIMILAR (70)..(288): 971254mologous to Homo sapiens Lymphocytic membrane protein LMPRO-1,accession number B01401,Smith-Waterman Score=366.
atgtctcttacctctgagctcagtgccctggtctacctggtttactactgcacagagcttggcacttgtggaaagacaaatggggacccagattgtgaagcctctgctcctgcgctgaccctgagctgcctggaggagcttagtcaggagaccaaggccaggatggaggaagaagcctacagcaagggattccaagaaggtctaaagaagaccaaagaacttcaagacctgaaggaggaggaggaagaacagaagagtgagagtcctgaggaacctgaagagatgaaattatgggtagccatccccatgaagaggcccaagacaaagagagttgactcgaagccctggagtgagtttcttacaagaacagggacagggaggacacacggaatagagggcaaactcagctcagtggcaaaggcctcatctccctcctga

SEQ ID NO: 6374 - DNA, 150 bp, Homo sapiens
  SIMILAR (7)..(120): 601254mologous to Bison bison Na-Ca+K exchanger,accession number AF025480,Smith-Waterman Score=129.
atgttggaaggagaccaaggagatgaaggacacgaaggagacgaaggagatgaagaagacaaagaagacgaagatgaagacgaagaaaaagaagaagaagaagaagaggaagaagaagaaagcatattgtgtctcattttaaactgctag

SEQ ID NO: 6375 - DNA, 1110 bp, Homo sapiens
  SIMILAR (1)..(942): 421254mologous to Mus musculus otogelin; MLEMP,accession number U96411,Smith-Waterman Score=676.
atgtggatcaattatacctatttttggaactatgaatgtgatgcactttctgcatatgtggctctgtgcaacaagtttgatatctgtattcagtggagaacacctgattactgctccctgagttgcccagaggggaaggaatatcaaccctgtgtgcgaccttgtgaagcaagaacatgcctgaaccaatggttctatggacacacttcctgtttgaatctaagagaagactgtgtgtgcaaagttggaactattcttcacaggccacattcagcccagtgcattccagagaaagagtgtgcatgcactgatagtgaagaccaaccccgcactgctggggagatttggaatgggggcattgatgaatgcactctatacaaatgtttggagaatggaagcattatccctatagaacctgactgtgatgaagagcccacgccagtttgtgaacgagaagctgaagttgtcatgggcatcattgataaatggacctgctgttcaaaggaagtttgtggatgtgacacgactttgtgtgaaactagcattccaacatgtacaaatagtcaaaaattgattgttggccacagtcctctttcttgctgtccacagtacaaatgtgaatgtgacccattgaaatgccccagtatttcaacaccagaatgcagagaagatcaattcatgattcaagttcgacaggaagaaccttgttgtttttcccctttttgtgtttgtgaatcttgcaccaaacctgttccactatgtcatgatggggaatttctcacagtagatcttaatagcacacacttctgttgtcctcagtattactgtggcaaacgagaagaaagaatatgccagaaagtgatcattaaatcggtcataaggaaacaggactgtatgagccaaagccctataaatgttgcatcttgtgacggcaaatgcccatcagctaccatatataacatcaatattgaaagtcacctaagattctgcaagtgttgtcgtgaaaatggagtacgaaacttgtctgtgcctctgtattgctcaggaaatggcactgaaattatgtacactctccaggaacccatagactgtacatgccagtggaattaa

SEQ ID NO: 6376 - DNA, 914 bp, Homo sapiens
  SIMILAR (102)..(731): 971254mologous to Homo sapiens KIAA1304 protein,accession number AB037725,Smith-Waterman Score=1027.
tgcccattgaaagcaaatttcggaacatctggataatgtccaccccgagccgattcaagaaggacaaagagatcatagccgagtatgaaagtcaagtcaaagaaattcgagctcaactggtagaacaacaaaaatgcctggagcagcaaacggagatgcgagttcagcttctccaggatctgcaagatttcttccgaaaaaaagctgaaattgagacggaatattcccggaatctagagaagttagcagaaaggttcatggcaaaaacaagaagcactaaggatcatcaacaatacaagaaagaccagaacctgttgtctccagtgaactgctggtatttgctcctgaaccaagtaaggagagaaagcaaagaccatgcaaccttgagtgacatctatctgaacaatgtgattatgcggttcatgcagataagtgaggattctaccaggatgtttaaaaagagcaaagagattgcattccaacttcatgaggatttaatgaaggttcttaatgagctttatacggtgatgaaaacataccatatgtatcatgcagagagcatcagtgcagagagcaagctgaaagaggccgaaaaacaagaggaaaagcaaattgggagatctggtgatccagtcttccatattcgactagaggagagacatcaacggcgaagctctgtaaagaaaattgaaaaaatgaaagaaaaagttattaaaaaggtggaaaatcagcattttcttatggttcaacttaacacatgttctcaagatgactattttgaagggaaactctcaggtgcgtggggaaagccaccagggccaccttcagctgaaccccaggaacctaacacagccacagtacctccctccaggtcacagcctctctttgggcaagctgtctctctggcggcttga

SEQ ID NO: 6377 - DNA, 162 bp, Homo sapiens
  SIMILAR (1)..(159): 921254mologous to Homo sapiens ribosomal protein L31,accession number X69181,Smith-Waterman Score=261.
atgcacaagcgcatccatggagtgggcttcaagaagcgtgcccctcggacactcaaagagattcagaaatttgccatgaaggagatgggaactccagatgtgcgcactgataccaggctcaacaaagctgtctgggccaaaggaataaggaatgtcccataa

SEQ ID NO: 6378 - DNA, 1086 bp, Homo sapiens
  SIMILAR (373)..(705): 811254mologous to Homo sapiens REC8,accession number AF132734,Smith-Waterman Score=404.
tgcgataccccaattgacgccttagttgccggcttgtaaataccgggtcgacccacgcgtccgggcgccttctccttgcttctgggggtcgaggccttgctcccgctgagcgggaaaagaatccaggcccttccacgcgcgtgtgggtgcgggggccccgaagagctcgaggttccccgctaggtctccgctggggcaggaaccggaatcatgggtgggaccaccaagcacccgccgggtcaccttcgaggcggacgagaatgagaacatcaccgtggtgaagggcatccggctttcggaaaatgtgattgatcgaatgaaggaatcctctccatctggttcgaagtctcaagcggtattctggtgcttatggtgcctcagatgctattaactgagtacttggatatgaaaaatactcgtacggcctctgaaccatcagctcaactaagctatgccagcactggacgagagtttgcagccttttttgccaagaagaaacctcaaaggccaaaaaattctcttttcaagttcgaatcgtcctcccatgccatcagtatgagcgcctatctgcgagaacagagaagggagctctatagtcggagtggagaactgcaaggagaagaggctaggctgccaagagtgaaaggaaatgatgataacagaacatacattattgcaggaggtttccagctggagaggaagccactttttctgagcacatggctgagtaaagagcaaggaagcagaatgcccagatggaatcagggctatgccagcaagcacaaagatagtagaaggaaaaggctttaccgcgaatcgacgagttacgaaaagcctggtaaagtgaaagcatacaaatgtgctgtgccacgttatctgaatgcctatcaccagagtgccccctacctacacattagacgtgtgtacccagaagtcaatgattgttccttgactgtgtctaaccgacagtacatcaagagaaggcatggatggctgatccaaactgggtcaccacagatcctccaacctcggaaattggatttgggcccaaatgatgacagcttagcccttgctgacctaccgtaa

SEQ ID NO: 6379 - DNA, 1245 bp, Homo sapiens
  SIMILAR (406)..(1242): 931254mologous to Homo sapiens putative p150,accession number U93572,Smith-Waterman Score=1345.
atggcacaagaactacgtgacacatgcacaagcttcagtagccgattcgatcaagtggaagaaagggtaatggtgattgaagatcaaattaatgaaatgaagcaagaagagaagtttagagaaaaaagagtaaaaagaaacaaacaaagcctccaagaaatatgggactatgtgaaaagaccaaatctacgtctgattggtgtacctgaaaaaaatctagaagaaacggataaattcctggacacatacaccctcccaagactaaaccaggaagaagttgaatctctgaatagaccaataacagactctgaaattgaggcaataattaatagcttaccaaccaagaaaagttcaggaccagatggattcacagctgaattctaccagaggtacaaggaggagctgcctggcagagacacaacaaaaaaagagaattttagaccaatatccctgatgaacatcgatgcaaaagtcctcaataaaatactggcaaaccgaatccagcagcacatcaaaaagcttatccaccatgatcaagtgggcttcatccctgggatgcaaggctggttcaacatacacaaatcaataaacgtaatccagcatataaacagaaccaaggacaaaaaccacatgattatctcagtagatgtagaaaaggcctttgacaaaattcagcagcccttcatgctaaaaactctcaataaattaggtattgatgggacatatctcaaaacaataagagctatttatgacaaacccacagccaatatcatactgaatgggcaaaagctggaagcattttctttgaaaactggcacaagagagggatgccctctctcaccactcctattcaacatagtgttggaagttctggccagggcaatcaggcaggagaaagaaataaagggtattcaattaggaaaagaggaagtcaaattgtccctgtttacagatgacataattgtatatctagaaaaccccatcatctcagcccaaaatctccttaagctggtaagcaacttcagcaaagtctcaggatataaaatcaatgtgcaaaaatcacaagcattcttacacaccaataacagacaaacagagagccaaatcatgagtgaactcccattcacaattgctacaaagagaataaaatatctaggaatccaacttacaagggatgtgaaggacctcttcaaggggagctacaaaccactgctcaacgaagtaaaaaaggacacaaacaaatag

SEQ ID NO: 6380 - DNA, 2118 bp, Homo sapiens
  SIMILAR (1330)..(2115): 471254mologous to Mus musculus arylacetamide deacetylase,accession number AF306788,Smith-Waterman Score=637.
atggggagaaaccagagcagaaaagctgaaaattctaaaaatcagagtgcctcatctacaccaaaggatcacagcgcctcgccagcaacggaacaaagctggatggggaatgactttgatgagttgacagaattaggcttcagaaaatcggtaatgacaaacttctcccagctaaaggaggatgttcgaacccatcacaaagaagctaaaaacctagaaaaaagattagacaaatggctaactagaataaacagcatagaggagaccttaaatgacctgatggagctgaaaaccatggcacgagaactacgtgacacatgcacaagcttcagtagccgattcgatcaagtggaagaaggggaaatacaaactaccatcagagaatattatgaacacctctacgcaaataaactagaaaatctagaagaaatggataaattcctggacacatacactctcccaagactaaaccaggaagaagttgaatccctgaatagaccaataacaggttctgaaattgaggcaataattaatagcctaccaaccaaaaaaattccagggccagacagattcacagccaaattctaccagaggtacaaagaggagctgagtaacctgatccactacctgggactgagccatcacctgctggcactgaattttatcattgtttcttttggcaaaaaaagcgcgtggtcttctgcccaagtgaaggtgaccgacacagactttgatggtgtggaagtcagagtgtttgaaggccctccgaagcccgaagagccactgaaacgcagcgtcgtttatatccacggaggaggctgggccttggcaagtgcaaaaatcaggtattatgatgagctgtgtacagcaatggctgaggaattgaatgctgtcattgtttccattgaaagacaggctgtctggagccagcagctccttgccttgaggccctctagagtgggtagtggcgtcatggctttgctattctttcatgtggattatggcactggggaaggtttttatctgaggaagctgggacatagctttgagcaccagcagcagagagcagatatatttatgtatgctttatttggctgtaccacccatgaatttcctcctgattcttggctttctgtgtctagatattacaaaattttgatatacttcttaggtgaatttcaagctactttgaaagttcatcttatgccaggtgtacagagtaggattccaaaggactctgatcttgcgaagtggggccagttggagaagccccagaagtatccccgagggcctgctctaggccgtctggaaaacttagcttcccttttatacaggctagttccaaaggtttattttcctgagcaaattcatgatgttgtacgggccacaaagtatttcctgaagccagaagtcttacagaagtatatggttgatccaggcagaatttgcatttctggtgacagtgctggtggaaatctggctgctgcccttggacaacagtttactcaagatgccagcctaaaaaataagctcaaactacaagctttaatttatccagttcttcaagctttagattttaacacaccatcttatcagcaaaatgtgaacaccccaatcctgccccgctatgtcatggtgaagtattgggtggactacttcaaaggcaactatgactttgtgcaggcaatgatcgttaacaatcacacttcacttgatgtggaagaggctgctgctgtcagggcccgtctaaactggacatccctcttgcctgcatccttcacaaagaactacaagcctgttgtacagaccacaggcaatgccaggattgtccaggagcttcctcagttgctggatgcccgctccgccccactcattgcagaccaggcagtgctgcagctcctcccaaagacctacattctgacgtgtgagcatgatgtcctcagagacgatggcatcatgtatgccaagcgtttggagagtgccggtgtggaggtgaccctggatcactttgaggatggctttcacggatgtatgattttcactagctggcccaccaacttctcagtgggaatccggactaggaatagttacatcaagtggctagatcaaaacctgtaa

SEQ ID NO: 6381 - DNA, 843 bp, Homo sapiens
  SIMILAR (346)..(840): 701254mologous to Homo sapiens p40,accession number U93567,Smith-Waterman Score=567.
atggcaaagccagttcagctccagaaaaacacacaaaaggagtgcgttttcacagatgttctcaatgatcttggtggtctctgtcccataggagcaccctacttagacctgctctttccccttgaaccacagtctgaatcgaagtcccaggccccactggctggtaaagcaaggatcacagctccttgccagcaatggagcatgactgatgagttgacagaagtaggcttcagaaggtcagtaataacaaacttctctgagctaaaggagaatgttcaaacccattgcaaggaagctaaaaaccttgaaaaaagattagacgaatggctaactagaataaacactgtagagaagaccttaaatgacctgatggagttgaaaacaatggcacgagaacttcgtgattcatgcacaagcttcaatagccgatttgatcaagtggaagaaagggtatcagtgattgaagatgaaattaatgaaataagattcaccaaggttgaaatgaaggaaaaagtgttaagggcagccagagagaaaggtcgagttacccacaaaggaaagcccatcagactaacagtggatctctcagcagaaaccctacaagccagaagaaagtgggggccaatattcaacattcttaaagaaaagaattttcaacccagaatttcatatccagccaaactaagcttcataagtgaaggagaaataaaatattttacagacaagcagatgctgagagattttgtcaccaccaggcctgcgttacaagagctcctgaaggaagcactaaacatggaaagaaacaaccggtaccagcccctgcaaaaacaggccaaattgtaa

SEQ ID NO: 6382 - DNA, 2112 bp, Homo sapiens
  SIMILAR (1417)..(2061): 581254mologous to Homo sapiens p40,accession number U93564,Smith-Waterman Score=585.
atgcgtgcatttgtggttttgatggatgtctccaaattgccctctgaaagaggcggtcctggtttacgttccaaccagcagcatatgcgaatgtttctcaccagtgtggacagaggctccgtgtccttgctggctgatgctgtggccgctgccacacctcaaggcaccaagtcccagccccgtggcccctccaacctggcagccgacctcagggtggcagaagaatcttctggtatggagaacctctttttaaagatgtcatttgactccatcaggcctgcccaggatggtcagtgcacaccggagatctcgatggtcaccccctccccaggatggtcagtgcacactggagatctcgatggtcaccccctccccaggatggtcagtgcacaccggagatctcgatggtcaccccctccccaggatggtcagtgcacaccggagatctcgatggtcatcccctccccaggatgctcagtgcacaccggagatctcgatggtcaccccctccccaggatgctcagtgcacaccggagatctcgatggtcaccccctccccaggatgctcagtgcacaccggagatctcgatggtcaccccctccccaggatggtcagtgcacaccggagatctcgatggtcaccccctccccaggatggtcagtgcacaccggagatctcgatggtcaccccctccccaggatgctcagtgcacaccggagatctcgatggtcaccccctccccaggatgctcagtgcacaccggagatctcgatggtcaccccctccccaggatggtcagtgcacaccggagatctcgatggtcaccccctccccaggatggtcagtgcacaccggagatctcgatggtcaccccctccccaggatggtcagtgcacaccggagatctcgatggtcaccccctccccaggatgctcagtgcacaccggagatctcgatggtcaccccctccccaggatgctcagtgcaccgtggagatctcgatggtcaccccctccccaggatggtcagtgcacaccggagatctcgatcgtcaccccctccccaggatgctcagtgcacaccggagatctcgatggtcaccccctccccaggatgctcagtgcacaccggagatgtggggaccctaccaagatgagatgatggagtcccagctcctgaaatccagagcctggtgcgtcccaaagcaaggaaaggcgtctgcggtcacagtcaacgcggactccagtgccagccgagggaaaggggtcttccctgcagagagccgcacccacctccccctcaaccggggccagcgaaactcagaatcttacctgggaacacaagctcagggaatacgaaacttaattaaggccaggaagctcagtgaaccaccgagctgggttctgcataaagatggcgagaaacagagcagaaaagctgaaaattctaaaaatcagagcacctcttctcctccaaaggaatgcagcttctcgccagcaatggaacaaagctggatggagaatgactttgacaagttgacagaagtacacttcagaagatcggtaataacaaacttctccaagctaaaggaggatgttcgaacccatcgcaaagaagctacaaaccttgaaaaaagattagacgaatggctaactagaataaacagcatagagaagaccttaaatgacctgatggagctgaaaactatggcacgagaactacgtgacacatgcacaagcttcagtagccaattcgatcaagtggaagaaggggtatcagtgattgaaaatcaaatgaatgaaatgaagcaagaagagaagtttagagaaaaaagagtaaaaagaaacaaacaaagcctccaagaaatatgggactatgtgaaaagaccaaatctacgtctgattggtgtacctgaaaaaaatctagaagaaacggataaattcctggacacatacaccctcccaagactaaaccaggaagaagttgaatctctgaatagaccaataacagactctgaaattgaggcaataattaatagcttaccaaccaagaaaagttcaggaccagatggattcacagctgaattctaccagaggtacaaggaggagctg

SEQ ID NO: 6383 - DNA, 651 bp, Homo sapiens
  SIMILAR (67)..(192): 661254mologous to Rattus norvegicus myosin heavy chain Myr 8b,accession number AY004215,Smith-Waterman Score=150.
atggcacgagaactacgtgactcatgcacaagcttcagtagccgatttgatcaagtggaagaaagggtgtcccagctgtatttcagctcctcagggaagctgtgttcctcgctgcctcctcacctcttctcctgtgtggagagagcctttcaccagctcttccgggaacagcggcctcagtgtttcatcctcaggctcaaggatgagaaagacgccgagacaggggctctcacccattctagacacaaggatgagaagggcgtcaaggtgggggctccaacccattctagacacaaggatgagaaaggcaccgaggcaggggcttccacccattctaaactcaatgatgagaaaggctctgagacacgggctctcatccattctagacacaaggatgagaaaggcactgaggcgggggctccaacccattctaaactcaaggatgagaaaggcgctgagacaggggctctcacccattctagacatgaggatgagaaaggctctgagacaggggctctcacccattctagacacaaggatgagaaaggcgctgagacaggggctctcacccattctagacacgagggtgataaagatgctgagacaggggctctcatccattctaaactcaaaggaagagaaagacgctga

SEQ ID NO: 6384 - DNA, 1542 bp, Homo sapiens; identical to SEQ ID NO: 5640
  SIMILAR (1497)..(1541): 931254mologous to Homo sapiens putative p150,accession number U93563,Smith-Waterman Score=76.

SEQ ID NO: 6385 - DNA, 1662 bp, Homo sapiens
  SIMILAR (768)..(4): 661254mologous to Homo sapiens p40,accession number U93567,Smith-Waterman Score=781.
ttatttaagaatgttgaatactggcccccactctcttctggcttgtagagtttctgccgagagatccactgttagtctgatgggcttccctttgtgggtaacccgacctttctctctggctgcccttaacattttttccttcatttcaactttggtgaatctgacaattatgtgtcttggagttgctcttcttgaggagtatctttgtggtgttctctgtatttcctgaatttgaatgttggcctgccttgctaggttggggaagttctcctggataatatcctgcagagtgttttccaacttggttccattctccctgtcactttcaggtacaccaatcaggtgtagatttggtcttttcacatagtcccatatttcttggaggctttgcttttgtttctttttactcttttttctctaaacttctcttcttgcttcatttcattcatttggtcttcaatcactgataccctttcttccagttgatcgaatcggctactgaagcttgtgcatttgtcacgtagttctcgtgccatgtttttcagctccatcaggtcatttaaggacttctctacattggttattctagttagccatttgtctaatctttttttcaaggtttttagcttccttgcaatgggttagaatatgctcctttagcttggacaagtttgttattactgagcttctgaagcctacttctgtcaactcatcaaagtcattttccatccagctttgttctgttgctgtcgaggagctgcggtcctttgtgagctgtctgttggcccctactgggaggtgtctcctagttaggctgttaaaccagtcatctgtgtaccgagggtaaggataggggtcgttgctgctgaagtcgtaacttgcttcggcattaacagggacatagtgttgcagatcagaaatgcccctgtgaggcatctgagctacaggcttggggcagctccatcctgcattcccttgatccccagtggagagcagggagcggaggttggtgaggatgtgacgctgagaactagctgacttctcctgttgtgtcctctttctttgatcaccgacagcaaaggtcacaaaatatggcccaccagctaaatcagcccatggcctgtttttgtaagtaaagttgtatcggaacacagccacatccatttgtttatgaattgccagtcgctgcttttgcactttggttccagccatggtgctgtgatagttggaggccaggtccgggtggagatagtcaatcccatcatccataattccaatggtaacacctttccctgtgtatcccagctcccaggcttcagccacattcaaatcaaggccaggagtgccatcagcttgcccagtattgatcagataccactgctttgtaaaaagaggatcgttcatgttgatgtcgatctcattgatgtctctgtaacctcgcttttttcggtcaaatccttcctgctgcaaagccatctttacctctgggccctggcctgggtcatccttgtcactgttatcttcctggggagggtagaggatctgaggcatttctggggtgtgctcacagagatgcactgccttcccattattatcaacatccctgctggagcacagcgtgcatttgttacgcgtgctgaaccgacactgacacatcgtcat

SEQ ID NO: 6386 - DNA, 894 bp, Homo sapiens
  SIMILAR (501)..(304): 511254mologous to Homo sapiens Human secreted protein fragment encoded from gene 42,accession number Y07785,Smith- Waterman Score=161.
tagtggtagaaagacaggaacattgtttctcacttcataccgggtaatttctacttctactttaatctgctgattaactctacatttgttttccttgaaatgaagaaaacttaaacattgacttttgaagtgtttttaaacgtgcgctttgggattttccacactatgaaggcccgcctgtgggatacagagcctcacctgtgcgatatggagccccacctcttggatatggaaccccacctctcggatatggagccccacctctcggatatggagccccacctgcaggaaatgaaggcccgcctgcgggatacagagcctcacctgctggatcaggagccaggcctcaggaatccagggaaaaggtggtgcccagaagcttggagatgccaggaaccatagggccccaaagagggagtcacagccctggcttggagagctcccaggtctgggcttcccaaagggctgcagctcttcttttcttctctttgcccacaacatgttgagcaaggggcatgtctcaaccctgtttgtgttacaggtcttttagcctcatttccaggaagctctcaccccaacttggaaggggggggtctcgcgcttgtccctggcttttgccttctccatggagcatgcagccctggccatgcctagttgctgcagccagcgtgatggcagcagctgctccagatggcctgctgctgccatcattaatatgtagttatttagcacagtcggtgagtctcttttttgtctgttaaattctgttgctataatttaatatctatgacagtcaatagttatagataggtagtgcatgcccctgactgtttttgttgaccattgttgtatgaccctcacattggaagtaattaacatatatattacctgtat

SEQ ID NO: 6387 - DNA, 240 bp, Homo sapiens
  SIMILAR (16)..(186): 331254mologous to Fagopyrum urophyllum transcarboxylase- beta,accession number AB000320,Smith-Waterman Score=68.
atggggtcgctgagaagatcaaatgagaccaagagcaatgctaagtgtggtcttagtaaacatgtgaacgagctctatgtcgatgacccagacaaggacagcggtggcaagatcgacgtcagtctgaacatcagtttacccaatctgcactgcgagtgtagtaggtactcaaaaaagtatttgttgagcaaatttggattgctaacagatgccaacactgtgctgctgacagcaaggtga

SEQ ID NO: 6388 - DNA, 1034 bp, Homo sapiens
  SIMILAR (157)..(195): 1001254mologous to Homo sapiens Human secreted protein (clone CC332-33),accession number Y21591,Smith-Waterman Score=70.
atgctttgtgaagtattattgagggaggagggggcaattataagtgccaattttgaagttccccagcggttcagtaaccaaggagctgacattgatgcatgtgttgataaagctgcaaacattcaaaatgagattaacaaagattttgagcaaagggaaggatatggagtaatagtactaaatcccaatgaaaacctatattgaagtagaaaagccgaagatacacgtacagtcatcatctgatagttcagatgaaccagcagaaaaacgggaaagaaaagataaagtttctaaagaaacaaagaagcgacgtgatttctatgggaagtatcgtaacccccaaagagaaaaagaaatgatgcaatcgtatatcagagtagatgccactgagagtgaaccaaagagttttatctttatgagtgaggatgctttgacaaatccacagaaactgatggttttaattcatggtagtggtgttgtcagggcagggcagtgggctagaagacttattataaatgaagatctggacagtggcacacagataccgtttattaaaagagctgtggctatatggctgcagggaccaaaaacatataacacaatacccaagtgccttcggatacctggaaagccttcccaggaagtagaatactatatctggggaaaatattcttcaaacacaaaggagagagaaataacaactttcccagacaaacaaaagctgagtgattttatccacaccagacgtgttctacaagaaatgctaaaggaagtcagagagtggggtaactgctccttacttgaacttacaactaaagcccctgtttttagtgttatggcctacccttacattccaaggttttccaagataactggtgccccaatttctgagtatttctggacttctatggcagtctttgtggaatcaggagacagagtgaccaatctctcagctacaaacaatgcagggaaggcagtaggacctgaatgcagctcatctactatgtggacactaagaaaaacctgttccaaag

SEQ ID NO: 6389 - DNA, 1131 bp, Homo sapiens
  SIMILAR (580)..(1131): 981254mologous to Escherichia coli 2,4-dienoyl-CoA reductase,accession number U93405,Smith-Waterman Score=929.
atgctagctgactgcaaaaactttgattcgtcagacctgatttccgacctcgcgggcgattgccaacgtcaacggcaaatcagctgcggtagtttgctcaaccggacacgccagcgctattgttcccgtcaatcggcccttgctgtcaaacaacggcgttgcacaaaaggcccagttccagagtacctgtttgaaatgttgatcggccatcgtttgcggatcgccattacggctgagaatgcaggcggtttcatcgaggataaacagcgcacactctcgcggtgccatatattcccaggcatcttccagcgcagcctgcccgagcgtcagcatcgctttcttacgccgataaatagaagcaaatgtcagttgatacgaaccctgctaagtaccctgtgtactccaaaatgtggtccaggattcaagcatcggattgttctgtgcaagagcagtgacctttctaagacattcccagctgcacaatgtccagaggaaagcaaacctcctgtccgcatccgctgcagtttgggccgctgccctcctcctcgctgggtcacaggagactggggccagtcgactctagagatccccgacctggtcgaagacggcgggacttttgccgaaacggtagagctggcgcaggccattgaagcggcgggcgcgaccattatcaacaccggcattggctggcatgaagcacgtattccgaccattgccacgcccgtgccgcgcggcgcatttagctgggtcacgcgcaaactgaaaggccacgtctcgctgccgctggtaaccaccaaccggattaacgatccgcaggttgccgacgatattctctcgcgcggcgatgccgatatggtatcgatggcgcgaccgtttcttgctgatgcggagctgctgtcaaaagcgcaatcgggacgagccgatgagatcaacacttgtattggctgcaatcaggcctgtctcgatcaaatcttcgttggcaaagtcacctcgtgcctggtgaatcctcgcgcctgccacgaaaccaaaatgccaatccttcccgccgtgcagaaaaaaaatctggcggtggtcggtgcgggacctgctgggctggcgtttgccattaacgcggcggcgcgtgggcatcag

SEQ ID NO: 6390 - DNA, 691 bp, Homo sapiens
  SIMILAR (2)..(139): 531254mologous to Homo sapiens , gene product,accession number M74509,Smith-Waterman Score=112.
atgcatctagctcctgtacgtggacgaccttctgctggaacactccacggcagtcgggtgcgcaaaagggatggatgccctgctctgggacctggtgcacaagaagaaagcggagatctgcagacagcagggactgatatcactgttgatagtgcagagaaaccctccataattaagttttctgtaaaagccttcatgttttctgagcagaatgtacgaggtgtgccatcccaaaaccagctgctaccctgtccttttaatagttgtgagcccttaaaagaaacaggaattgctcactcggggagctcagttgttggagacgtgagtcttgccgaagctcctggtcgaataaagcccttccttctttaacccggtgtctgaggggttttgtctgcggcctgtcctgctacaaggggtcatcctagagataatatggagtccaggagaagtaaatcacaatatgatctgtgtttccctcttttacacccttttcatctccaatgaagatgaaatcacatcaagataataaggtcagccagttggatatggtggaaagaaaatagagatcctctttgcaataggctatgctttgctctaaagaaagctcatgtttttctatatagacctttaaaaattctccccatgccactgtttcctcaaataattggccagctatgcagagctggttact

SEQ ID NO: 6391 - DNA, 786 bp, Homo sapiens
  SIMILAR (586)..(768): 591254mologous to Homo sapiens zinc metalloendopeptidase,accession number AF163762,Smith-Waterman Score =230.
atgtgccagctccataggcagcacgcttggcacggcgcgcccaaacatttccccttcgggcggcaaacgggaaacgcgcgcccactgcgcacacgccgtaccagtgaccacctttctcccagtacagtccaaaaaccccaactatgctactcttccttgccatctgagctattcatctgtattccttataatatcctttataataatgagtacatatcagtggtggcattagattttcataggagcacgaaccttattgtcaactacacatgtaagggatctaggttgcgtgctccttatgagaatccaatgcctaatgatctgagagatgccctgcccagagaggaggaatctagagaggcagtctggctacagcggctttgccaggctgtgatgggctctgcccagttcaaacttcctggtggctttatttataacgtgtggggaaaaccacctactcaagccccagaaatggcggacacctctccccccaccaagctggagcatctcaggtcaactttagactgctgtgctggcagcgagaatttcaaaccagtggatcttatcttgctggtctctgtggggtgtactccaaaatgtggtccaggattcaagcatcggattgttctgtgcaagagcagtgacctttctaagacattcccagctgcacaatgtccagaggaaagcaaacctcctgtccgcatccgctgcagtttgggccgctgccctcctcctcgctgggtcacaggagactggggccagctctctcccacaagagagaaataa

SEQ ID NO: 6392 - DNA, 1527 bp, Homo sapiens
  SIMILAR (1057)..(1374): 621254mologous to Homo sapiens zinc metalloendopeptidase,accession number AF163762,Smith-Waterman Score =412.
atggaaagtttggacacagagacaagcacatggggagaatgccacaggaagattagaggtatggtgccacaagtcaaagaacttgcagaagaaaagatacccacgcaaaaaaaaacagagcacaacgtccctctgcttattgtcgcggtcttctcgcctatgttccctttctccctatcctgtccaaccagggtagtcctcagagttccttatccattggggtacctttgtttcgtagacaaccctggtacacttgtacgttgccggggaatccgccttgcgcctgagttggctgtgggagtctctctcctcattcctattaggtctattccaggcatatcctcactcactgccggttggtatctcaatccagctgcattctttgttctggaatcattccaaacagggaaggatacttctgaactgaatcaaaaccaaaatcagagtatccagaaatccaagccaggtcaaaaacaaaaccaaagtatcaagcaatccaagtcaagtcaaaaacaaaaaccaaagtgccggtacaggcagaccgtgggtgatcaggccacgcttccactcaaatggagtgggcaagttccaaagactagtcttaccaagtttcagatgtccagactccaagtgccagttccttcccggtgttcagccactgcgttgatcgtccacgggggcctgccacgtgctcctctggcgaggcgttccaccaggccaattgcctacccaggagtgctctcaggatccgcatcggccaagctggctggagtgccccatagggatgctccacagggcaggcctaagccacctaaggggctgcctcgaccgtccgactgtctgttaatcacctcgcttcccggtcagggaaccaagaaatgtagcagaacaagccacgggcaaaacccctcagacaccgagttaaagaaggaagggctttattcggccaggagcttcagcaagactcacgtctccaacagccgagctcctatttcattcatttttatatctctccagtctagtgtagttcctgtaggagatctggaaatgtttctctgtactccaaaatgtggtccaggattcaagcatcggattgttctgtgcaagagcagtgacctttctaagacattcccagctgcacaatgtccagaggaaagcaaacctcctgtccgcatccgctgcagtttgggccgctgccctcctcctcgctgggtcacaggagactggggccagtgttctgctcagtgtggccttggacagcagatgagaactgtgcagtgtctctcctacaccggacaggcatctagtgactgtctagaaactgttcggcctccatcaatgcagcagtgtgaaagcaaatgtgacagtacccccatttctaatactgaaggtccgtcatcccaatatggttatgggaaacacatatttcgggcgtttagcaggaatccaccaacagttactatattggccctcactatgcctaggacaattaaaatagggcccgaccaaacgttaacaaccaattaa

SEQ ID NO: 6393 - DNA, 10175 bp, Homo sapiens
  SIMILAR (1)..(8736): 991254mologous to Homo sapiens fibrillin-2,accession number U03272,Smith-Waterman Score=16828.
atggggagaagacggaggctgtgtctccagctctacttcctgtggctgggctgtgtggtgctctgggcgcagggcacggccggccagcctcagcctcctccgcccaagccgccccggccccagccgccgccgcaacaggttcggtccgctacagcaggctctgaaggcgggtttctagcgcccgagtatcgcgaggagggtgccgcagtggccagccgcgtccgccggcgaggacagcaggacgtgctccgagggcccaacgtgtgcggctccagattccactcctactgctgccctggatggaagacgctccctggaggaaaccagtgcattgtcccgatttgtagaaatagttgtggagatggattttgttcccgtcctaacatgtgtacttgttccagtgggcaaatatcatcaacctgtggatcaaaatcaattcagcagtgcagtgtgagatgcatgaatggtgggacctgtgcagatgaccactgccagtgccagaaaggatatattggaacttattgtggacaacctgtctgtgaaaatggatgtcagaatggtggacgttgcatcggacccaaccgctgggcttgtgtttatgggttcactgggccacagagtgaaagagattacaggacaggcccgtgtttcactcaggtcaacaaccagatgtgccaagggcagctgacaggcattgtctgcacgaagactctgtgctgtgccaccactggacgggcgtggggccatccctgtgagatgtgtccagcccagcctcagccctgccgacggggtttcatccccaacatccgcactggagcttgccaagatgttgatgaatgccaggctatcccagggatatgccaaggaggaaactgtatcaatacagtgggctcttttgaatgcagatgccctgctggtcacaaacagagtgaaactactcagaaatgtgaagacattgatgagtgcagcatcattcctgggatatgtgaaactggtgaatgttccaacaccgtgggaagctatttttgtgtttgtccacgtggatatgtaacctcaacagatggctctcgatgcatcgatcagagaacaggcatgtgtttctcgggcctggtgaatggccgctgtgcacaagagctcccggggagaatgacgaaaatgcagtgctgctgtgagcctggccgctgctggggcatcggaaccattcctgaagcctgtcctgtcagaggttctgaggaatatcgcagactttgcatggatggacttccaatgggaggaattccagggagtgctggttccagacctggaggcactgggggaaatggctttgccccaagtggcaatggcaatggctatggcccaggagggacaggcttcatccccatccctggaggcaatggcttttctcctggcgttgggggagccggtgtgggggccgggggacagggacctatcatcactggactaacaattctgaaccagacaatagatatctgtaagcatcatgctaacctttgtttaaatggacgctgtataccaactgtctcaagctaccgatgtgaatgcaacatgggttataagcaggatgcaaatggagattgtatagatgttgatgaatgcacatcaaatccctgcactaatggagattgtgttaacacacctggttcctattattgtaaatgtcatgctggattccagaggactcctaccaagcaagcatgcattgatattgatgagtgcatccagaatggggttctttgtaaaaacggtcgatgcgtgaactcagatggaagtttccagtgcatttgcaatgccggctttgaattaactacagatggaaaaaactgtgttgatcatgatgaatgtacaactaccaacatgtgtttgaatggaatgtgcatcaatgaagatggcagcttcaagtgcatctgcaaaccaggatttgtcttggctccaaatgggcgttactgtactgatgttgatgaatgccagaccccaggaatctgcatgaatgggcactgcatcaacagtgaagggtccttccgctgtgactgtcccccaggcctggctgtgggcatggatggacgtgtgtgtgttgatactcacatgcgcagtacctgctatggaggaatcaagaaaggagtgtgtgtgcgtcctttccccggtgcagtgaccaagtccgaatgctgctgtgccaatccagactatggttttggagaaccctgccagccatgccctgcaaaaaattcagctgaattccacggcctttgtagtagtggagtaggtatcactgtggatggaagagatatcaatgaatgtgctttggatcctgatatatgtgccaatgggatttgtgaaaacttacgtggtagttaccgttgtaattgcaacagtggctatgaaccagatgcctctggaagaaactgtattgacattgatgaatgtttagtaaacagactgctttgtgataacggattgtgccgaaacacgccaggaagttacagctgtacgtgcccaccagggtatgtgttcaggactgagacagagacctgtgaagatataaatgaatgtgaaagcaacccatgtgtcaatggggcctgcagaaacaaccttggatctttcaattgtgaatgttcgcccggcagcaaactcagctccacaggattgatctgtattgacagcctgaaggggacctgttggctcaacatccaggacagccgctgtgaggtgaatattaatggagccactctgaaatctgaatgctgtgccaccctcggagccgcctgggggagcccctgtgagcggtgtgaactagatacagcttgcccaagagggcttgccaggattaaaggtgttacgtgtgaagatgttaatgagtgtgaggtgttccctggcgtttgtccaaatggacgctgtgtcaacagtaagggatcttttcattgcgagtgccctgaaggccttacgttggatgggactggccgtgtatgtttggatattcgcatggagcagtgttacttgaagtgggatgaagatgaatgcatccaccccgttcctggaaagttccgcatggatgcctgctgctgtgctgtcggggcggcttggggcaccgagtgtgaggagtgccccaaacctggcaccaaggaatacgagacactgtgcccccgcggggctggctttgctaaccgaggggatgttcttactgggcggccattttacaaagacatcaatgaatgcaaagcatttcctgggatgtgcacttatgggaagtgcagaaatacaatcggaagcttcaaatgccgttgcaatagtggctttgctctagacatggaggaaagaaactgcacggacatcgacgagtgcaggatttctcctgacctctgtggcagtggaatctgcgtcaatacaccgggcagctttgagtgcgagtgcttcgaaggctatgaaagtggcttcatgatgatgaagaactgcatggacattgacggatgtgaacgtaaccctctcctttgtaggggtggcacctgtgtgaacactgagggcagctttcagtgtgactgcccactgggacacgagctgtcaccatcccgtgaggactgtgtggatattaatgaatgctccctgagtgacaatctctgcagaaatggaaaatgtgtgaacatgattggaacctatcagtgctcttgcaatcctggatatcaggctacgccagaccgccagggctgtacagatattgatgaatgtatgataatgaacggaggctgtgacacccagtgcacaaattcagagggaagctacgaatgcagctgcagtgagggttatgccctgatgccagatgggagatcgtgtgcagacattgatgaatgtgaaaacaatcctgatatctgtgatggcggccagtgtaccaacattcctggagagtatcgctgcctctgctatgatggcttcatggcttccatggacatgaaaacatgcattgatgtcaatgaatgtgacctaaattcaaatatctgcatgtttggggaatgtgagaacacaaagggatccttcatttgccactgtcagctgggttactcagtgaagaaggggaccacaggatgtacagatgtggatgagtgtgaaattggtgctcataactgcgacatgcatgcctcatgtctgaatatcccaggaagcttcaagtgtagctgcagagaaggctggattggaaacggcatcaagtgtattgatctggacgaatgttctaatggaacccaccagtgtagcatcaatgctcagtgtgtaaataccccgggctcataccgctgtgcctgctccgaaggtttcactggtgatggctttacctgctcagatgttgatgagtgtgcagaaaacataaacctctgtgagaacggacagtgccttaatgtcccgggtgcatatcgctgcgagtgtgagatgggcttcactccagcctcagacagcagatcctgccaagatattgatgaatgctccttccaaaacatttgtgtctctggaacatgtaataacctgcctggaatgtttcattgcatctgcgatgatggttatgaattggacagaacaggagggaactgtacagatattgatgagtgtgcagatcctataaactgtgtcaatggcctatgtgtcaacacgcctggtcgctatgagtgtaactgcccacccgattttcagttgaacccaactggtgtgggttgtgttgacaaccgtgtgggcaactgctacctgaagtttggacctcgaggagatgggagtctgtcttgcaacaccgagatcggggtgggcgtcagtcgctcttcatgctgctgctctctgggaaaggcctggggaaacccctgtgagacatgcccccctgtcaatagcactgaatattacaccctgtgtcccggaggtgaaggcttcagacctaaccccatcacaatcattttagaagacattgacgaatgccaggagttaccaggtctctgccagggtggaaactgcatcaacacttttgggagcttccagtgtgagtgcccacaaggctactacctcagcgaggatacccgcatctgtgaggatattgatgagtgttttgcacatcctggtgtgtgtgggcctgggacctgctataacaccctgggaaattacacctgcatttgcccacctgagtacatgcaggtcaatggaggccacaactgcatggacatgagaaaaagcttttgctaccgaagctataatggaaccacttgtgagaatgagttgcctttcaatgtgacaaaaaggatgtgctgctgcacatataatgtgggcaaagctgggaacaaaccttgtgaaccatgcccaactccaggaacagctgactttaaaaccatatgtggaaatattcctggattcacctttgacattcacacaggaaaagctgttgacattgatgaatgtaaagagattccaggcatttgtgcaaatggtgtgtgcattaaccagattggcagtttccgctgtgaatgccctacaggattcagttacaatgacctgctgttggtttgtgaagatatagatgagtgcagcaatggtgataatctctgccagcggaatgcagactgcatcaatagtcctggtagttaccgctgtgaatgtgccgcgggtttcaaactttcacccaatggggcctgtgtagatcgcaatgaatgtttagaaattcctaacgtttgcagtcatggcttgtgtgttgatctgcaaggaagttaccagtgcatctgccacaatggctttaaggcttctcaggaccagaccatgtgcatggatgttgatgagtgcgagcggcacccatgtggaaatggaacttgtaaaaacaccgttggatcctataactgtctgtgctacccagggtttgaactcactcataataatgattgcctggacatagatgagtgcagttccttttttggtcaggtgtgcagaaatggacgttgttttaatgaaattggttctttcaagtgtctatgtaacgaaggttatgaacttaccccagatggcaaaaactgtatagacactaatgagtgtgtcgcccttcccggctcttgctctcctggtacctgtcagaatttggagggatccttcagatgcatctgtcccccagggtatgaagtaaaaagcgagaactgcattgatataaatgaatgtgatgaagatcccaacatttgtctttttggttcctgtactaatactccagggggcttccagtgcctctgcccccctggctttgtactatctgataatggacggagatgctttgatactcgccagagcttctgcttcacaaattttgaaaatggaaagtgttctgtacccaaagctttcaacaccacaaaagcaaaatgctgctgtagtaagatgccaggagagggctggggggacccctgtgagctgtgccccaaagacgatgaagttgcatttcaggatttgtgtccatatggccatggaactgtccctagtcttcatgatacacgtgaagatgtcaatgagtgtcttgagagcccaggcatttgttcaaatggtcaatgtatcaacaccgacggatcttttcgctgtgaatgtccaatgggctacaaccttgactacactggagtacgctgtgtggatactgatgagtgttcaatcggcaatccgtgtggaaatggtacatgcaccaatgttattgggagttttgaatgcaattgcaatgaaggctttgagccagggcccatgatgaattgtgaagatatcaacgaatgtgcccagaacccactgctgtgtgctttacgctgcatgaacacttttgggtcctatgaatgcacgtgcccgattggctatgccctcagggaagatcaaaagatgtgcaaagatctggatgaatgtgctgaagggttacacgactgtgaatctaggggcatgatgtgtaagaatctaatcggcaccttcatgtgcatctgccctcctggaatggcccgaaggcccgatggagaaggctgtgtagatgaaaatgaatgcaggaccaagccaggaatctgtgaaaatggacgttgtgttaacattattggaagctatagatgtgagtgtaatgaaggattccagtcaagttcttcaggcactgaatgccttgacaatcgacagggtctctgctttgcagaggtactgcagacaatatgtcaaatggcatccagtagtcgcaatctcgtcactaagtcagaatgctgctgtgatggtgggcgaggctggggccaccagtgcgagctttgcccacttcctggaactgcccagtacaaaaagatatgtcctcatggcccaggatatacaactgatggaagagatattgatgaatgtaaggtaatgccaaacctctgcaccaatggtcagtgcatcaataccatgggctcattccgatgcttctgcaaggttggctacaccacagacatcagtggaacctcttgtatagaccttgatgaatgctcccagtccccgaaaccatgcaactacatctgcaagaacactgaggggagttatcagtgttcatgtccgagggggtatgtcctgcaagaggatggaaagacatgcaaagaccttgatgaatgtcaaacaaagcagcataactgccagttcctctgtgtcaacaccctgggggggtttacctgtaaatgtccacctggtttcacacagcatcacactgcttgtatcgacaacaacgaatgtgggtctcaacctttgctttgtggaggaaagggaatctgtcaaaacactccaggcagtttcagctgtgaatgccaaagagggttctctcttgatgccaccggactgaactgtgaagatgttgatgaatgtgatgggaaccacaggtgccaacacggctgccagaacatcctgggtggctacagatgtggctgcccccaaggctacatccagcactaccagtggaatcagtgtgtcgatgagaatgaatgctccaatcccaatgcctgtggctctgcttcctgctacaacaccctggggagttacaagtgcgcctgcccctcggggttctccttcgaccagttctccagtgcctgccacgacgtgaatgagtgctcgtcctccaagaacccctgcaattacggctgctctaacacggaggggggctacctctgtggctgcccccctgggtattacagagtgggacaaggccactgtgtctcaggaatgggatttaacaaggggcagtacctgtcactggatacagaggtcgatgaggaaaatgctctgtccccagaagcatgctacgagtgcaaaatcaacggctatcctaagaaagacagcaggcagaagagaagtattcatgaacctgatcccactgctgttgaacagatcagcctagagagtgtcgacatggacagccccgtcaacatgaagttcaacctctcccacctcggctctaaggagcacatcctggaactaaggcccgccatccagcccctcaacaaccacatccgttatgtcatctctcaagggaacgatgacagcgtcttccgcatccaccaaaggaatgggctcagctacttgcacacggccaagaagaagctcatgcccggcacatacacactggaaatcactagcatccctctctacaagaagaaggagcttaagaaactggaagagagcaatgaggatgactacctcctaggggagcttggggaggctctcagaatgaggctgcagattcagctctattaaccgttcacagacttgggcccaggctcaaatcctagcacagccagtctgcagaagcatttgaaaagtcaaggactaattttaaagaggaaaaataataataactcttgtttctttcctccctgtcttagactttgaatgttgaccctcacagggagggataatttagactctggtatggccaaagatttgagctcaaaggcaaccgtggttactgtattttttatataacttcattttaaaatatattaaaagaaacctaaatgttcaagatatcagcatatggcactaaatgcacaaaaataatgtgagcttttttttttttttcctgttagcagtctgtaacactttgggtattttgctatagttgctaattaaaaaaatatagatgtttatttatttttaatgcagtaatatatggagaaatgaacaaactatgtaaacaaaaagggaaactcacttgtttttctttagatttataaatttgagctattttttttagaggtgctttttaaaaatccaatagatacaagagatgtttcctttggttttctgccagtcatccagctgatacacacctgatcgattttaaagaaagccacacagagctgaatcgggcagtgctaatcaataatttaaaagacatgaatgtcattagatcctttataacgtagatcgaagccaaagcagctcatttgtgacaacatttcatatcaccagacacaccaggcaacagaagttgaagcacaaccactgtagcaaaataccttgactgcttgtgagaccattagcattgcaggccaaaccgtactgtatttccttctcataacctcaaggaaccatatgtgctacccacaacacctcattcttacccagggtgcgctgcgtcctcatggtactgtaggcagctgaagaaccgccgttcccttgaaagggaacacctggcattctgtggtgtttcgtgctgtcttaaataatggtgcatttattatgttcaagttatttcaggattgccatatgtgcaaacaaatcatgcaatgcagccaaggaatatatgttgttgttgttgttttaaacccattttttttttagaattttcattaatactgtagttatacaccatatgcctcattttatcatagcctattgtgtatgaaagatgtttgtacaatgaattgatgtttagtttgctttagtcatttaaaaagatattgtaccaggatgtgctattaagagcacgtatccattattcttctcaacccaagaacctgtttcctggaccagtgaccaaacctcatatgtgaaatggccaaagcacatgcaggctcctggttgttcctctcaaacctgtgctgaccaaagattagtaaccagttatacccagtattttgaggttttattgtttttttaataactaaaaaaaaactcgtgccgaattc

SEQ ID NO: 6394 - DNA, 645 bp, Homo sapiens
  SIMILAR (16)..(396): 621254mologous to Rattus norvegicus fibrillin-2,accession number AF135060,Smith-Waterman Score=444.
atggcactcctacctgttacctctggcaactctgccccaaggaagtgcagagctgctactggcccaagagcccaggcagttcagcagtgcagtgtgagatgcatgaatggtgggacctgtgcagatgaccactgccagtgccagaaaagatatattggaacttattgtggacaacattacaggacaggcccgtgtttcactcaggtcaacaaccagatgtgccaagggcagctgacaggcattgtctgcacgaagactctgtgctgtgccaccattggacgggcgtggggccatccctgtgagatgtgtccagcccagcctcagccctgccgacggggtttcatccccaacatccgcactggagcttgccaaggggctcaggcccagggagatccaaattctgtctctgagcctctggctggagttatcggagatcctgcaggaaggccccacccactgaggaaggatgggtcagggttagacctgaagaggcactctggcctcagactgccacagccagtgtgttgggctgtgaggacaagtcttgggaccaagccatccaacctccctggctccagcaggggaaaagcacagccgggagctatagaaatggatgcagcccttccccgtgcccagagagcttag

SEQ ID NO: 6395 - DNA, 552 bp, Homo sapiens
  SIMILAR (385)..(519): 1001254mologous to Gallus gallus gephyrin,accession number AF174130,Smith-Waterman Score=228.
atgaaaacagcgagtaaatcctatgccagcaacttgaggtatccaggttctctcactaggactgaccaggcagttggtgcaacccatggagtgaagctgcagaccttcacagtgagtgtcacagctcttaaaggtggcacggctggagttgttcattccttccagtgggttcgtggtcttgctggcttcaggagtgaagctgcagaccttcaccactcaggagcccagctggcttcacctagtggatcacacgccagggccgtgggtggagctgcccaccagacccacaccacgtgcccacactcagcccttgggcagtccatgggactgggcgctgtggagcagggggtggcacctgtcgtggcaggagcccacagtgggggtcacagtgctgtcgatatcaccaaggtggctagaagacatcgcatgtctccttttcctctgacatctatggacaaagcctttatcacagtcctggagatgactccggtgcttgggacagaaatcatcaattaccgagttaacatcttcccaatccgttctccaatttga

SEQ ID NO: 6396 - DNA, 434 bp, Homo sapiens
  SIMILAR (197)..(421): 701254mologous to Homo sapiens Human G-protein coupled receptor GRIR-1,accession number Y28279,Smith-Waterman Score=257.
tatctaaagtaggtatgtacagaaagagttgaatagcaaaagtgtaaatcatgtaatcattgtgagatttttgggtttgtcacaactgagaaatattgctgatggtggatggtcctcaagtgtgaaaatgttccttgtgaattgcttgtatccaaaatatacacacagcattaagggctggtttttattttttattttttccaatcctcttttcttctcaaggtgtccaagtcacacagaaccacagaatctcacaggtgtctcagaattccttctcctgggactctcagaggatccagaactgcagcctgtcctcgcttggctgtccttgtccatttacctggtcacagtgctggggaacctgctcatcatcctggctgtcagctctgactcccacctccacacccccatatacttcttccagttctcgtgcc

SEQ ID NO: 6397 - DNA, 2925 bp, Homo sapiens
  SIMILAR (1891)..(2922): 1001254mologous to Homo sapiens N-Acetylglucosamine kinase,accession number BC001029,Smith-Waterman Score=1799.
atgaatacatcacaattattagaaatagccaaccaggtgtttgtaaacagggctgcagtaagccttgaggaaaaccgcaaagagaatggacatcaggcccggcgaaacaccgacctggttgtcagctgcagcaatcagaggggtcaggagtcactggaaaagttgttaggccggtatttctacatctcgcatttgtcagccctcgccaaaaccatgaggcagcggtttgttacctgccgacaccataatgcgaggcaaggtccagctgttccgcccggcatacaagcttatgcagcagcccccattgaagatctgcaggccattaggaacaatatcacagcgggtgtttacacaccctgcgatattggaggtaatatcatcctctgccccctggcatattaccaacgatatcaaacaggggtggtgtacaccccttgtgatattgggagtattatcatcctctccacctccgggtgtccaagtcacacagagccacggaatctcacaggtgtctcagaattcctcctcctgggactctcagaggatccagaactgcagcctgtcctccctgggctgtccctgtccatgtatctgctcacggtgctgaggaacctgctcatcatcctggctgtcagctctgactcccacctccacacccccatgtacttcttcctctccaacccgtcatgggctgacatcgctttcacctcggccacagttcccaagatgattgtggacatgcagagtggtgtggtggtgtcagtgatgtacactgtggtcacccccatgctgaaccctttcatctactgcctgagaaacagggacattcaaagcgccctgtggaggctgcgcagcagaacagtcgaatctcatgatctgttccatcctttttcttgtgtgggtatccactgtcaggtctctgagcttgatgctgtcatgtcccttgacaccgcttccggggcttttcggtggatggcttttggggtggaagtggcagccccagcttaccagccatcatgctcatgtccgggatctcagtcctctggggaaggggccagaaaaggctggagcagccgaagtctttcggaaacagtatctgcggtatattcagggctgactcaggaaagaagatgccagccccagagtcccacctccaccgttggttccatcataatgaatggatccaatatggcaaatacatcaccgagtgtaaaatccaaagaggaccaggggttaagtgggcacgatgaaaaggaaaacccatttgcagagtacatgtggatggagaatgaagaggatttcaacagacaggtggaggaggaactgcaggagcaagacttcttggaccgctgcttccaagagatgctggatgaagaagaccaagactggtttattccctcacgagacctgcctcaggccatgggacagttgcaacagcagttaaatggactgtcagtcagtgaaggtcatgattctgaagatattttggtccatgggcgcaggtccctgagcccacagcttcgcgggggtctggccgagcatgcgtcacaacctacgcggccaagagcagtgcgcacgcgcaacctaacgcgggactgccagcaacttccgggcgtttacaggcaggcaggatccaggaggacgggaggggccgctgcggaccgcagtcgctccacctggaggagacaccagaaggaagacagcctgagggacgcagccatccccggctcctaccggcgccccgccccgcgcatgcgcacgcgcacagggagtcagctggctgcgcgggaggtcacgggaagtggggcggtgcccagacagctggagggaaggaggtgtcaggcggggagagacgcaaacggcgggaccagcagcgacggtagcagcagcatggccgcgatctatgggggtgtagaggggggaggcacacgatccgaggtccttttagtctcagaggatgggaagatcctggcagaagcagatggactgagcacaaaccactggctgatcgggacagacaagtgtgtggagaggatcaatgagatggtgaacagggccaaacggaaagcaggggtggatcctctggtaccgctgcgaagcttgggcctatctctgagcggtggggaccaggaggacgcggggaggatcctgatcgaggagctgagggaccgatttccctacctgagtgaaagctacttaatcaccaccgatgccgccggctccatcgccacagctacaccggatggtggagttgtgctcatatctggaacaggctccaactgcaggctcatcaaccctgatggctccgagagtggctgcggcggctggggccatatgatgggtgatgagggttcagcctactggatcgcacaccaagcagtgaaaatagtgtttgactccattgacaacctagaggcggctcctcatgatatcggctacgtcaaacaggccatgttccactatttccaggtgccagatcggctagggatactcactcacctgtatagggactttgataaatgcaggtttgctgggttttgccggaaaattgcagaaggtgctcagcagggagaccccctttcccgctatatcttcaggaaggctggggagatgctgggcagacacatcgtagcagtgttgcccgagattgacccggtcttgttccagggcaagattggactccccatcctgtgcgtgggctctgtgtggaagagctgggagctgctgaaggaaggttttcttctggcgctgacccagggcagagagatccaggctcagaacttcttctccagcttcaccctgatgaagctgaggcactcctccgctctgggtggggccagcctaggggccaggcacatcgggcacctcctccccatggactatagcgccaatgccattgccttctattcctacaccttttcctag

SEQ ID NO: 6398 - DNA, 1302 bp, Homo sapiens
  SIMILAR (577)..(1101): 511254mologous to Homo sapiens Human G-protein coupled receptor GRIR-1,accession number Y28279,Smith-Waterman Score=367.
aaattgtggagatctgattcctagatttcgactgcccttacggatcggctcacataacgggcctgcgtttttggctgccatggtacagaaaacggcaaaggtattggggatcacacggaaactgcatgccgcctcccagcctcagagttccggaaaggtgtccaagtcacacagagccacggaatctcacaggagcctgagaactcctcctcctgggactctcagaggatccagaactgcagcccatcctcgctgggctgtccctgtccatgtatctggtcacggtgctgaggaacctcctcatcagcctggctgtcagctctgactcccacctccacaccccaatgtgcttcttcctctccaacctgtgctgggctgacatcggtttcacctcggccatggttcccaagatgattgtggacatgcagtcgcatagcagagtcatctcttatgcgggctgcctgacacagatgtctctctttgccatttttggaggcatggaagagagacatgctcctgagtgtgatggcctatgactggtttgtagccatctgtcaccccctgcactacccagtcatcatgaatcctcaccttggtgtcttcttagatttgggggcctttttcctcagcctgttggattcccagctgcacagttggattgtgttacaattcaccttcttcaagaatgtggaaatctccaattttgtctgagacccatctcaacttctcaaccttgcctgttctgacagtgtcatcaatagcatattcatatatttagatagtattatgtttggttttcttcccatttcagggatcctttggtcttacgctaacaatgtcccctccattctaagaatttcatcatcagataggaagtctaaagccttctccacctgtcgctctcacctggcagttgtttgcttattttatggaacaggcattggcgtgtacctgacttcagctgtggcaccacccctcaggaatggtgtggtggcgtcagtgacgtatgctgtggtcacccccatgctgaaccctttcatctacagccagagaaacagggacattcaaagcgccctgcggaggctgcgcagcagaacagtcgaatctcatgatctcttgcatcctttttcttgtgtgggtaagaaagggcaagcacattaaatctctacttctgcaaatcctgcctcttagtcacattatttttgtgggcttgatgggcttttattcctttccgcatttcctttgtgaatattgctttcttcgttatgcctttaactgggaatggggtgaggattctgggat

SEQ ID NO: 6399 - DNA, 1537 bp, Homo sapiens
  SIMILAR (101)..(1315): 561254mologous to Bos taurus cytokeratin VIb,accession number X02870,Smith-Waterman Score=1027.
ccctggctttgctcctctttctgggaaggggttgcccggctgtgctgccaccatgtcttttcgactttctggtggatccaggaggatctgctcgcgaactgggtctggtaggctgtccggtggaggaacaggcttcgtggctgggaatgtgtgtgttggatcgggagcaagaagcagcttttcttgtactcttgagggcatctcttctggaggaagcttctgcaatagcggtggagggttgggaagtggtgcctgtgctggttttcttggcaatgagcacagcctcctctctgggaatgaaaaggtgaccatgcagaatctcaacgaccgcctggcatcctacctggaccatgtgcatgctctagaggaggccaacgcagacctggagcagaagatcaagggctggtacgagaaatgtgagcctggctcttcccgggaacacgatcatgactatagcagatacttctcagtcatagaagatcttaaaaggcagattatttctgcgaccatctgcaatgccagcattgttctacaaaatgacaatgccagactgaccgctgatgacttcaggctgaagtatgaaaatgagctggctctgcaccacagtgttgaggccgacaccagtggtcttcgcagagtgttggatgaactgaccctttgtacaaccgacctggagatacagtgtgagaccctcagtgaggaattgacctacctcaaaaaaagtcatgaggaggaaatggaagtcttgcaatatacagctggggggaacgtgaacgtggagatgaatgcaaccccaggagtggacctaactgtcctgttgaacaacatgagggctgagtatgaggacttggctgagcagaaccgcaaagatgctgaagcctggttcaacgagagggtaggtctatggcaaattacaaagggcttgctcaggagacaatcaggccagtcactaaccctttcgacaattacacttcagagtgcaacgctgcaacaacagatttccgatcatgagggagcagccacagcagccagaaatgagctgaccgaattaaaacgcaatctgcaaaccctggaaatagaacttcagtccctcatggctgtgaaacattcctatgaatgctccttggctgagactgaaggaaattactgcaatcaactccagcaaattcaggatcagataggggtgatggaggaacaactgcaacagattcgaacagaaacagaaggccagaagctggagtatgaacagcttcttgatgtaaaaatatttttagaaaaagaaattgacatttattgcaacttactagatggagaagaaagagacacagaagaagccacacccactcacacacctggtaatggcccatcatctacagatcttgaaatggactctcatcccagtgccagctctatggaccaaggttctacagacagtccagtcaacccagagactacacagaatccacagctactacagcccctggtaacagacctatcaactatagaccccactgtggactcagcaatagccatgtga

SEQ ID NO: 6400 - DNA, 953 bp, Homo sapiens
  SIMILAR (292)..(591): 351254mologous to Cylindrotheca fusiformis alpha 3 frustulin,accession number X99328,Smith-Waterman Score=103.
  misc_feature (1)...(953): n = a,t,c or g
atggtggtcacgcctgtaatcgcagctacttgggaggctgaggcgggaggttgcttgatcccagagtttgagaatgcaccccgcgctccgccagcaggagcgcacacgcaggtgcaaggagctggcacctgggcacacacctggccacacacctgtgcagagccggtggcaggccctcccggcgcaggaatggcgtgcccccagctgccgccacttctgcttttggtgctggtggtgctgctgaaagctggtgtgaattacaatactccctttacagttccgaatcccgaccccgcactggagccccacttcccacagccccggaacggagcccttgcctccactgaccagaccttggagccccctggcccagctcctagagggggaagaggagagacccccaacaaggggacaggagggtcactgtgccaatcctgtcatcaccctcctgtggatgtacaggcagtgctcaataaatgcttcgaggctgatgaggctgctggctcagggtgcgtgggttcctcaagggggggatttctgagttctaagaccaagtctccatctgagactcccaaattgctccccacctcccatccctgtttttttttgatgatgatgtttgattgtttgttttaataccaatgaaccactacgtctgccatnnnnnnnnnnnnnngggggggcccgttttaaaggatccttcggggggcccaaagttaacccgggcttgcaacgtaaaagttttttccttatagggggccgaattaaaacctacctgggaatttttggaagggacctttattttgggggggggacatattggcccaacctccctacaaaaatttaaggctttagggaaaaaataaaattttaaagggtatagggggtaaaacaacctgcatatccttgctgttggaaagttttctttacggagtttgattaatgaaaatttt

SEQ ID NO: 6401 - DNA, 1040 bp, Homo sapiens
  SIMILAR (1040)..(3): 991254mologous to Homo sapiens lysosomal alpha- mannosidase,accession number U60899,Smith-Waterman Score=1868.
caggtgaggtgggctttgttcagctcccagaggtaacaagcgggggtggagtagagaacatggacactgcttccttttgcctgctgcgcatttaccagccggatgagcttgtcaaggttcttgaaccacatgttggcattctcatattggaagtccgagcccatggtcatcacagtgtggttggtgcggtaataccggccctgggcagtggccacatttaggaagtaatcgaccagctccttggcgttgtactcggggctgcgagggtcctccaccagcggctgatcgacacacagcacatcccagcacagattccttggcgggttgtaaccattgggaagcacaccagtgaagaggtccgcggtcgggggcttcaggctggtgctggcccgccacacctgctccatctccagcttctgcatccgtacccacttatcttgataatcaaggcgcccaaagaagaagccgtcgaagcccatctgcgcaaacagcgaggcctgctcccgagagtggccgaaggggtcaatgtgccaggccacacggggtcgcccatcattgccaaatgtgtcctccagaaagcgcagcccaagtgtcatctggtccacgatggcaccgtagtgggtggctgcctcatcgttcatcacccagccaccattggcgaactccaggcgcccctggcgcacaaggtctcgcacgacttcctgtgtggcatttgtctgctggtgccaccaacgggagaagaaggcaatctccacgtaaatgaagcgacgggtgggatcttccagcaaggcagagatgaccgagtccaggatgtactgcacaccggcgtgctggatgtcattcttgattccataaaagtactggtccacggttttgagccagcccacgtcatcatgtgtgtgaggcagcaggtgcacgttcagcatgttcggctgcactgtggggcatgtctcgtatcccccggcccgagcaccggcagccgccagcaacaaaaggaaaaagcagagaggcgggagcggtggccgcagggcgcgggacat

SEQ ID NO: 6402 - DNA, 1662 bp, Homo sapiens
  SIMILAR (410)..(685): 651254mologous to Homo sapiens hook2 protein,accession number AF044924,Smith-Waterman Score=268.
gcaactcaggcaagggtcaggactgaaggggtggcgggccggaacatgggtggaatgcctgtgctcagttatccccgcacctctccacccacacccgcagcccccacccgggccacccactctcccttggccacacctgccgggtgccacgatgaccgtcacctacacagcccgagtggcgaacgcccgcttcggtggcttctcccagctgctgctactgtggcgtgggagcatctacaaactcctgtggcgagagctgctctgcttccttgggttctacatggcgctgagtgctgcctaccgtgctggattacagctttgtgctgccgaagggcagaagcgctacttcgagaagcttgtgatttattgtgaccatatgccagcctcatccctgtctccttcgtgcttgctgatgctcctgtcagaggagaagcagagcctggcgcaagagaatgcagggctgcgggagcggatgggccggcctgaaggcgagggtaccccaggtctcactgccaagaagctgctgctgctgcaatcccagctggagcagttgcaggaggagaacttcagggctctggtgagacctaggccccaggccctcatcctccaggcggaaatcatccaccttgtcaggaagttctggactccaaattcttcaggcccagaggccaaagtaatatacgacatatggtttgctatgggaaccagttccaatacaccaccatccccagccggattggaatatgaagtgtttatcaaaaaccacctaaatcgcccttgccttgatcgtaaacaacctggcggcttcaggcttgggccctatgcagtatttcactctcaccactacgggtcctggtatgtgcgccggtattaccgcaccaaccacactgtgatgaccatgggctcggacttcaatatgagaatgccaacatgtggttcaagaaccttgacaagctcatccgctggtaaatgcgcagttctggaccggttacttttccagtcggccggccctcaaacgctacgagcgcctcagctacaacttcctgaggtgggtgtgcaaccagctggaggcgctggtgggcctggcggcccaacgtgggaccctataggctccagagacagtgcacccctctagctgggccaatggagggggagtgggtactgtttgtaccaggtgggagtgtcccctttagaggtgtgtctgtgaagaatgaacatctgcccgaatccatgccaaatgcaggacaaggttttgtgtccccaagcttgtgtgtcatggcaatgctgagagtatctgagaccttactccaccaagttcggctcggaacgaccaagcccaacttccaggcggccattcgggggcctggtgaatgttatcccctgcccatggcccgttccccgggggcgccttgggaggggaacccccggggtttaagactggccgatggcaagtttctcccaagacggcccaaggatgatgaagaaacaagagtgaagggggatcttggacccttccccctaggtgcccccccacgaattgttcttttccttgacgggtgccgggaacgcactccttgcccccctgggacccacgacgatagggacgttaccacagttccactggcgtgtccccaattttcccaggacggctcgcccgggtga

SEQ ID NO: 6403 - DNA, 579 bp, Homo sapiens
  SIMILAR (1)..(345): 861254mologous to Cricetulus griseus Ribosomal Protein,accession number D26473,Smith-Waterman Score=525.
atggctcgtggtcccaagaagcatctaaagcaggtagcagctccaaagcattggatgctggataaattgactggtgtgtttgctcctcatccatccaccagtccccacaagttgagagagtgtctccccctcatcattttcataaggaacagacttaagtatgccctgacaggagaggaagtaaagaagatttgcatgcagcggttcattaagatcgatggcaaggtccgcactgatataacctaccctgctggattcatggatgtcatcagcattgacaagatgggagagaatttctgtctgatctgtgacaccaagggaatccctcatctggtgactcatgatgctcgtaccatctgctaccctgatcccctcatcaaggtgaatgacaccattcagattgatttggagactggcaagattactgacttcatcaggttcgacactggtaacctgtgtatggtgactggaggtgccaacctgggaagaattggtgtgatcaccaacagagagaggcaccctggatctcttgacgtggttcacatgaaagatgccaatggcaacagctttgccacttga

SEQ ID NO: 6404 - DNA, 974 bp, Homo sapiens
  SIMILAR (240)..(689): 321254mologous to Drosophila melanogaster ribosomal protein S4,accession number D16257,Smith-Waterman Score=122.
tcagtgtggtggaattcaacgcagccatggctcgtggtcccaagaagcatctgattctgtgtggcagctccaaagcatgtggatgctggataaattgaccggggtgtttgctcctcgtccatccaccggtccccacaagttgagagtagtgtctctcccgcatcattttccctgaggaacagacttaagtatgccctgacaggagatgaagtaaagaagattttgcatgcagcggttcattaaaatccgatggcaaggtccgaacttgatataacctaccctgttggtattcatggatgtcatcaagcattgacaagaccgggagagaatttcccgtcctgatctatgacaccaagggtccgcttttgctgtacatcgtattacacctggaggaggcccaagtaccaagttgtgcaaaagtgagaagagatctttgtggggcacaaaagggaatccctcatctggtgactcatcgatgcccgcaccatcccgctaccccgatccccctcatccaaggtgaatgattaccattcagattggatttagaagactgggcaagatttacttgattttcatcaaagttcgacaactggtaaacctgttgtatgggtgactgggagggtgcttaaccttagggaaggaattgggtgttgatccaccaacagaggaggagggcaccctgggatcttttttgaccgttggttccacgttgaaaagatgcccattggcaaccagcttttggccacttcggattttcccaacattttttggttattgggcaagggcaacaaaccatggatttctctttccccgaggaaagggtccccgcctcaccattgcttgaagagagagacaaaagactggcggccaaacagagcagttgggtgaaatggggtccctgggtgacatggtcagatcttttggtaccgtaattaaaaaatattggtggcagattaatagcaaaaaaaaaaaaa

SEQ ID NO: 6405 - DNA, 246 bp, Homo sapiens
  SIMILAR (1)..(240): 931254mologous to Homo sapiens ribosomal protein L31 (AA 1- 125),accession number X15940,Smith-Waterman Score=386.
atgtctcccgcaaagaagggtggcgagaagaaaaagggcccttctgccatcaacgaggtggtgacccaagaacataccatcaacattcacaagcgcatccatggagagggcttcaagaagcgtgctcctcgggcactcaaagagattcggaaatttgccatgaaggagatgggaactccagatgtacgcattgataccaggctcaacaaagctgtctgggccaaaggaataaggaatgtcctatag

SEQ ID NO: 6406 - DNA, 766 bp, Homo sapiens
  SIMILAR (3)..(755): 911254mologous to Homo sapiens microtubule associated protein 1A,accession number U80458,Smith-Waterman Score=1199.
ccagccaacctgccgatagtgctgttcctgctacctctggcaaagtctatggaacgccagagactgaactcacctaccccactaacatagaggctgcccctttggctgaagaggaacatgcgtcctcggccacttcaatcactgagtgtgacaaactttcttcctttgccacatcagtggctgaggaccaatctgtggcctcacttacagctccccagacagaggagacaggcaagagctccctgctgcttgacacagtcacaagcatcccttcctcccgtactgaagctacgcagggcttggactatgtgccatcagctgaagacaagggcttcaaatcaccaccctgtgaggacttctctgtgactggggagtcagagaagagaggagagatcatagggaaaggcttgtctggagagagagctgtggaagaggaagaggaggagacagctcacgtagagatgtctgagaaactttgcagtcaatatggaactccagtgtttagtgcccctgggcatgccctacatccaggagaaccagcccttggagaagcagaggagcggcgccttagcccagatgacagcacagtgaagatggcttctcctgcaccatctggcccacccagtggcacccacacaccgtttcatgagtccccagtggaagaaaagtctgagccccaagactttcaggaggcagactcctggggagacactcagcgcacaaccagtgtgggcaaaagaaaagctgctgaggaattacgatgcct

SEQ ID NO: 6407 - DNA, 744 bp, Homo sapiens
  SIMILAR (214)..(741): 891254mologous to Homo sapiens microtubule associated protein 1A,accession number U80458,Smith-Waterman Score=777.
atggctggtcccttctcccgtctgctgtccgtccgcccgggactcaggctcctggctttggccggagcggggtctctagccgctgggtttctgctccgaccggaacctgtacgagctgccagtgaacgacggaggctgtatcccccgagagttttattgtgggaaacctttgtcatgggatttgggaccgtccaatcagtggaatatcatcaggtggaggaacccttgaaggtaactccaagtagccgggaggcttttgagggtcgggatttggagctccagggcaaggcccctgagaaggagacctcgttattcctaagcagcctgaccgcacttgcagaagccgctgagcatgtctctgacatccaggatgagacaatccctggctactcagagactgagcagagcatctcatatgaggagatccgtgatgagccggaggagcgcccagctccgcccagatttcatacaagtacatatgccctgcccgggcctgaaggtgctggcccattcgaagccagccactctgccgatagtgctgttcctgctacctctggcaaagtctatggaacgccagagactgaactcacctaccacactaacatagtggctgcccctttggctgaagaggaacatgtgtcctcggctctgtcaatcactgagtgtgacaaactttcttcttttgccacatcagtggctgaggaccaatctgtggcctcacttacagctccccagacagagtag

SEQ ID NO: 6408 - DNA, 8643 bp, Homo sapiens
  SIMILAR (223)..(8640): 961254mologous to Homo sapiens microtubule-associated protein 1a,accession number U38291,Smith-Waterman Score=14092.
  misc_feature (1)...(8643): n = a,t,c or g
gggggagacctcatcctacagagtggcacctactcatatgaaaacttggcccaggtccttcacaaccccgagatttcccaattgctcagcaatagagaccctgggatacaggccttccttaccgtgtcctgcttaggggaaggtgattggagccacctgggattatccagttcncaagagaccctgcacctccggctaaaccctgagcccactctgcccaccatggacggcgtggctgagttctccgagtatgtctctgagactgtggacgtgccatccccatntgacctactagagccccccacctcagggggcttcctcaagctctccaagccttgttgctacatcttcccaggtggtcgnggggactctgccctctttgctgtcaatggtttcaacatcctggtggatggtggctctgatcgcaagtcctgtttgtggaagctggtacggyacttggaccgcattgactcggtgctactcacacacattggggcagacaacctgccaggcatcaatggactactgcagcgcaaagtggcagagctagaggaggagcagtcccagggctctagcagttacagcgactgggtgaagaaccttatctctcctgagcttggagttgtctttttcaacgtgcctgagaagctgcggcttcctgatgcctcccggaaagccaagcgtagcattgaggaggcctgcctcactctgcagcacttaaaccgcctgggcatccaggctgagcctctatatcgtgtggtcagcaataccattgagccactgaccctcttccacaaaatgggtgtgggccggctggacatgtatgtcctcaaccctgtcaaggacagcaaggagatgcagttcctcatgcaaaagtgggcaggcaatagtaaagccaagacaggcatcgtgctgcccaatgggaaggaggctgagatctccgtgccctaccttacctctatcactgctctggtggtctggctaccagccaatcccactgagaagattgtgcgtgtgctttttccaggaaatgctccccaaaacaagatcttggagggcctagaaaagcttcggcatctggacttcctgcgttaccctgtggccacgcagaaggacctggcttctggggctgtgcctaccaacctcaagcccagcaaaatcaaacagcgggctgatagcaaggagagcctcaaagccactaccaagacggccgtgagcaagttggccaaacgggaggaggtggtagaagagggagccaaggaggcacgttcagagctggccaaggagttagccaagacagagaagaaggcaaaagagtcatctgagaagcccccagagaagcctgccaagcctgagagggtgaagacagagtcaagtgaggcactgaaggcagagaagcgaaagctgatcaaagacaaggtagggaaaaagcaccttaaagaaaagatatcaaagctggaagaaaaaaaagacaaggagaaaaaagagatcaagaaggataggaaagagctccagaaggatgaaggaaggaaggaggataaaaaggatgcccggaaggaggagaagaggaaagattccagccctgagctcaggaagatttccaagccagacctaaagccctttactcctgaggttcgtaagaccctctataaagccaaggtccctggaagagtcaaaatagacaggagccgtgctatccgtggggagaaggagctgtcttctgagccccagacacccccagcccagaagggaactgtaccactcccaaccatcagtgggcacagggagctggtcctatcctcaccagaggacctcacacaggactttgaggagatgaagcgtgaggagagggctttgctggctgaacaaagggacacaggactaggagataagccattccctctagacactgcagaggagggacccccaagtacagctatccagggaacaccaccctctgttccagggctgggacaagaagaacatgtgatgaaggagaaagagcttgtcccagaggtccctgaggaacaaggcagcaaggacagaggcctagactctggggctgaaacagaggaagagaaagatacctgggaggaaaagaagcagagggaagcagagaggctcccagacagaacagaagccagagaggaaagtgaacctgaagtaaaggaggatgtgatagaaaaggctgagttagaagaaatggaggaggtacacccttcagatgaggaggaagaggacgcgacaaaagctgagggtttttaccaaaaacatatgcaggaacccttgaaggtaactccaaggagccgggaggcttttgggggtcgggaattgggactccagggcaaggcccctgagaaggagacctcgttattcctaagcagcctgaccacacctgcaggagccactgagcatgtctcttacatccaggatgagacaatccctggctactcagagactgagcagaccatctcagatgaggagatccatgatgagccggaggagcgcccagctccacccagatttcatacaagtacatatgacctgcccgggcctgaaggtgctggcccattcgaagccagccaacctgccgatagtgctgttcctgctacctctggcaaagtctatggaacgccagagactgaactcacctaccccactaacatagtggctgcccctttggctgaagaggaacatgtgtcctcggccacttcaatcactgagtgtgacaaactttcttcctttgccacatcagtggctgaggaccaatctgtggcctcacttacagctccccagacagaggagacaggcaagagctccctgctgcttgacacagtcacaagcatcccttcctcccgtactgaagctacgcagggcttggactatgtgccatcagctggtaccatctcacccacctcctcactggaagaagacaagggcttcaaatcaccaccctgtgaggacttctctgtgactggggagtcagagaagagaggagagatcatagggaaaggcttgtctggagagagagctgtggaagaggaagaggaggagacagcaaacgtagagatgtctgagaaactttgcagtcaatatggaactccagtgtttagtgcccctgggcatgccctacatccaggagaaccagcccttggagaagcagaggagcggtgccttagcccagatgacagcacagtgaagatggcttctcctccaccatctggcccacccagtgccacccacacaccctttcatcagtccccagtggaagaaaaatctgagccccaagacttccaggaggcagactcctggggagacactaagcgcacaccaggtgtgggcaaagaagatgctgctgaggagacagtcaagccagggcctgaagagggcacactagagaaggaagagaaagttcctcctcccaggagcccccaggcccaggaagcacctgtcaacattgatgaggggcttacaggctgtaccattcaactgttgccagcacaggataaagcaatagtctttgagattatggaggcaggagagcccacaggcccaattctgggagcagaagcccttcccggaggtttgaggactttaccccaagaacctggcaaacctcagaaagatgaggtgctcagatatcctgaccgaagcctctctcctgaagatgcagaatccctctctgtcctcagcgtgccctccccagacactgccaaccaagagcctacccccaagtctccctgtggcctgacagaacagtacctacacaaagaccgttggccagaggtatctccagaagacacccagtcactttctctgtcagaagagagtcccagcaaggagacctccctggatgtctcttctaagcagctctctccagaaagccttggcaccctccagtttggggaactaaaccttgggaaggaagaaatggggcatctgatgcaggccgaggatacctctcaccacacagctcccatgtctgttccagagccccatgcagccacagcgtcacctcccacagatgggacaactcgatactctgcacagacagacatcacagatgacagccttgacaggaagtcacctgccagctcattctctcactctacaccttcaggaaatggggaagtacttacctggggcgatcaccaagccctgaatgaacacattctgacacctgatagctccttctccaagagtcctgagtctttgccaggccctgccttggnggacattgccataaagtgggaagataaagttccagggttgaaagacagaacctcagaacagaagaaggaacctgagccaaaggatgaagttttacagcagaaagacaaaactctggagcacaaggaggtggtagagccgaaggatacagccatctatcagaaagatgaggctctgcatgtaaagaatgaggctgtgaaacagcaggataaggctttagaacaaaagggcagagacttagagcaaaaagacacagccctagaacagaaggacaaggccctggaaccaaaagacaaagacttagaagaaaaagacaaggccctggaacagaaggataagattccagaagagaaagacaaagccttagaacaaaaggatacagccctggaacagaaggacaagaccctggaaccaaaagataaagacttggaacaaaaggacagggtcctagaacagaaggagaagatcccagaagagaaagacaaagccttagatcaaaaagtcagaagtgttgaacataaggctccggaggacacggtcgctgaaatgaaggacagagacctagaacagacagacaaagcccctgaacagaaacaccaggcccaggaacaaaaggataaagtctcagaaaagaaggatcaggccttagaacaaaaatactgggctttgggacagaaggatgaagccctggaacaaaacattcaggctctggaagagaaccaccaaactcaggagcaggagagcctagtgcaggaggataaaaccaggaaaccaaagatgctagaggaaaaatccccagaaaaggtcaaggccatggaagagaagttagaagctcttctggagaagaccaaagctctgggcctggaagagagcctagtgcaggagggcagggccagagagcaggaagaaaagtactggagggggcaggatgtggtccaggagtggcaagaaacatctcctaccagagaggagccggctggagaacagaaagagcttgccccggcatgggaggacacatctcctgagcaggacaataggtattggaggggcagagaggatgtgtccttggaacaggacacatactggagggagctaagctgtgagcggaaggtctggttccctcacgagctggatgtccagggggcccgcccacactacactgakgaacgggaaagcactttcctagatgagggcccagatgatgagcaagaagtacccctgcgggaacacgcaacccggagcccctgggcctcagacttcaaggatttccaggaatcctcaccacagaaggggctagaggtggagcgctggcttgctgaatcaccagttgggttgccaccagaggaagaggacaaactgacccgctctccctttgagatcatctcccctccagcttccccacctgagatggttggacaaagggttccttcagccccaggacaagagagtcctatcccagaccctaagctcatgccacacatgaagaatgaacccactactccctcatggctggctganatcccaccctgggtgcccaaggncagacccctccccnctgcacccctctccccagctcctggtccccccacacctgccccggaatcccatactcctgcacccttctcttggggcacacccgagtatgacagtgtggtggctgcagtacaggagggggcagctgagttggaaggtggnccatactcccccctggggaaggactaccgcaaggttganggggaaagggaagaagaaggtagggctgaggctcctgacaaaagctcacacagntcaaaggtaccagaggccaggaaaagccatgccaccacggagcctgagcagactgagccggagcagagagagcccacaccctatcctgatgagagaagctttcagtatgcagacatctatgagcagatgatgcttactgggcttggccctgcatgccccactagagagcctccacttggagcagctggggattggcccccatgcctctcaaccaaggaggcagctgccggccgaaacacatctgcagagaaggagctttcatctcctatctcacccaagagcctccagtctgacactccaaccttcagctatgcagccctggcaggacccactgtacccccaaggycagagccagggccaagtatggagcccagyctcaccccacctgcagttcccccccgtgctcctatcctgagcaaaggcccaagcccccctcttaatggtaacatcctgagctgcagcccagataggaggtccccatcccccaaggaatcaggncggagtcactgggatgacagcactagtgactcagaactggagaagggggctcgggaacaggcagaaaaagaggcccaatccccaagtcctcctcaccccattcctatggggtcccccacattatggccagaaactgaggcacatgttagccctcccttggnctcacacctggggnctgcccgacccagtctggacttccctgcttcagcctttggcttctcctcattggarrcagctcccccacagstgccctctccagctgaaccccgctcggcaccctgtggctcccttgccttctctggggatcgagctctggctctggctccaggaccccccaccagaacccggtatgatgaatacctggaagtgaccaaggcccccagcctggattcctcactgccccagctcccatcacccagttctcctggggnccctctcctctccaatctgccacgacctgcctcaccagccctgtctgagggctcctcctctgaggctaccacgcctgtgatttcaagtgtggcggagcgcttctctccaagccttgaggctgcagaacaggagtctggagagctggacccaggaatggaaccagctgcccacagsctctgggacctcactcctctgagcccagcacccccagcttcactggacttggccctagctccagctccaagcctgcctggagacatgggtgatggcatcctgccgtgccacctggagtgctcagaggcagccacggagaagccaagccccttccaggttccctctgaggattgtgcagccaatggcccaactgaaaccagccctaaccccccagnccctgccccagccaaggctgaaaatgaagaggctgcggcttnccctgcctgggaacgtggggcctggcctgaaggagctgagaggagctcccggcctgacacawtgctctcccctgagcagccagtgtgtcctrcagggggctccgggggcccacccagcagtgcctctcctgaggtcgaagctgggccccagggatgtkccactgagcctcggccccatcgtggggagctctccccatccttcctgaacccacctctgcccccatccatagatgatagggacctctcaactgaggaagttcggctagtaggaagaggggggcggcgccgggtaggggggccagggaccactggggkkccatgscctgtgactgatgagacacccccnacatcagccagtgactcaggctcctcacagtcagattctgatgtnccgccagaaactgaggagtgtccgtccatcacagctgaggcagccctcgactcagatgaagatggagacttcctacctgtggacaaanctgggggtgtcagtggtactcaccaccccaggcctggccatgacccacctcctctcccacagccagaccnccgcccatcccctccccgccctgatgtgtgcatggctgaccccgaggggctcagytcagagtctgggagagnagagaggctacggnagaaggaaaaggttcaggggcgagtagggcgtagggccccaggtaaggacaagccagtgtcccctgnacggcgtctggntcttcggggaaaacgctcacccacccctggtaaagggtctgnagatcgagtatcccggnccccanctcgatcacgnagtancacaagccaggtcaccccagcagaggaaaaggatggacacagccccatgtccaaaggyctagtcaatggactcaaggcaggaccamtggccttgagttccaagggcagctctggtgcccctgtatatgtggatctcgcctacatcccgaatcattggagtggcaagactgctgacctygacttcttccgtcgagtgcgtgcatcctactatgtggtcagtgggaatgaccctgccaatggcgagccaagccgggctgtgctggatgccctgctggagggcaaggcccagtggggggagaatcttcaggtgaaggtgactctgatccctactcatgacacggaggtgactcgtgagtggtaccaacaaactcatgagcagcagcaacaactgaatgtcctggtcctggctagcagcagcaccgtggtgatgcaggatgagtccttccctgcctgcaagattgagttctga

SEQ ID NO: 6409 - DNA, 7863 bp, Homo sapiens; identical to SEQ ID NO: 2126
  SIMILAR (3061)..(7788): 551254mologous to Homo sapiens proliferation-related protein P80,accession number AF200415,Smith-Waterman Score=3712.

SEQ ID NO: 6410 - DNA, 1699 bp, Homo sapiens
  SIMILAR (737)..(1585): 991254mologous to Homo sapiens creatine kinase,accession number J04469,Smith-Waterman Score=1476.
ggagaggaggaggaggaaactaacgattccctgcccacccccacacccagcaccaccaacaggtgggcaagcttgccgagaaaacgcagagggcatcctgtgagcagcaaacacatctgagcctggaaaagacgcagagaagtaaaagatcaaagtctgattggcaccggctcccattccggctccagcctccaatccgacccccatttcggctgcagcctcggacctagcatccggccctcggtctatccgggtgcatcctccctccctgttccggatcttatcttgcgccagcgcctaactccaggataccgaaaccaggcctaaagccatggctggtcctatctcccgtctgctgtacgaccgcacgggactcaggctcctgggctttggccggagcggggtctctagccagctgggtttttgctccgaccggaacctgtacgagctgccagtgaacgacggaggctgtatcccccgagcgctgagtacccagacctccgaaagcacaacaactgcatggccagtcacctgaccccagcagtctatgcacggctctgcgacaagaccacacccactggttggacgctagatcagtgtatccagactggcgtggacaaccctggccaccccttcatcaagactgtgggcatggtggctggagatgaggagacctatgaggtatttgctgacctgtttgaccctgtgatccaagagcgacacaatggatatgacccccagagcaatgaagcacaccacggatctagatgccagtaaaatccgttctggctactttgatgagaggtatgtattgtcctctagagtcagaactggccgaagcatccgaggactcagtctgcctccagcttgcactcgagcagagcgacgagaggtggaacgtgttgtggtggatgcactgagtggcctgaagggtgacctggctggacgttactataggctcagtgagatgacagaggctgaacagcagcagcttattgatgaccactttctgtttgataagcctgtgtccccgttgctgactgcagcaggaatggctcgagactggccagatgctcgtggaatttggcacaacaatgagaagagcttcctgatctgggtgaatgaggaggatcatacacgggtgatctccatggagaagggtggtaacatgaagagagtgtttgaaagattctgccgaggcctcaaagaggtggagagacttatccaagaacgtggctgggagttcatgtggaatgagcgtttgggatacatcttgacctgtccatctaacctgggcactggacttcgggcaggagtgcacatcaaactgcccctgctaagcaaagatagccgcttcccaaagatcctggagaacctaagactccaaaaacgtggtactggaggagtggacactgctgctacaggcggtgtctttgatatttctaatttggaccgactaggcaaatcagaggtggagctggtgcaactggtcatcgatggagtaaactatttgattgattgtgaacggcgtctggagagaggccaggatatccgcatccccacacctgtcatccacaccaagcattaactccccatcgccagctgatgactcaagattcccaggagttttgctcattctaatgatggcccattctacttgctctggacctgcccccgcatcccctgcctccatcctagt

SEQ ID NO: 6411 - DNA, 429 bp, Homo sapiens
  SIMILAR (418)..(128): 311254mologous to Streptococcus pyogenes serum opacity factor precursor,accession number AF154330,Smith-Waterman Score=117.
  misc_feature (1)...(429): n = a,t,c or g
ctaaatatgtattgtgggaagattacagggaatcagcacatgggttctggtgaggatntacagggaaataacctccatacccggagaagcaggggctcttttggtccagggtgggtcatgcaattccaggtgtaattttgcctccactagttgcaccacctggtgttccaggtgtacctggtttgcttccagagattgtcactgctgtggctgaggctgcatcggtgtgtttactcacagggctactggtagttgaggcagcagatactgttggggtccctgattttccaaaactggtgtttccaatgtctgcttccccaggggtgctgctacctggagctccaggagttgctccaggtgataccacaggtgtgcctgagactgctgtgttaccagggccagtgtccccagtacctgatgttccagcgg

SEQ ID NO: 6412 - DNA, 513 bp, Homo sapiens
  SIMILAR (31)..(423): 291254mologous to Equus caballus fibrinogen A-alpha chain,accession number AF095462,Smith-Waterman Score=119.
atgctgaacttctcaggcacacctgtggtatcacctggagcaactcctggagctccaggtagcagcacccctggggaagcagacattggaaacaccagttttggaaaatcaggcaagtctggacatgactccttaacagttctcaaccctgccttcctcagaaggaccccaacagtatctgctgcctcaactaccagtagccctgtgagtaaacacaccgatgcagcctcagccacagcagtgacaatctctggaagcaaaccaggtacacctggaacaccaggtggtgcaactagtggaggcaaaattacatctggatggtccagcagtggcaccagcacgggctcttcaaatacaccagattgcagtcaagaagttgtccccaatcctcttgcagcaaatagagatatcactgagcccatgtatgaattcttgcttattcactgtacccatcaggagaaatctcttgagacctcactcagagtgcacatccttaccacagtacaaggctaa

SEQ ID NO: 6413 - DNA, 630 bp, Homo sapiens
  SIMILAR (20)..(535): 321254mologous to Mus musculus neural variant mena+ protein,accession number U72521,Smith-Waterman Score=123.
atgctggcagtcctcagagccctcgcttgcacctcccctgcctgggctcccactttggcggcatttgaggagcccttcagcccccacctgcactgtgggagcccctttctgggctggccaaggctggagcccactccctcagcttgcagggaggtgtggagggagaggcgcgagcgggaaccggggctgcgtgcggcgcttgcgggccagctggagttccggagcagccagccagccccgctggccccgaggaatgagggacttagcacccgggccagtggctgcggagagtgtactggatcccccagcagtgccggcccaccggcgctgtgctcgatttctcgccgggccttagctgccttcccgcggggcagggcttgggacctgcagcccgccatgcctgagcctcccacccactccatgggctcctgtgctgcccgagcctccccgacgagcaccaccccctgctccacggcgcccagtcccaacgaccacccaagggctgacgaatgcgagcgcacggcgcaggactggcaggcagctccacctgcagccctggtgcaggatccactaggtgaagccagctgggctcctgagtctggtggggacgtggagaacctttgtatctag

SEQ ID NO: 6414 - DNA, 3411 bp, Homo sapiens
  SIMILAR (1962)..(313): 981254mologous to Homo sapiens KIAA0433,accession number AB007893,Smith-Waterman Score=2842.
tcatttctttttcccagtgttttttttgtgttcatgcgtttctgttttgctagttatattctttttccgagatgaggtattaggaacaactgcactagaaggtccacttgtagctggtttgctgcttgctttagtgctctttaaggtagctggtggtgttgggaggatctttgcaggtgtatacgtatttaaagatactttttttctcattattggactggaacgtaaagctgtagaggctacagtaggattctgcttctgttccacaagagttcttggtgttctcaggtaattagcattttcagatacaacatcatttgtagccgtcttcctagatcttggaagtggagacttcctgtgtatatgaattggctctgataccattggtttaaacaatatcacagctcgatcaacttcatctcttttagaagtatgtggttcatcatcattatcaattttaaaaggtctcctgccttcattctctctggaagctggtctatatccatagccagatggcaaatttttgtcttcttcacaacctttggctcccggactaaagtgtaattcaacatgaaagcgttcttctgaggaaagatccttattaggatcctcataaagcatgataacaatctgagtcatgtagttgagctcattgacaacgtttaaataatccatagctcgtttccactgttcatcctttgattcattgcataaggcaccatagcgaagaatagacagcaaagaatgtacatgactttcactggtaaaatataatctagtacgaacatgacgttcaggagacagaacacctctagaatacacaggatgaagtttatttacagtgtcatcatcttgtgtcctctgaaggtctgagcgaatttttctaaccagaggagtacagtagcctttggcaatctccagtttttcagctttagttataccatattcctgagggataacaatatctgctaatgccttcgaaagcctatataattccattgtgttttctaatttcaaggaaccattatgctggacatcatattttatacagtcatatatgtcagggattttactaatatcatatcttccattctttgttttaaagtctttctctaacttggaccatctacgtagcataagctccaatgtttcactatggtaaagctgaatatctgatgatttaggatcttccattcgatgtctgatttgagaagtcaaactctgaattaaggaataaactttatcacaggtcttcacagggtttttaattaaatgcattgatttgataagagaaatgcttccagatggagtaagcttttcataatcttcagcagtaaaatctctgtctttctgaagtatttcatgaagccttgccttcacacgttgctgacaactgctcagagagtcactatcactatccaaaagaccgttcatatttgcacttttcaccatttgaacaagaatgggtgtaagctctccttccaaagctaaaagcccctttgcaaaagcagctgcagtcatctggactcgtccttcatcagaggcatatattttgaggtcatgtctgtaggtgctatgtaatctaagtaaaccacaaccaggaaatcctgcataatctccttgacctccaggatacatacacctgaaggctcttccaagttcttcagcctggaccctgcctgcaggagttaattcacctccccattttagaaccaaaagtaaagatggttcttctcttcggctgtcctcctcttcactagatgttttaggacaaccatgagggagataggtcaactgaaccttacgatttattccagaaaaatgaccatacatctctaatacagtcttaagttgttcaagttttggcttgttttcttcaatttcagaatcattattttgccctagctccataagaagctgtcgtgcaatatctagcacttcttccattttcattttttgttttggtgttcgatccccatgacgtataacagctatgacacatctaagttccatcatagttccagatgtagttggtacaattgggatatcttcagcttctaagggtattgaccatggaatatgaaattgtggagcaagttctcgcattacaatatttccaagtatttttgcacagtcatcataatacttcatggaatttttcacaaaactgaagccattgacatcacagacataggactgtccattggcccgtaacaaatcaaagccacaaactgtttgcttaaaagcaaggcagactttccaagcaattaatttctctcgtgcattgagaataacagggtatcttacttcttttccttcactgtctcgttccaccttgccatcaagtgctggagattttcgagcttcagcatgggcataatctggacccactgtataaaccttaacatcagtaccatctgtgggcataaactcttcatatatatatgagcctgtttttcgtacattgctttctggagaataaacactacttctactgccaatctttctaaagagtctttgacttccaccaccagcagaagttgggtaataaatgtaaacattgtgatcttctgcactgactggcttttctacaaatggcttttgaaaaacttccccatttacttctacatgatcttccccttcaatcagattacattccactccatgggctcctgtgcggcccgagcctccccaacgagcaccaccccctgctccacggcgcccagtcccatcgaccacccaagggctgaggagtgcgagcacacggcgcgtgactggcaggcagctccacctgcagcccgcgaagatctgcagcttcacacctgagcccagcaagaccaagagcccaccgggaggaacgaacaactccagacgcgctaccttaagagctgtaacactcaccgcgaaggtctgcagcttcactcctttgggattatttgggtcacggttcaaaatagcataacgaggaagtaaaataccttcagcttgaagaatactatatacttctctcctatcttgtatgagatactgcatattcaagtcattgattacaaatggattcctgagttttgcataggcaaccgctttgtccagtggaaatcctttagaatggaaagaaataagacaatcacataaaggccagttttccactggttcattcaaaataacctcctcttcaaatactactactgtgatatatttaaataaggagatccgttcaagaatttccttcattggtttggatttggatttctttgccatggaacatattccaaccacaatctgcctttctggtggagaatcatcttcctcctcatcgtcttcatctgcatggtggaagaaatgtcgataatttccaggatttatttctgtatcttctggtccaacgaagaatctgggggcttcactcat

SEQ ID NO: 6415 - DNA, 1713 bp, Homo sapiens
  SIMILAR (688)..(876): 661254mologous to Rattus norvegicus farnesoid X activated receptor,accession number U18374,Smith-Waterman Score=198.
atgtgggatgtggagggtgctggaggagccagtgatgaagcccaggtttctagcttagcaactgagaggtggctgctgctgctactcatggagacagggacctcagaggaggaacaggtttgcctccgagctcctccctatcaattaggaagaatcaagctattgttaggccagaataaactctggctgtcctttggagggctggccaaggctggagcccactcccttagcttgcagggaggtgtggagggagagacgcgagcgggaaccggggctgcgtgcagcgcttgcaggccagctggaattccgggtgggcgtgggcttggcgggcccctcactcggagcagccggccagccctgctggccccgggtaataagggacttagcacccgggccagtggctgcggagggtgtactgggtcccccagcagtgccagcccaccggcgctgcgctggatttctcaccgagccttagctgccttcccgaggggcagggctcgggacctgcagcccgccatgcctgagcctcccacccactccatgggctcctgtgcggcccaagcctccccaacgagcaccaccccctgctccacggcgcccagtcctatcgaccacccaagggctgaggaatgcgagtgcagggcgcatgactggcaggcagctccacctgcagccctggtgccggatccactaggtgaagccagctgggctcctgagtctggtatctctgatgaatatataacacctatgtttagtttttataaaagtattggggaactgaaaatgactcaagaggagtatgctctgcttacagcaattgttatcctgtctccagcctgggcaacagagcgacaccctgtcttcaaaaaaagagaaagaaaaaaacccagtaactgcctggagggagttataaaggctgcagcggaacttgctgtgggtttaccctggaacttgggaaagtttcatacaggagatggtacttctgctgggcttcaagggatagccccaaattcagtgggtccaggtcagccagctcccgagtggatgtggggttgggagcggctcttaacagaccaggataaaactcagggaagcgccttcagctgcaccgcaacattccaggacgctcagaagcaattattacaggcgaggttcattcacctctcaggcctgtgggaacaacaggacgggctgtggctttcgaactggctgtcgctgaaaggccagatcggaggacctgctctgactgaaccacttcgcctttcagtgaacagagggacttggccaccgaagctccgagacgcccggaggcgcagcgctggacgcgctgacaggcgagcgcccacgggtcgcgtgcttcccggcagcccgggggcggggcctcagaccacgcccccgccttatgattggtcccttcgaaacaggcggcggccagcggctactgaccctgaggcccaggcggcggcggcagcggcggcgtccatgcagggtctagaacgcccacatgtgcggaactggggaatagagctggagaccctgcgcgatgccttccgcccacaaccctcagtttggaggactgcccggggagaggctggcaaaagaaagggaaggcttgtagagtgccttggaagtcagaggaaagttttggagggcgtgctcctctatgcagtcacccgtggttcctttcctaatcttttcacaccgagggattga

SEQ ID NO: 6416 - DNA, 801 bp, Homo sapiens; identical to SEQ ID NO: 2756
  SIMILAR (316)..(600): 321254mologous to Homo sapiens Human bcl2 proto-oncogene mutant protein fragment 72,accession number Y21224,Smith-Waterman Score=112.

SEQ ID NO: 6417 - DNA, 1275 bp, Homo sapiens
  SIMILAR (1055)..(1144): 401254mologous to Rattus norvegicus huntingtin,accession number AJ224997,Smith-Waterman Score=64.
atggggcaggcctgccagaacctctctgggaagtctgatgatcttcctggggatcttgcaatccgaggaagcccagggccagaccccagggatgaatctagtcaggctctcagacctattcccggccactcctcagggaaaccagctgaatccacgtttgacttgtaccaacagccgccccactacaatctggaaaggattcagtggagagcatggataaaaatctattactcggtggtatttccctacgagcctgtggtgttcagtgtcagctccagcgctagccctgggctccttgcagacaccaagcacactgggccacaggccagtttgagaactgccgctttagagaaactcaccaagaaagagacagaaaaccaccagcagcagcaacagcagcaacagtccaggcaacacctgggccatgaaagagaaaaggcttctgtggagggtgagactactttggacttcacagaaggggttgtagtttcaaatgtatctctaaacatttcaccaaatggcactggggaaggtgtaatgcaggaggaaaaggacagctccacatgcgaaggcagagaaatagaaaagtacagagtatgttcagggtgccacatgcggacacagcagaagcaggccatcgaaactagaaagaattcttctcatccctacaccccagaagaggccataaaacccagctatgagccactcattccagcagagtcctccctgtacctggaagaaaagaatgttcttatcctcagagaggtgtggagggagaggcgcgagcgggaaccggggctgtgtgcggcgcttgtgggccagctggagtttcgagtgggcttgggcttggcgggccccacactcagagcagccggccagccctgctggccccaggcaatgagggacttagcacccaggccagtggctgcggagggtgtactgggtccccccagcagtgccagcccaccggcgctgcgctcgatttctcaccgagccttagctgccttcccgcggggcagggctccagacctgcagcctgccatgcctgagcctcccacctactccatgggctccggtgcggcccaagcctccccgacgagcagcaccccctgctccacagcgcccagtcccatcgaccacccaagggctgaggagtgcgagcgcacggcgcgggactggcaggcagctccacctgcagccctgttgcaggatccactaggtgaagccagctgggatcctgagtctggtggggaggtggatagtctttatgtctag

SEQ ID NO: 6418 - DNA, 444 bp, Homo sapiens; identical to SEQ ID NO: 6194
  SIMILAR (46)..(258): 641254mologous to Homo sapiens hypothetical protein,accession number AL162044,Smith-Waterman Score=229.

SEQ ID NO: 6419 - DNA, 457 bp, Homo sapiens
  SIMILAR (76)..(2): 641254mologous to Homo sapiens hypothetical protein,accession number AL162044,Smith-Waterman Score=83.
atgggcttggtgggcctgcactcggagcagccggccggccctgccggcccaggcagtgagagacttggcacccgggccagcggctgcagagggtgtactgggtcccccagcagtgccggcccaccggcgctgtgctcgatttcttgccgggccttagctgccttcccgctgggcagggctcgggacctgcagcccgccatgcctgagcctcccacccactccatgggctcctgtgcggcccgagcctccccgacgagcaccaccctctgctccacggcgcccagtcccatcgaccacccaagggctgaggagtgccagcgcatggcgcgggactggcaggcagctccacctgcagcccggacatatgtagagtgtgtcggtcagaaggaacacctgagaaaccgctttatcatccttgtgtatgtactggcagtattaagtttatccatcaagaatg

SEQ ID NO: 6420 - DNA, 422 bp, Homo sapiens
  SIMILAR (156)..(1): 1001254mologous to Homo sapiens KIAA0433,accession number AB007893,Smith-Waterman Score=280.
ctttctaaagagtctttgacttccaccaccagcagaagttgggtaataaatgtaaacattgtgatcttctgcactgactggcttttctacaaatggcttttgaaaaacttccccatttacttctacatgatcttccccttcaatcagattacattccactccatgggctcctgtgcggcccgagcctccccaacgagcaccaccccctgctccacggcgcccagtcccatcgaccacccaagggctgaggagtgcgagcacacggcgcgtgactggcaggcagctccacctgcagcccgcgaagatctgcagcttcacacctgagcccagcaagaccaagagcccaccgggaggaacgaacaactccagacgcgctaccttaagagctgtaacactcaccgcgaaggtctgcagcttcactc

SEQ ID NO: 6421 - DNA, 1410 bp, Homo sapiens
  SIMILAR (1)..(1050): 921254mologous to Homo sapiens KIAA0433,accession number AB007893,Smith-Waterman Score=1666.
atgcatttaattaaaaaccctgtgaagacctgtgataaagtttattccttaattcagagtttgacttctcaaatcagacatcgaatggaagatcctaaatcatcagatattcagctttaccatagtgaaacattggagcttatgctacgtagatggtccaagttagagaaagactttaaaacaaagaatggaagatatgatattagtaaaatccctgacatatatgactgtataaaatatgatgtccagcataatggttccttgaaattagaaaacacaatggaattatataggctttcgaaggcattagcagatattgttatccctcaggaatatggtataactaaagctgaaaaactggagattgccaaaggctactgtactcctctggttagaaaaattcgctcagaccttcagaggacacaagatgatgacactgtaaataaacttcatcctgtgtattctagaggtgttctgtctcctgaacgtcatgttcgtactagattatattttaccagtgaaagtcatgtacattctttgctgtctattcttcgctatggtgccttatgcaataccaatgattctcagaatgaagatggaggaatggtgaaggagatggaatcaaaggatgaacagtggaaacgagctatggattatttaaacgttgtcaatgagctcaactacatgactcagattgttatcatgctttatgaggatcctaataaggatctttcctcagaagaacgctttcatgttgaattacactttagtccgggagccaaaggttgtgaagaagacaaaaatttgccatctggctatggatatagaccagcttccagagagaatgaaggcaggagaccttttaaaattgataatgatgatgaaccacatacttctaaaagagatgaagttgatcgagctgtgatattgtttaaaccaatggtatcagagccaattcatatacacaggaagtctccacttccaagatctaggaagacggctacaaatgatccggccagcctggccctggacaatgagggacttagcacccgggccagtggctgcggagggtgtactgggtcccccggcagtgccagcccaccggcgctgcgctggatttctcaccgagccttagctgccttcccgcagggcagggctcgggacctgcagcctgctatgcctgagcctcccacccactccatgggctcctgtgcggcccgagcctccccaacgagcaccaccccctgctccacggcgcccagtcccatcgaccacccaagggctgaggagtgcgagcacacggcgcgtgactggcaggcagctccacctgcagccctggtgcgggatccactgggtgaagccagctgggctcctgagtctggtggggaggtggagagtccttatgtctag

SEQ ID NO: 6422 - DNA, 654 bp, Homo sapiens; identical to SEQ ID NO: 627
  SIMILAR (218)..(370): 411254mologous to Myxococcus xanthus response regulator FrzZ,accession number AF049107,Smith-Waterman Score=105.

SEQ ID NO: 6423 - DNA, 964 bp, Homo sapiens
  SIMILAR (587)..(333): 981254mologous to Homo sapiens Similar to chromosome 2 open reading frame 3,accession number BC000853,Smith-Waterman Score=443.
tttgttgtgacagtttaggttcttcataaactttgataactgtgttagttataactgatggagtcaactgatggtgaaaacgaagagcctcccaactgtacacgattgttttatttcccccaaggagtccaaaaggcagatgcagatagcgggcaagtgctcgagctattttctcgctcactaccttctggataagtctttctggataagactcagcatggcttgtggtcggcagcaagttatagaacccccagagaaggatccagagaccccgcggccccttcccgccctgtgccgtcacctccccgcttccccgcgtctccctggacacctgagccttcgtccgcgcggggagccgctttggtggcacgccgggagctcgcccagacccggccccggccacgagggccccgaacccggtggggcagtcccgccacctgcgcgcggcctcctccagagggcggctcttcctccgcagaacccgggaccggaagttccctcggcgccccaggctcagcaggcgactcctcggcgccatcgctgtcgctggaatcagccgcgcgctgccgaaaagtccttttcggccggcgctgtgctcgatttctcgccgggccttagctgccttcccgcggtgcagggctcgggacctgcagcccgccatgcctgagcctcccatccactccatgggctcctgtgctgcccgagcatccccgacgagcaccaccccctgctccacggcgcccagtcccatcgaccacccaagggctgaggagtacgagcgcacggcgccggactggcaggcagctccacctgcagccccggtgcgggatccactaggtgaagccagttgggctcctgagtcagaaggaagaaactccaaacacatctgaacatcagaaggggcagaccccagacgcgccaccttaagagctgtaacgctcaccgcgagggtccgcagcttcat

SEQ ID NO: 6424 - DNA, 838 bp, Homo sapiens
  SIMILAR (60)..(326): 321254mologous to Haliotis rufescens lustrin A,accession number AF023459,Smith-Waterman Score=93.
cttgagctaggcacagggtgctgattggtgtgtttacaatccctgagctagatatactctccacatccccaccagactcaggagcccagctggcttcacctagtggatcccgcaccagggctgcaagtggagctgcctgccagtcctgcgcggtgcgctcgcattcctcagcccttgggtggtcgatgggactgggcgcagactcaggagcccagctggcttcacctagtggaacccgcaccagggctgcaggtggagctgcctgccagtcccacgccatgcgcttgcattcctcagcccttgggtgatcgatgggactgggcgccatggagcagggggtggtgctctttggggaggctcgggccgcacaggagcccatggagtgggtgggaggctgaggcatggcgggctgcaggtccagagccctgccccacgggaaggcagctaaggctcggtgagaaatcgagcgcagcgccagtgggctggcactgctgggggacccagtacaccctccgcagccactggcccgggtgctaagtctctcattgcccgcggccagcagggctggccggctgctccgagtgcagggcccgccaaacccacgcccacggggaactccagctggcccgcaagcgccgcaggcagctccggttcctgctcgcgcctctccctccacaccttcctgcaagctgagggagtgggctccagccttggccagcccagaaaggggctcccacagtgcagcagcaggccgaagggctccccatcccccgacttccagaagagtggatttctttgcctttcctcgggcaccaaggagagcattcgggtatggcat

SEQ ID NO: 6425 - DNA, 2234 bp, Homo sapiens; identical to SEQ ID NO: 3179
  SIMILAR (852)..(1361): 451254mologous to Felis silvestris polyprotein,accession number X51929,Smith-Waterman Score=350.

SEQ ID NO: 6426 - DNA, 1608 bp, Homo sapiens
  SIMILAR (492)..(28): 1001254mologous to Homo sapiens sperm protein 10,accession number M82968,Smith-Waterman Score=809.
ctagtagttttctacgtactgcacacttgtacctgtagatgtgcttgaaattggtgcacctgaagcctgttcccctgaagcgtgctcacctgaaggctgttcacccgaggcctgctcaccagaaggctgttcaccggagccatgttcacctgaaggctgttcatctgaaggctgttcacctgactcaagctcactcaaaggctgttctccggagaggtgttcacctgaaggctgttctcctgaaggctgctcacctacagtatgctcaccttcagcatgttcagtcgcagcgggctcacctgaagcatgctcactctcagcatgttctccagaagtgtgctcggccacagtgtgcttgcttgaaccatgctcactggaaccatgctcacttaaagtgttcaggcctgaagaagtctcatataaagcctcagcatcagaagggttttcaagtgaaaagaactcacctggaagttgctgaactgaagtttgatgatagaggtgggggactagcttaatgccagtgcccactgcttcgtacaggttggggtacttgtaggtatgagcaggacgggtctgggcagtatggcttgctgcctgggaagatgttcccataatgaggcattttggcccttgttcccgcagaatgtgatgctgatgttccttggactgaaattcggagaaatctggacaagcttcagagaggagctcccattccattagcctctcgcagtttatatagcagaaatcctttcctgacctccgcaggcccagaccactggtccattctgcatgaactatcccttcctggaggctggtgaagcctacacgggcaccagaaggcctctcaagtttgtgctgactggccctcacaacctcagagctcagggcacaggagcgagtgccatcttcccagaccatgcgggggcctccactgttaaaaccctgttcaggcagcaacttccaggactcatcgcccaggaggaagagcagagccacactcagtgccaatagcttgtccatcgtcctcaggaaggaggtcctggaagcaggctgccactgaaaggccagctttcccaggctttggctctctcctagcccagactcaggagcccagctggcttcacctagtggatcccgcaccggggctgcaggtggagctgcctgccagtcccatgccgtgcgctcgcattcctcagcccttgggtggtcgatgggactgggcgccctggagcagggggtggtgctcgtcggggaggctttctctctggctgcccttaacatttttttcttcatttcaattttggtgaatctgacaattatgtgtcttggagttgctcttctcaaggggtatctttgtggtgttctctgtatttcctgaatttgaatgttggcctgccttgctagattggggaagttctcctggataatatcctgcagagtgttttccaacttggttccattctccccgtcactttcaggtacaccaattagacgtagattttgtcttttcacatagtcccatatttcttggaggctttgttcatttctttttattcttttttctctaaacttctcttcatgcttcatttcattcatttcatcttccat

SEQ ID NO: 6427 - DNA, 807 bp, Homo sapiens
  SIMILAR (338)..(460): 441254mologous to Homo sapiens Human bcl2 proto-oncogene mutant protein fragment 14,accession number Y21166,Smith-Waterman Score=79.
atggggccttctgattgctgcttgagtgcgctggctcctgagggtattaaaccatcagctattaatgctggtggctctgagcagggcacctggatgggcttgctgcagagcaagggcgaggccagcctgtgggcctgggcagggccaggacggagaaggagctcaggacgttcagaatcccagacagcacgggtcctgtcggctgtgcccctgcccagggatgtccccaactctctccgaatctgtgcctctgctcagaatctcaggttccagtttccaccttacaactcattgctcccagctgccttcctgcggggcggggctcgggacctgcagcccgccatgcctgagcctcccacccactccatgggctcctgtgcagcccgagcctccccgaagagcaccaccccctgctccacggtgcctagtcccatcgaccacccaagggctgaggaatgcgagcgcacggcacgggattggcaggcagctccacctgcagccccggtgcgggatccactagcagtctttagctctggttaccggcagaagcccatctctgtctgcagtcttggacactgcacctgggacaggtgtctgttacccagagctgctgtagccaccaacagagctttgagtgcaggcttcacaggacctccccacgcagaagccaccgtgggcttcaggttaggaggtgacaaggctgtcagggccgtgattgcaaagctgtctccatcacatcccctgctgctccttgcaggaagacacagagtccatttcccatcccatgaaatcgggctgcttccatga

SEQ ID NO: 6428 - DNA, 390 bp, Homo sapiens; identical to SEQ ID NO: 6198
  SIMILAR (244)..(170): 481254mologous to Mycobacterium avium subsp. paratuberculosis fibronectin-attachment protein FAP-P,accession number AY007557,Smith-Waterman Score=53.

SEQ ID NO: 6429 - DNA, 363 bp, Homo sapiens; identical to SEQ ID NO: 6199
  SIMILAR (239)..(9): 291254mologous to Homo sapiens Human secreted protein sequence SEQ ID NO:240,accession number Y87201,Smith-Waterman Score =88.

SEQ ID NO: 6430 - DNA, 1513 bp, Homo sapiens; identical to SEQ ID NO: 6200
  SIMILAR (1133)..(1378): 981254mologous to Homo sapiens cell recognition molecule Caspr2,accession number AF193613,Smith-Waterman Score=432.

SEQ ID NO: 6431 - DNA, 3594 bp, Homo sapiens; identical to SEQ ID NO: 2758
  SIMILAR (160)..(636): 851254mologous to Mus musculus retinoid X receptor interacting protein No.6,accession number U09416,Smith-Waterman Score=711.

SEQ ID NO: 6432 - DNA, 1635 bp, Homo sapiens
  SIMILAR (1122)..(997): 881254mologous to Homo sapiens Human secreted protein, SEQ ID NO: 7217,accession number G03136,Smith-Waterman Score=187.
gtaggcctttcttacctggacactactgtttgttctggatatgctaaccactttaaagacgttgatgattctaaacactcattcaggctggccaaggccggagcccactacctcagcttgcagggaggtgtggagggagacgcacgagcgggaaccggggctgtgtgccgtgcttgcgggccagctggggttccgggtgggcgtgggcttggtgggccccacactcggagcagccggccagccctgctggccccaggcaatgggggacttagcacccgagccagtggctgcggagggtgtactgagtgccccagccgggctggcccaccggcactgcgcttgatttctcgccgggccttacctgccttcccatggggcagggctcgggacctgcagcctgccatgcctgagcctcccacccactccatgggctcctgtgcggcccgagcctccccgatgagcaccaccccctgctccacggcacccagtcccatcgaccacccaagggctgaggaatgtgagcgcacggcacaggactggcaggcagctccacctgcagccccggtgtgggatccactaggtgaagccagctgggctcctgagtctggaactaacatttccattacacctggaaatgccacatttgtgacccgggtgcagggacaggcttggtttgcctcatgtatcactggtcatgatatgtctagtttaaaaacttccagtgtcgtggtattaaggagacaatctgaggcacttctaccagccaatttgacatgcaattggcaagattcttctgcccttgccaccttagaaagtgccctgtcccaggtcagacacaaaagattcacatttacacttatggtctttacaggctcagccatagacattatggcaactgttagcattgctgttgtatctattactgaatcagtacaaacaactgcttttgtagataatctggccaaaaatatatgtgatgaacttctcctacaggacatggatgaagctggaaaccaacattctcagcaaaataacacaagaacagaaaaccaaacaccacatgttctcactcataagtgggagttgaacaatgagaacatacggatacagggaggggaacattacatactggggcctgttggtggcagggatgagaagacgctgttgctgaggacttactgtttaaagtcacaagaaggagcagacacaaaatgcagaaataagcacaacaaagagacacagaaacagtccaagtctctggtatactcttccaccctgaatcctgagaaactcttagtgtgtaagagactgtctcttgaactaactcggccagaaaacactctcagatgcactaacatagggaagctaaaagcagtcgcggggggtatgtctgcagcttcaggaatatatctggaaacagacacacaaccctaccccctgaaacaggaattaaaagaaattaaagaatgtgtaggcaaaaactcagttgtagtggtgtttctggtaagaaagaagcttagtgtttcccagtatgcatttgcacgttgtttggatgctaagcactccacctcagagaacgttgagatagcggggaagctcagaatccagtcatttgaagtaggaaaacaactctga

SEQ ID NO: 6433 - DNA, 565 bp, Homo sapiens
  SIMILAR (439)..(540): 581254mologous to Human coxsackievirus B3 polyprotein,accession number AJ304427,Smith-Waterman Score=127.
tcagcttgcagggaggtgtggagggagaggcatgagcgggaaccggggctgcgtggggcgcttgcgggccagctggagttccgggtgggtgtgggcttggtgcgccctgcactcggaggagccggccagcccggcgctgcgctcgatttctcgccgggccttagctgccttcccgcggggcagggctcgggacctgcagcccgccatgcctgagcctcccaccccctccgtgggctcctgtgcggcccaagcctccccgacgagcgccgccccctgctcgatggcgcccagtcccatcgaccacccaagggctgaggaatgcgtcgcacggcgcgggactggcaggcatgatgaactgatagttgcattgccattcatgatgatcccctggcattcgtccattcagccattcaccattcacccattcaactggaattttggttgaatgccggaattgtgtccacaaattgtggatggatagttggttggctggctggatggctggctggatggctggctggatggatggtgaatggctggcggcggttcggttgctttgaagcat

SEQ ID NO: 6434 - DNA, 450 bp, Homo sapiens
  SIMILAR (164)..(102): 1001254mologous to Homo sapiens Human secreted protein, SEQ ID NO: 7678,accession number G03597,Smith-Waterman Score=108.
ccctcactcacactgctggaaggttaaagtcgacttcacgctagtttaaggaaatagctaacgctgataaccatgtcccaagcactgctctaagttcccaatgtgtccggaattggtgggttcttggtctcactgacttcaagaatgaagccacggaccctcgcgttttagactatgctaaaaacagcctcaggaccttcagcactgatcaacaatcctgggcatgggctgaccgacagttttcacccagagagtgaagatcatggaggagccatcttaaattcgcgcccagcgcaggctcccaggaatccttatgtcaccgatctcaattcagccaatgtgacaaacacagcagtaattaagtctagagagctaaacacacctcaaaaagaattgtctcttggtatgagtggaatggaataaaatacatggaaacccaaaaaaaaaaaa

SEQ ID NO: 6435 - DNA, 965 bp, Homo sapiens
  SIMILAR (471)..(346): 641254mologous to Homo sapiens Human secreted protein, SEQ ID NO: 7131,accession number G03050,Smith-Waterman Score=141.
aggaggcttggaagagagtcaggactttagccacttcctgggagtaaaagagcctcctccacttatgtcagtagaacccacatggagaccattaagaagccttcctgtacctctcggccaggtatcagtggaccctgagtggggagctggaactcctacccccactcaacagcccccttcaggtatgaaaggaggccaagggtgtaacctggactttcactactgtgtccggaattggtgggttcttggtctcactgacttcaagaatgaagccgcggaccctggccgagtgaagctgcagacctttgcagtgagtgttacagctcttaaggcagagcgtctggagttgttcattcctcccggtgggctcgtgatatcgctgggctcaggagtgaagctgcagaccttcacagtgagtgttacagctcttaaggcagagcatctggagtcgttccttactcccggtgggctcgtgatctcgctgggctcaggagtgaagctgctgcagatcttcgaggtgactgttatagctcataaaagcaacgtggacccaaaaaactcaggagcccagctggcttcacctagtggatcccgcaccagggctgcaggtggagcggcctgccagtcctggtgccgtgcgcctgcactcctcagcccttgggtggtcgatgggactgggcgccgtggagcagggggtggcggtcgtcggggaggctcgggccgcataggagcccatggagggggtgggaggctcaggcatggcgggctgcaggtcccgagccctgccccgcgggaaggcagctaaggcccagcgagaaatccagcacagcgccgggccggccggctgctccgagtgcggggcccgccaagcccacgcccacccagaactccagctggcccgcaagcgctgcgcgcagccccggttcctgctcgcgcctctccctccacacctccctgcaagctga

SEQ ID NO: 6436 - DNA, 1152 bp, Homo sapiens
  SIMILAR (688)..(1071): 411254mologous to Fowlpox virus gag,accession number AF006065,Smith-Waterman Score=274.
atgaagccacggaccctcgcggtgagtgttacagctcttaaaagcagcgtggacccaaacaactcaggagcccagctagcttcacccagtggatcccgcaccagggctgcaggtggagctgcctgccagtcccgtgccgtgcgctcgcactcctcagcccttgggtggtcgatgggactgggcgccgtggagcagggggtggtgctccttggggaggctcgggccgcacaggagcccatggagtgggtgggaggctcaggcatggcgggctacaggtcccgagccctgccccgcgggaaggcagctaaggcccggccaacaccctttggtcacatgaataaaagtcaagccctttctttgctcattgctcagcctctgggtattaatctgctgagctggtggccacctaaatacaatcgtcctgttcccctcattggtctctccggtctcctgattccagccacattttgcctgggggagacccgtgactccaggcatgctatcaggacaacttcaacccgaggggagatcagctctcccgcaacctggtgccgctctctgacagcacaacagaacctaaggggctacaggatgattcaaggaacagtgtgctacaggacctcggtagcccaccagtggctagaaaacaatgcactggaaggcacccttaatgtcctggcatatgcacagggccagttcccagaagcagacccgcactgggacccaaacaaggaagcccaactacagcaactgcagaggtaccaagaggcactcctgcaagttttgagaaaaggagagaaaaaggcattcaatatgggaaacatttcagaggtgcttcagagagcagatgaaagctgtagccagttttatgagagactctatgaggccttccagctttgcagtccatttgaccctgaggctactgagaaccagtgcatggtaaacgcagtgtttgtagggcaaacccagggagacatcaggcgaaagctgcaaaagctagagtgtttcactggcatgaatgtcactcaggttttagaagtggccaccaaggtgtacactaactgtgaggaggagactcagggaaaaggccaatttgctggtggcagcacttatggaaaggggggcgaatgtcccaagacgaagtggatgtag

SEQ ID NO: 6437 - DNA, 2850 bp, Homo sapiens
  SIMILAR (1289)..(1378): 731254mologous to Homo sapiens putative p150,accession number U93563,Smith-Waterman Score=118.
atgagaaaattttgcaggggcagagatattgagaaacacagcatccagttctacccactcctgggaccctcttttactgtcttcgttaagcatcttctgcatataacttgtggcctgcagcacctggctaagatcttcctccactccctccctgggagactgcacagcctagctgggaaagtcaaagccatcaaggacccagaaaatgttacaagggctcctcaaaagccagcaagtgccagaaccaccacccaagcagctggttgcagagccgactccccgttcttaaagggcctgagcctatgggaccggaagagctccacagtctgcctgtctctggtggtggaagaccactctcagaagcgcgggctgaggcttgcacacagtcagattcccgcgcagcacgtgcacagacccacctctgctcagagtgagcctaaggtaggagcaggagagagagcatgtcttaagagagaaagccaccttcatgaacagacgctcacctgctccattaatgccaagagcagccagccagccctgctggcccggggcaatgggggacttagcacccgggccagtggctgcggagggtgtaccgggtcccccagcagtgccggcccaccggcgctgtgctcgatttctcgccgggctttagctgccttcccacggggcagggctcgggacctgcagcccgccatgcctgagcctcccacccactccatgggctcctgtgcggcccgagcctccccgacgagcaccaccccctactccacggcgcccagtcccattgaccacccaagggctgaggaatgtgagcgcacggcgcaggactggcaggcagcttcacctgcagccccggtgcgggatccactaggtgaagccagctgggctcctgagtctggaactaacatttccattacacctggaaatgccacatttgtgacccgggtgcagggacaggcttggtttgcctcatgtatcactggtcatgatatgtctagtttaaaaacttccagtgtcgtggtattaaggagacaatctgaggcacttctaccagccaatttgacatgcaattggcaagattcttctgcccttgccaccttagaaagtgccctgtcccaggtcagacacaaaagattcacatttacacttatggtctttacaggctcagccatagtcattatggcaactgttagcattgctgttgtatctattactgaatcagtacaaacaactgcttttgtagataatctggccaaaaatatatgtgatgaacttctcctacaggacatggatgaagctggaaaccaacattctcagcaaaataacacaagaacagaaaaccaaacaccacatgttctcactcataagtgggagttgaacaatgagaacatacggatacagggaggggaacattacatactggggcctgttggtggcaggttgccaacatccaaactcgctgttgattgccagctcctgctccttgcagcagcccagcatgctctctgctggtgccaaaatacccttccaccaaaccccgctaacttctggaactgtcctagagggtttcctaccctagcaagtgagcttgcctatgtcagccctaaccttgctcttgtcattcagctgagccagaggaaaaaatttgagctattctggggtggtctacagagaaccatcttctttcccttcagtgttctcagaatattgactgttgatgaacaagccaatgatgtgagtgtggctgcagcaaggacccttcaaattttcagagatgacatgattgtatatctagaaaaccccattgtctcagcccaaaatctccttaagctgataagcaacttcagcaaaatctcaggatacaaaatcaatgtacaaaaatcacaagcattcttatacaccaacaacagacaaacagagagccaaatcatgagtgaactcccattcacaactgcttcaaagagaataaaatacctaggaatccaacttacaagggatgtgaaggacctcttcaaggagaactacaaatcactgctcaaggaaataaaagaggatacaaacaaatggaagaacattccatgctcatgggtaggaaaaatcaatatcgtgaaaatggccatactgcccaaggtaatttacagattcagtgccatccccatcaagctaccaatgactttcttcacagaattggaaaaaactactttaaagttcatatggaaccaaaaaagagcccacactgccaagtcaatcctaagtcaaaagaacaaagctggaggcatcacactacctgacttcaaactatactacaaggctacagtaaccaaaacagcatggtactggtaccaaaacagagatatagatcaatggaacagaacagagccctcagaaataacgctgcttatctacaactatctgatctttgacaaacctgagaaaaacaagcaatggggaaaggattccctatttaataaatggtgctgggaaaactggctagccatatgtaggaagctgaaactggatcccttccttataccttatacaaaaatcaattcaagatggattaaagacttaaatgttagacctaaaaccataaaaaccctagaagaaaacctaggcattaccattcaggacataggcatgggcaaggacttcttgtctaaaacaccaaaagcaatggcaacaaaagacaaaattgacaaatgggatctgattaaactaaagagcttctgcacagccaaagaaactaccatcagagtgaacaggcaacctacaaaatgggaaaaaattttcgcaacctactcatgtgaaaaagggctaatatccagaatctacaatgaactcaaataa

SEQ ID NO: 6438 - DNA, 1162 bp, Homo sapiens
  SIMILAR (475)..(678): 361254mologous to Homo sapiens Autoantigen diagnostic of endometriosis,accession number Y95852,Smith-Waterman Score=100.
ttacatcaagcatattacatgagctgctggtaaacagtacagacaatcatggcctacagctgagcagatgctgatgctgatgctgatgctgatgctgatgctggattcttggttcaaggagcagagaaaaggaaaactaaaagctccccgcacactagcactgttgtcaaggaacgtgatcactactgtctttgctccatggagctgaacgcctgaggtatggcctgctgacattccagtggcaaatcctgcccctcgtcctgttgccttttcctgctggctcagcagtatgccatctccacctggatacctgatggcctcgtactgctctacacccaaaatgttcaaagtaggatcaccattcaaaacagatcttccctcaacacccccacttctatcgtgaatgccacaattcttctcccctgcctgggctcccactttggtggcatttcaggagcccttcagcccctccactgcactgtgggagcccctttctgggctggccaaggccagagcccactccctcagcttgcagggaggtgtggagggagaggcacgagcgggaactggggctgcatgcggcgcttgcgggccagctggagttccgggtgggtgggggcttggtgggccccgcactcggagcagccagccagccctgctggccccgggcaatgggggacttagcacctgggccagtggctgtggagggtgtactgattcccccagcagtggctggcccacctgcgctgtgctcgatttctcgtggggccttagctgccttcccgcggggcagggctcgggaactgcagcccgccatgcctgagcctcccacccactccatgggctcctgtgcagcacaagcctccccgacgagcaccaccctcctactccacggcgcccagtcccatcgaccacccaagggcaatcagcgccgtcaaaacagaccattcagctctaccaatcagcaggatgtgggtggggccggataagagaataaaagcaggctgcggagccagcagtggcaacccgctggggtccccttccacagtgtggaagctttgttctttcattctttgcaataaatcttgctgctgctcactctttgggtccacgctgcttttatgagctgtaacactcaccgcgaaggtctgcagcttctctc

SEQ ID NO: 6439 - DNA, 1038 bp, Homo sapiens
  SIMILAR (1)..(465): 921254mologous to Homo sapiens ribosomal protein L21,accession number X89401,Smith-Waterman Score=752.
atgacgaagacaaagggaaagaggagaggcacccgatatacgttctctaggccttttagaaaacatggagttgttcctttggccacgtatatgcgaatctataagaaaggtgttattgtagacatcaagggaatgggcactgttcaaaaaggaatgcctcacaagtgtcaccatggtaaaactggaagagtctacaatgttacccagcatgctgttggcattgttgtaaacaaacaagttaagagcaagattcttgccaagagaattaatgtgcgtattgagcacattaagcactctgagagctgggatagcttcctgaaatacatgaaggaaaatgatcagaaaaagaaagaagccaaagagaaaggtacctgggttcaactgaagtgccagcctgctccacccagagaagcacactttgtgagaaccaatgagaaggagcctgagctgctggaacctattccgacactggatagggaattccccccattacaagcaaaccctggggtgactgctggtcatggaaacaagccaccaaagaattatggaagccccttgttggagatgtcctcactgttctcccggaactgccctccagggcactgtgctctcaccctgaccacacacccctctccccagcacccctgccagcccctggcgagccaggtgccaggagccaacagtatgaattacgccccagaccaggaaagacaactaacaactcacagcgaagctctgtttacactggtattgatccagggctgcggtgactcggaggccatggagagccagactgccttgcagaagctgccccatcgtggggagcccagccagctctccccagaggagaagcgagacctgcagcttcatcctcacaccagccagcttgagggtcagagggtcgccatcaggaagggggccccaagggcagatggagctcactacagtggtgaaggggccattggagaagaggccaggccacagaattctgcctgctggaaacactgggtcttcacggtcaacaaagcatcctcatga

SEQ ID NO: 6440 - DNA, 673 bp, Homo sapiens
  SIMILAR (73)..(579): 371254mologous to Mus musculus ribosomal protein L21,accession number U93863,Smith-Waterman Score=146.
atccttaattaaattaatcccccccccccgccctttcggccggaaccgccatcttccagtaattcgccaaaaatgacggaccacaaaggggaaagaggagaggcaacccgatatatgttctctaggcccttttagaaaaccatggagttgttcctttgggcccccatatatgccgcatctcataggaaaggtgatattgtagacactcaagggaatggggtactgttcaaaaaagggaattgcccccacaaagtgttacccatggccaaaacctggaaggagtcttaccaatgttaccccagcatgcttgttggccatttgttgtaaaccaaccagttttagggcaaagttttttcccaagagaattaatgtgccgtattgagcacatttaagcactcctaagagcccgagataagcttcctgaaaccgttttgaaggaaaatgattcagaaaaagaaagaagcccaaatgagaaaggtacctggggttccaacttaaagcgccaccctggctccaccccagaagaagcacactttgtgagaacccaatggggaaggagcctggagcttgctggaaccctattccctatgaatttcatgggcataataggtgttaaagaaataaaataaaagacctctggactatttaaaaaaaaaaaaaaaaaaaggccagg

SEQ ID NO: 6441 - DNA, 1023 bp, Homo sapiens
  SIMILAR (1)..(699): 661254mologous to Homo sapiens p40,accession number U93567,Smith-Waterman Score=805.
atggggaaacaccagcgcaagaaggctgaaaattcccaaaaccagaacacctgtcctcctccaaacgatcacaactcctcaccagcaagggaacaaaactggatggggaatgagtttgatgaactgacagaagtaggcttcagcaggtgggtaagaacaaactcctcggagctaaaggagcatgttttaacccaatgcaaggaagctaagaaccttgaaaaaagaataaccgatgtagagaagaacataaatgacctgatggagctgaaaaacacagcacaagaactttgtgaagaatacacaagtatcaacagccaaatcgatcaagcagaagaaaggatatcagagattgatgatcaacttaatgaaataaggcgtaaacacaagattagagaaaaaagaataaaaaggaatgaacaaagcctccaagaaatatgggactatgtgaatagaccaaatctacatttgattggtgtacctgaaagtgacagggaaaatggaaccaagttggaaaacactcttcaggatattatccaggagaacttccccgacctagcaagacaggcgaacattcaaattcaggaaatacagagaacaccacaaagatactcctcaagaagggcaaccccaagacacgtaatcatcagattctccaaagttgaaatgaaggaaaaagtgttaagggcagccaaagagaaagccaccttcaatagcacatggtatgaccagagggctcttctggagacaaatcagggtaaaacaaagctcagtgccaatgttgcaaatgcaaactgcagagacctgccagggccaacacatggagcaattactcaaaagaaacacaccgagaaaaaggcaatgaatgacaataggaacctaataaggaaaagtgtgttcgccaatggattcatctttgctcataaacaagctgcctgttggttcatgtcctacatgaatgtatttcagaaagaaatggattggaagccaagagttgtatcaacaggctctgaggcgaggcactga

SEQ ID NO: 6442 - DNA, 423 bp, Homo sapiens
  SIMILAR (1)..(330): 981254mologous to Homo sapiens HSPC011,accession number AF077035,Smith-Waterman Score=547.
aaaatgcaaaagctgctaaaagtgagagtgaccaggcttgttctggatccctatttattaaagtattttaataagcggaaaacctactttgctcacgatgcccttcagcagtgcacagttggggatattgtgcttctcagagctttacctgttccacgagcaaagcatgtgaaacatgaactggctgagatcgttttcaaagttggaaaagtcatagatccagtgacaggaaagccctgtgctggaactacctacctggagagtccgttgagttcggaaaccacccagctaagcaaaaatctggaagaactcaatatctcttcagcacagtgaagcgggagtggaagaaggatctaaagggaaaaactgacatgtttatgttatggaaaaagaaatttttctaagtttcatcacataaaaaaa

SEQ ID NO: 6443 - DNA, 427 bp, Homo sapiens
  SIMILAR (422)..(183): 981254mologous to Homo sapiens HSPC011,accession number AF077035,Smith-Waterman Score=413.
  misc_feature (1)...(427): n = a,t,c or g
aatacaggcttgattgaaagaattctgaccagtggctggtcattannnnnnnnnnnnnnnnnnnnnnnnnnnnnnnnnnnnnnnnnnnnnnnnnnnnnnnnnnnnnnnnnnnnnnnnnnnnnnnnnnnnnnnnnnnnnnnnnnnnnnnnnnnnnnnnnnnnnnnnnnnnnnnnnnnnnnnnnngtttccgaactcaacggactctccaggtaggtagttccagcacagggctttcctgtcactggatctatgacttttccaactttgaaaacgatctcagccagttcatgtttcacatgctttgctcgtggaacaggtaaagctctgagaagcacaatatccccaactgtgcactgcggaagggcatcgtgagcaaagtaggttttccgcttattaaaatactttaataaatagggatccaacgaaa

SEQ ID NO: 6444 - DNA, 348 bp, Homo sapiens
  SIMILAR (127)..(315): 951254mologous to Homo sapiens carrier protein-like; similar to Q01888 (PID:g266574),accession number AC004973,Smith-Waterman Score=308.
atggagatggtgaaagtcaatctggagtgtaatgccaagctgtacaggcatggcaccaacatctgctcagctcctggtgagggcttcagggagcttccaatcataggagaaggtgaagaggagccagcatatcacatgtgcacaattggggatatcgtgcttctcaaagctttacctgttccacgaacaaagcatgtgaaacatgaactggctgagattgttttcaaagttggaaaactcgtagatcctgtgacaggaaaaccttgtgcaggaactacctatctggagagtccattgagttcggaaaccacccaggtattagccacaatcaacatcctgcattcctaa

SEQ ID NO: 6445 - DNA, 335 bp, Homo sapiens
  SIMILAR (2)..(232): 751254mologous to Mus musculus ribosomal protein L21,accession number U93863,Smith-Waterman Score=299.
aactgtaagagcctacaatgttccccagcatgctgttggcattgttgtaaacagacaagttaagggcaagattcctgccaagagaattaacgtgggtattaagcactttaagcactctacaagctaagagaatttcctgaaacgcatgaaggaaaatgatcagaaaaagaaggaagccaaagagaaagttacctggattcaactgaagcaccagtcagctccacccagagaagacaatgtgagagaaccaatgggaaggagcctgagttgctggaaccacttccctatgaattcatgcataatacatatatacacatatatgtgtgtgtacatat

SEQ ID NO: 6446 - DNA, 711 bp, Homo sapiens
  SIMILAR (8)..(487): 861254mologous to Homo sapiens ribosomal protein L21,accession number X89401,Smith-Waterman Score=722.
  misc_feature (1)...(711): n = a,t,c or g
cgccacaatgacgattacaaagggaaacaagacaggcaccccatataagtactctacgtcttttagaagacacggagttgttcctttggccacatatatgccaaactataagaaaggtgatattgttgacatcaagggaatgggtactgctcaaaaaggaatgccccacaagtgttaccatggcaaaactggaagagtctacaatgttacccagcatgctgttggcattgttgtaaacaaacaagataagggcacgattcttgccaagagaattaatgcgcgtattgagcacattaagcactctaagagccgagatagcttcctgaaacgtgtgaaggaaaatgatcagaatatgaaagaagccccagagaaagggtcctgggatcaactaaagcgccagcctgctccacccagagaagcacactttgtgagaaccaatgggaaggagcctgagctgctggaacctatttcctatgaattcatggcataataggtgttnnnnnnnnnnntaagggacctctgggctcctaaaaaaaaataaaaacccccaaaaataaaaaaagcagctttttttgaggggccccattatttgatcccggggggggtggttaaaacacgggggggtggggaaaacccggggttcccccactattatccccttggggagaaaggagtgatctaacatcggtgcgcccctgtaacaactccccc

SEQ ID NO: 6447 - DNA, 536 bp, Homo sapiens
  SIMILAR (222)..(374): 981254mologous to Homo sapiens ribosomal protein L21,accession number X89401,Smith-Waterman Score=256.
catcatctcatcaaagagagttaaaagtagggatgttctctgcatggcctcttctgatatgattaattgattgtaaattaagtaatcaaggcatactttgttgatttgtcatatctgggtaaaaggtttatggtttatttaataaatgaaactgcaaaatcagttttctacatttctgttatatttttgttaaagcacttaaaagaatttctgctctgtccaggggcaagattcttgccaagagaattaatgtgcgtattgagcacattaagcactctaagagccgagatagcttcctgaaacgtgtgaaggaaaatgatcagaaaaagaaagaagccaaagagaaaggtacctgggttcaactaaagcgccaggtaagaatttggtgtatatttcattggttctgagagcactttaaggttgagatttaacacatcacataattattctattccctttttttttcctttaatagcctgctccacccagagaagcacactttgtgagaaccaatgggaaggagcctgagctgctgc

SEQ ID NO: 6448 - DNA, 553 bp, Homo sapiens
  SIMILAR (63)..(428): 931254mologous to Homo sapiens ribosomal protein L21,accession number X89401,Smith-Waterman Score=589.
acgcctgaggcaccgcgctgtaatttccgggtccacccacgcgtccgcagtaattcgccaaaatgacgaacacaaatttaaataggagaggcacccgatatatgttctctaggccttttagaaaacatggagtggttcctttggccacatatatgcgaatctataagaaaggtgatattgtacacatcaagggaatgggtactgttcaaaaaggaatgccccacaagtgttaccatggcaaaactggaagagtctacaatgttacccagcatgctgttggcattgttgtaaacaaacaaggtaagggcaagattcttgccaagagaattaatgtgcgtattgagcacattacgcactctaagagccgacatagcttcctgaaacgtgcgaaggaaaatgatcagaaaaagaaagaagccaaagagaaagaagttcccatggagcccaccgtgtacatgtctgaaaaggggaggacactttttcctggggagcctgccaatcacataaagaacaaaaggcttctgtgctggaccctgcctgcttatctgtgcag

SEQ ID NO: 6449 - DNA, 964 bp, Homo sapiens
  SIMILAR (313)..(149): 301254mologous to Macaca fascicularis hypothetical protein,accession number AB047947,Smith-Waterman Score=66.
ctacgcgtggctcccgggcgctacgtgttcgacagacttgaaccgcgaccttgtggcctcagaggtcgttcattgggaccgtggggagactctctaacctgtttgaggtccattggcatgggcgggttaaaccatgttctgccagacggggagcagcgtgcgccgggtcgggcctgggccgtgggctgagaaccggactgcgatgttgcggccctgcggggggacatttgcgagaaagacgagactgagtcgcttgggtaattcgccaaaaatgaacgaacaacaaaggggaaagaggagaggcaccccgataataatgttctctaagggccttttaagaaaacatggaagttgttcctttggcccacatatttatgcgaaatctataagcaaaggtgatattgttagacatccaaggggaatggggtaccttgttccaaaaagggaattgcccccacaaagttgttacccatggccaaaacctggaaggagtcttaccaatgttaccccagccatgcttgttggccatttgttgtaaaacaaacaagtttaagggcaaagattcttgcccaagaggaatttaatgtggcgtatttgagcaccatttaggcacttcttaaggagcccgagattagcttccctgaaaacgtgtggaagggaaaatggatccaggaaaaaggaaaggaagcccaaaggaggaaaggttacctgggggtttcaacttaaaaggcgccaccttggcttcccaccccaggaggaagccacatttttgttgaaggaacccattgggggaagggagccttgagcttgcttggaaccctatttcccctattggatttcatggggcattaataggtgttaaaaaaaaaaataaaaaggaccctctgggctacaaaaatgtttctcttcattgagtagaagtgtggtgtcctctcccccaaagaaatatttaaagcaaaaaaaa

SEQ ID NO: 6450 - DNA, 492 bp, Homo sapiens
  SIMILAR (1)..(225): 931254mologous to Homo sapiens EWS protein/E1A enhancer binding protein chimera,accession number U35622,Smith-Waterman Score=369.
atggcatccatggattacagtacctatagccaagctgcagcgcagcagggctacagtgcttacaacacccagcccactcaaggatatgcacagaccacccaggcatatgggcaacaaagctatggaacctatggacagcccattgatgtcagctatacccaggctcagaccactgcaatctatgggcagaccgcctatgcaacttcttatggacagcctcccactgagccacctggaagagaagaaagcaacaagcttcctgcctgccagaagccaaatgctagtgcaaaaacccacatcaagccttccaactccccaccaaaactgatccatggggcccggaaacaaaacagcaactgtgtccaccttgtggttacaaacataaaacccttcaatctccctacccctgaagacaaaggttctaaaatccaacaacctcaatgctatggacaaaacaccaaatccctctctaataacacgtacctcctctaa

SEQ ID NO: 6451 - DNA, 2388 bp, Homo sapiens
  SIMILAR (451)..(2028): 961254mologous to Mus musculus EWS,accession number X79233,Smith-Waterman Score=2845.
agtcgacccacccgtccgcggacgttgagagaacgaggaggaaggagagaaaatggcgtccacggattacagtacctatagccaagctgcagcgcagcagggctacagtgctttacaccgcccagcccactcaaggatatgcacagaccacccagcaggcatatgggcaacaaagctatggaacctatggacagcccactgatgtcagctatacccaggctcagaccactgcaacctatgggcagaccgcctatgcaacttcttatggacagcctcccactggttatactactccaactgccccccaggcatacacgccagcctgtccagggggtatggcactggtgcttatgataccaccactgctacagtcaccaaccacccaggcctcctatgcagctcagtctgcatatggcactcagcctgcttatccagcctatgggcagcagccagcagccacttgccctacaagaaccgaggattgaaaacaagcccactgagactagtcaacctcaatctagcacagggggttacaaccagcccagcctaggatatggacagagtaactacagttatccccaggtacctgggagctaccccatgcagccagtcactgcacctccatcctaccctcctaccagctattcctctacacagccgactagttatgatcagagcagttactctcagcagaacacctatgggcaaccgagcagctatggacagcagagtagctatggtcaacaaagcagctatgggcagcagcctcccactagttacccaccccaaactggatcctacagccaagctccaagtcaatatagccaacagagcagcagctacgggcagcagagttcattccgacaggaccaccccagtagcatgggtgtttatgggcaggagtctggaggattttccggaccaggagagaaccggagcatgagtggccctgataaccggggcaggggaagagggggatttgatcgtggaggcatgagcagaggtgggcggggaggaggacgcggtggaatgggcagcgctggagagcgaggtggcttcaataagcctggtggacccatggatgaaggaccagatcttgatctaggccctcctgtagatccagatgaagactctgacaacagtgcaatttatgtacaaggattaaatgacagtgtgactctagatgatctggcagacttctttaagcagtgtggggttgttaagatgaacaagagaactgggcaacccatgatccacatctacctggacaaggaaacaggaaagcccaaaggcgatgccacagtgtcctatgaagacccacccactgccaaggctgccgtggaatggtttgatgggaaagattttcaagggagcaaacttaaagtctcccttgctcggaagaagcctccaatgaacagtatgcggggtggtctgccaccccgtgagggcagaggcatgccaccaccactccgtggaggtccaggaggcccaggaggtcctgggggacccatgggtcgcatgggaggccgtggaggagatagaggaggcttccctccaagaggaccccggggttcccgagggaacccctctggaggaggaaacgtccagcaccgagctggagactggcagtgtcccaatccgggttgtggaaaccagaacttcgcctggagaacagagtgcaaccagtgtaaggccccaaagcctgaaggcttcctcccgccaccctttccgcccccgggtggtgatcgtggcagaggtggccctggtggcatgcggggaggaagaggtggcctcatggatcgtggtggtcccggtggaatgttcagaggtggccgtggtggagacagaggtggcttccgtggtggccggggcatggaccgaggtggctttggtggaggaagacgaggtggccctggggggccccctggacctttgatggaacagatgggaggaagaagaggaggacgtggaggacctggaaaaatggataaaggcgagcaccgtcaggagcgcagagatcggccctactagatgcagagaccccgcagagctgcattgactaccagatttattttttaaaccagaaaatgttttaaatttataattccatatttataatgttggccacaacattatgattattccttgtctgtactttagtatttttcaccatttgtgaagaaacattaaaacaagttaaatggtagtgtgcggagtttttttttcttccttcttttaaaaatggttgtttaagactttaacaatgggaaccccttgtgagcatgctcagtatcattgtggagaaccaagagggcctcttaactgtaacaatgttcatggttgtgatgttttttttttttttttaaaataaaattccaaatgtttaat

SEQ ID NO: 6452 - DNA, 696 bp, Homo sapiens
  SIMILAR (199)..(693): 771254mologous to Homo sapiens tetratricopeptide repeat protein,accession number U46571,Smith-Waterman Score=645.
atgcctgcgaagaagaagactgggcagccccctaaagtaagaaacattgaacatccaaccatttgcgagagcctaaagtttcgcaaactttttacacggcagctcacttcccagagagagcattccaagcggcaaaggcaaaagttgcagatctcttacaccccagccttacaagtcacacagcaacctagccatgatacaaggagagtggaaatagattctgcctctcagtgggaagctaaactctactataattgggttatggttaattctaagcttaggaaactagataatgcaatacaagactgcacaaatacagtgaagctcaatgacacctatttaaaagcctgcttgagaagagctcagtgttacatgaacaccaaacagtatgaagaagcagtgcacaattatgaaaaagtgtatcagacagagaaaacaaaagaacacaaacagctcctaaaaaatgcacagctgaaactgaagaagagtaagaagaaagattactacaagattctgggagtggacaataatgcctctgaggacgagaccaagaaagcttatcacaaatgggccttgatgcaccatccagattggcacagtggaggcagtgctgaggttcagaaggaggaggggaagttcaaggaaattggagaggcctttaccatcttctctgatcccaagaaaaagactcgctag

SEQ ID NO: 6453 - DNA, 826 bp, Homo sapiens
  SIMILAR (3)..(653): 1001254mologous to Homo sapiens tetratricopeptide repeat protein,accession number U46571,Smith-Waterman Score=1147.
aactgtacacagaagccctggggatagaccccaacaatataaaaacaaatgctaaactctactgtaatcggggtacggttaattccaagcttaggaaactagatgatgcaatagaagactgcacaaatgcagtgaagcttgatgacacttacataaaagcctacttgagaagagctcagtgttacatggacacagaacagtatgaagaagcagtacgagactatgaaaaagtataccagacagagaaaacaaaagaacacaaacagctcctaaaaaatgcgcagctggaactgaagaagagtaagaggaaagattactacaagattctaggagtggacaagaatgcctctgaggacgagatcaagaaagcttatcggaaacgggccttgatgcaccatccagatcggcatagtggagccagtgctgaggttcagaaggaggaggagaagaagttcaaggaagttggagaggcctttactatcctctctgatcccaagaaaaagactcgctatgacagtggacaggacctagatgaggagggcatgaatatgggtgattttgatccaaacaatatcttcaaggcattctttggcggtcctggcggcttcagctttgaagcatctggtccagggaatttcttttttcaatttggctaatgaagggcaaccacccagaacccagaaaatgcagattcactcagtttaatcttgaatgtggaaacagttcacctcctcccttcatcacgtctccgtgtgcttagagcagtttcgttttctcagttggatgccctgtgtctctgtgagtggggtggagcaaagggttgtat

SEQ ID NO: 6454 - DNA, 434 bp, Homo sapiens
  SIMILAR (1)..(432): 651254mologous to Homo sapiens putative p150,accession number U93572,Smith-Waterman Score=456.
atgatactgaatagaggaaagttgaaagcagtccctctgagaactggaacacaacaaggatgcccactgtcaccactcctcttcaacacagtattggaagtcctagccagagtaatcaggcaagagaaagaaataaaggacatccaaatgggtaaagaggaaatcaatctgtcactgtttgctggtgatagaattgtttcctttgaaaacccaaaagactcctccagaaagttcctagaactgataaaagaattcagcaaagtttccagatacaagattaatgtacacaaatcactagctcttgtatacaccaacagtgacctagtggagaatcaaatcaagaactcaaccccttttacagtagctgcaaaaataataaaatacttagaaatatacctaatcaataacatgaaagacctctacaaggaaaacta

SEQ ID NO: 6455 - DNA, 443 bp, Homo sapiens
  SIMILAR (253)..(441): 951254mologous to Homo sapiens Gag-Pro-Pol-Env protein,accession number AF164611,Smith-Waterman Score=332.
  misc_feature (1)...(443): n = a,t,c or g
gcctgcaggaattcggcacgagcnnnnnnnnnnnnnnnnnnnnnnnnnnnnnnnnnnnnnnnnnnnnnnnnnnnnnnnnnnnnnnnnnnnnnnnnnnnnnnnnnnnnnnnnnnnnnnnnnnnnnnnnnnnnnnnnnnnnnnnnacatctggtgcccaacatggaggcttttctctagggtgaaggtacgctcgagcgtggtcattgaggacaagtcgacgagagatcccgagtacgtctacagtcagccttacgacatttgaagttctacaatgaacccatcggagatgcaaagaaaagggcctccgcggagatggtaacaccagtcacatggatggataatcctatagaagtatatgttaatgatagcgaatgggtacctggccccacagatgatcgctgccctgccaaacctgaggaagaagggatgatgataaatatttc

SEQ ID NO: 6456 - DNA, 2651 bp, Homo sapiens
  SIMILAR (1170)..(1736): 1001254mologous to Homo sapiens FLJ00032 protein,accession number AK024442,Smith-Waterman Score=1081.
gtctcctgcctgcctttctgctgctctgttcagactctcacttcctgcagttctgcagtcagtttgccccacgcaagacccaaggatctgggtctgtgaataatattcaagccaacatcattgccaagaaatccaacaaccacttaatgaagaagaatgatcagaagttcaaggacctgccacagatggccggtcatcccatccatcatcaggctcaggggccccccggagccaagaacccacaggagcagcagaggagacccatggggcagacgactctcccagcagagcaggaggaatccagggtgaaatgcaagaactgcggggcctttgggcactcagccaggaacaagacctgccccattaagaggtggagtggggcccttcctctgcaggtcctgggctcacacaaggagaaggagaacctgaaaccagcaaaggcccagctaccctttacgactccagggccctttacgacgaatgacagagaaaaggagcgaagtccaagttctacaatgaacccatcagagatgcaaagaaaagcatctccacggagatggaaacaccacaatcaaacaccatcgattcacaaggtgaacaaaatggtgatgtcagaagaacagatgaagttgccatccaccaagaaagcagagccgccgacttgggcacaattaaagaagctgacacagttaccaaaaaaaagcctagagaacgacaaaggtgacacaaactccagagaacacgctgcttgcagctttgatgattgtatcaacggtggggcagctgcagctaattatacctactgggcctatgtgcctttcccgcccttaattcgggcagtcacatggatggataatcctattgaagtatatgttaataatagtgcatgggtacctggacccacagatgatcgttgccctgacaaacctgaggaagaaggaatgatgataaatatttccactgggtatcgttatcctcctatttgcctagggagagcaccagcatgtttaatgcctgcaatccaaaattggttggtagaagtacctactgtcggtaccaccagtagattcacttatcacacgggtctattgacattcagggatgtggccatagaattctctcaggaggagtggaaatgcctggaccctgctctagaggactcttatactagacgaaaagcaaacagttgtggaaaaccttataaatgtaatgaatgtggcaaggcgttcactcagaattcgaaccttacaagtcataggagaattcatagtggagagaagccttacaaatgcagtgagtgcggcaaaacctttactgttcgttcaaatctaactattcatcaggtcatccatactggagaaaaaccttacaaatgtcatgagtgtggcaaggtcttcaggcacaattcataccttgcaactcatcggcgaattcatactggagagaaaccttacaagtgtaatgagtgtggaaaagcctttagaggacattcaaacctaactacccatcagttaattcatactggagaaaaaccgttcaaatgtaatgaatgtggcaagctcttcactcaaaattcacaccttataagtcattggagaattcacactggagagaaaccttacaagtgcaatgagtgcggcaaagcctttagtgttcgttcaagcctagcaatccatcagacaatccacactggagaaaaaccttacaaatgtaatgaatgtggcaaagtctttagagtgggcaggggagtgtccattggcaccacctgcctcttgagtgtcttccaggtgatcacggtcagctccaggaaatccagagcctccccagagaacagagctacgcagagcatcctcatcctggccccgcccacctctcggggatctggcccaggtcccgcttctgtcctgcgccgattggcacagacccggaagcggatggcgtggactgaaagttgcacggcggcgtgtgcgtttcctagttgtctggtgctgctatataggggacgtggggtccccacagacctgcaggttccggcccctcttttctcaacccagagcaaattgaaacgtccgggctcaagaacaaaatcaagccttgcaactcatcagagaattcacactggggagaaaccatacaagtgtaatgaatgtggtaaagtcttcagtcagacttcaagccttgcaaggcattggagaattcatactggagagaaaccttacaaatgcaatgaatgtggtaaggttttcagttacaattcacaccttgcgagtcatcggagagttcatactggagagaaaccttacaagtgtaatgagtgtgggaaagcctttagtgtgcattcgaacttaactacccatcaggtcatccatactggagagaagccttacaaatgtaatcaatgtggcaaaggcttcagtgtgcattcaagcctaactacccatcaggtcatccatactggagaaaaaccttacaaatgtaatgagtgtggcaaatcctttagtgtgcgcccaaacctcactagacatcagataatccatactggaaagaaaccttacaaatgtagtgattgtgggaagtcctttagtgtgcgcccaaacctcttcagacatcaaattatccatactaaggagaaaccttataaaagaaattaa

SEQ ID NO: 6457 - DNA, 360 bp, Homo sapiens
  SIMILAR (63)..(248): 871254mologous to Human endogenous retrovirus K pol- env,accession number AF023261,Smith-Waterman Score=282.
gacaagtcgacgagatttccgagtacgtctatagtcagccttgtgacatttgatgttctacaatgaacccgtcggagatgcaaagaatagcacctccacggagacagagacaccgcagtcgagcaccatcggctcacaagatgaacagaatggtgatgtcagaagaacagatgaagttgccatccaccaagaaggcggagccgccgacatgggcacaattaaagaagctgacacagttagctaaaaaaaagcctagagaacacaaaggtgacacaaactccagagaacatgctgcttgcagctttgaagactgtatcaacagtgtctgcaggtgtacccagcagctccgaagagagcgac

SEQ ID NO: 6458 - DNA, 3658 bp, Homo sapiens
  SIMILAR (2348)..(3655): 651254mologous to Homo sapiens HTRM clone 438283 protein sequence,accession number Y73345,Smith-Waterman Score=1565.
gagatagggaaaaaccgccttagggctggaggtgggacctgcgggcagcaatactgctttgtaaagcattgagatgtttatgtgtatgcatatccaaaagcacagcacttaatcctttacattgtctatgatgccaagacctttgttcacgtgtttgtctgctgaccctctccccacaattgtcttgtgaccctgacacatccccctctttgagaaacacccacagatgatcaataaatactaagggaactcagaggctggcgggatcctccatatgctgaacgctggttccccgggtccccttctttctttctctatactttgtctctgtgtctttttcttttccaaatctctcgtcccaccttacgagaaacacccacaggtgtgtaggggcaacccacccctacatctggtgcccaacgtggaggcttttctctagggtgaaggtacgctcgagcgtggtcattgaggacaagtcgacgagagatcccgagtacatctacagtcagccttacgacatttgaagttctacaatgaacccatcagagatgcaaagaaaagcacctccgcggagacggagacatcgcaatcgagcaccgttgactcacaagatgaacaaaatggtgacgtcagaagaacagatgaagttgccatccaccaagaaggcagagccgccaacttgggcacaactaaagaagctgacgcagttagctacaaaatatctagagaacgacaaaggtgacacaaactccagagaacacgctgcttgcagctttgatgattgtatcaatggtggtaagtctccctatgcctgcaggagcagctgcagctaattatacctactgggcctatgtgcctttcccgcccttaattcgggcagtcacatggatggataatcctattgaagtatatgttaataatagtgcatgggtacctggacccacagatgatcactgcccctgccaaacctgaggaagaaggaatgatgataaatatttccactgggtatcgttatcctcctatttgcctagggagagcaccagcatgtttaatgcctgcaatccaaaattggttggtagaagtacctactgtcggtaccaccagtagattcacttatcacacgattgacttgatgacagagaaatgggttgttctcgcctctgtggaggttcttctgcgatttcctctgaagccaggagaggatccgaccgcccgctatgtctcaaataaaaaatgccaaccttcagtggactggcccaccacaatttcacagagacgtggataccaagagaagtggaaatccaaccatcatttaatgaagaagaatgatcggaagttcaaggacctgccacagatggcccgtcattccgtccatcatcaggctcagaggccccccggagccaaaaacccacaggagcagcagaggagacccatggggcagacgactctcccagcagagcaggaggaatccagggtgaaatgcaagaactgcggggcctttgggcactcagccaggaacaagacctgccccattaagaggtggagtggggcccttcctctgcaggtcctgggctcacacaaggagaaggagaacctgaaaccagcaaaggcccagctaccctttacgactccagggccctttacgacgaatgacagagaaaaggagcgaagtccaagtccccagcagcagcagagcgaagctccgacgcagacatttcccagaactccccaagagaaaatgcaggaagcctggaaggagccagcagaagattgtttgttcctgagggacctcccagccctgaagacaaacatcagtgacagacatcagtggcagaatggcctcccggtgatcacggtcagctccaggaaatccaggtgggcaaaacttaaagagaaagcccccaagcatgttggcttttctgttctcctgtgctggatcgtgtgcatgttggtaaacatcatctttcccatgtatgtgactggcaaatggaactacacaaacatcacagtgaacgaggatttgggatactgttctgggggaggcaacaacaaaatcgcacagacactgcgtgcaatgttgttatcattccctgatgtgttgtgtctggggctcatgctctgggtcagcagctccatggtttgcatcctgcacaggcacaagcagcgggtccagcacattgataggagcgatctctcccccagagcctccccagagaacagagctacgcagagcatcctcatcctggccagttaccaaaaggtaaagaaaaacttcgtgcaatgtgattgcttctccctatgggaagcctgttcagataacctggaatttgaacctgaagaaaagtgtttatattttgtaggtatctcttccaaatgcacaatgaaggagttctcatcaacagcacaaggcaatacagaagtgatccacacagggacattgcaaagacatgaacgtcatcacattggagatttttccttccaggaaattgagaaagatattcataactttgagtttcagtggcaagaagatgaaagaaatggccatgaagcacccatgacaaaaatcaaaaaattgatgggtagtacagagcaatatgatcacaggcatgctggaaacaagcctattaaatatcagcttggatcaagctttcattcacatctgtctgaactccacatatttcagcccaaagggaaaattaataatcaagtggagaagtctatcaacgatgcttcctcggtttcaacagcccaaagaatttcttgtaggcccaaaacccatatatctaataactatggggataattttctgaattattcattactcacacaaagacaggaagtacgcatgagagaaaaatctttccaatgtattgagagtggcaaagcctttaattatagctcactcttaaggaaacatcagattattcatctaggagagaaacaatataaatgtgatgtatgtgacaaggtctttattcggaagcgataccttgcacgccatcgtagatgtcacactggtgagaaaccttacaagtgtaatgagtgtggcaagtccttcagtcagatgtcatcccttacatatcatcatcgacttcatactggagagaaaccttacaaatgtgaagaatgtgacaaagctttcagacacaattcagcccttcaaagacataggagaattcatactggagagaaaccacataagtgtaatgagtgtggcaagacctttagtcagaagtcataccttgcatgccatcgtagcattcatactggaaagaaaccttacgaatgtgaagaatgtgacaaagctttcagtttcaaatcaaaccttgaaagtcataggataactcatactggagagaaaccatacaagtgtaatgattgtggcaagaccttcagtcatatgtcaacccttacatgccatcgtagacttcatactggagagaaaccttacaagtgtgaagaatgtgatgaagctttccgtttcaaatcaagtcttgaaagacataggagaattcataatggagagaaactgtacaaatgtaatgagtgtggcaagaccttcagtcaggagttatcccttacctgccattgtagacttcatagtggagagaaaccttgcaagtgtggagaatgtgacaaggcttacagtttcaaataa

SEQ ID NO: 6459 - DNA, 249 bp, Homo sapiens
  SIMILAR (46)..(216): 671254mologous to Homo sapiens KIAA1200 protein,accession number AB033026,Smith-Waterman Score=203.
atggggaagactgggcagagcaggttgtcaaggaggacttaccaaggtcagatcaaactctgggaggctaaagtggaagaggttgacagatcttgtgattcagatgaagattatgaagccagtggacgaagtctgttatccacacattatactatcgttatccatcccaaagaccaaggtccaacttacctcctaattggatccaagcatgaaaaggtattcaaagacttattggttgatttagaatga

SEQ ID NO: 6460 - DNA, 249 bp, Homo sapiens; identical to SEQ ID NO: 6459
  SIMILAR (46)..(216): 671254mologous to Homo sapiens KIAA1200 protein,accession number AB033026,Smith-Waterman Score=203.

SEQ ID NO: 6461 - DNA, 279 bp, Homo sapiens; identical to SEQ ID NO: 3572
  SIMILAR (1)..(189): 471254mologous to Murine leukemia virus pol,accession number M93052,Smith-Waterman Score=132.

SEQ ID NO: 6462 - DNA, 363 bp, Homo sapiens
  SIMILAR (1)..(228): 461254mologous to Feline leukemia virus gag-pol precursor polyprotein gPr80,accession number M18247,Smith-Waterman Score=185.
ggaaaagaagaaagtccagcacaattctacgagagactgtgtgaggcctatcacatgtatactccctttgatcccgatagccctgaaaatcaacgcatgattaacatggctttagttagtcaaagcgcagaagacattagaagaaaactgcagaaacaggctgggtttgcagggatgaacacatcacaattattagaaatagctaaccaggtgtttgtaaacagggatgcagtaagccataccggtgctgaacattcggtagtaaccggcccagtcgcccccttatccaaaaagactattgacatcatcggagccatgggagtttcagcaaaacaagctttctgcttgccccggacttgtact

SEQ ID NO: 6463 - DNA, 245 bp, Homo sapiens; identical to SEQ ID NO: 5832
  SIMILAR (18)..(242): 381254mologous to Feline leukemia virus gag-pol precursor polyprotein gPr80,accession number AF052723,Smith-Waterman Score= 119.

SEQ ID NO: 6464 - DNA, 429 bp, Homo sapiens
  SIMILAR (154)..(429): 481254mologous to porcine endogenous retrovirus REVERSE TRANSCRIPTASE,accession number A66553,Smith-Waterman Score=209.
gttgatgaccttctgctgggacaccccacggcagtcgggtgtgccacgggaacggatgccccacaccggcacctggaggactgtgggtataaggtgtccaaaaaaaaagctcagatctgccaacagcagcatgatgcgaggcaaggtccagccgttccgcccggcatacaagcttatggagcagccccctttgaagatctccaggtagacttcagagagatgccaaagtgtggaggtaacaagtatgtactagttcttgggcgtacctactctgggtgggtggaggcctatccaacacgaactgagaaaactcgtgaagtaacccctgtccttcttcgagatctgattcgtagatttcgaccgcccttatggatcggctcagacaacgggcctgcatttttggctgccttggtacagaagacggcaaag

SEQ ID NO: 6465 - DNA, 895 bp, Homo sapiens
  SIMILAR (25)..(570): 291254mologous to porcine endogenous retrovirus viral polypeptide,accession number AJ133816,Smith-Waterman Score=172.
aagggatttaatggagactatggggttactatgacaccagggaaatgtagaacttattttgaaatagattggtcaaaattagaagtgggttggccatcagaaggaaacctggagaggtcccttgtttctaaggtatggcacaaggtaactggtaagtcaggacactcagaccagtttccatacatagccacttggttacagctggtgctagaccccccacagtggctaagagggcaggcagcagcagtgctagtagcaaagggacagattgccaaggaaggatcctactccacccgccgagggaaatcaactcctgaagttctgtttgacccaacatcagaagatcccttgcaggagatggaaccagtgatcccagtggtgccctccccttaccagggaaagatgctccccactcttgagcccacagtccttgtgcctccacaagacaaacatatccctaggccacccggagtagacaagagaggaggtgaagcctcgagagaaacccctacattggcagctcgtttaagacccaaaactgggatacaaatgcccctgagagagcagtggtatactgggatagatgaggatggtcacatggtggagagaggacatcagcaagcttcaaccttggtgggcttggggaattcctgcactgacttagaggctcaaaaagcagcatctgacctcttccaggcctcaatcacagcccccctgttccctcaagcacctggtcttgtacctacttattctaaagaagaaaaagactttctccaggcagagggaggacaggtgataaaggaaggatgggttcggttaccagatgggagagtagctgtgccacagatgctaggagctgcagttgtactggctgttcatgaaaccacccatctag

SEQ ID NO: 6466 - DNA, 4953 bp, Homo sapiens
  SIMILAR (308)..(2608): 431254mologous to Feline leukemia virus gag-pol precursor polyprotein gPr80,accession number AF052723,Smith-Waterman Score= 1547.
catggcctgtgctgtggtttcagagaagcacaaggcaggaagcaagaggcatttagcacaggctcatggtgagatgctgtcaggtatcacctacattaagtttgtcaaagtccctggggaactggttactgcaaagatggctgaaataagagagcagtgtgtggcaggcccccgtggaggatcaacgcagtggctgaacaccgggaaggaactggcacttggagtctggacatttgaaacttgggagagaggctcaccacttttgagtccacggggcttgcacctccacaagacaaacatccctaggccacccagagtaggcaagagaggaggtgaagcctcgggagaaacccctcccttggcagctggtttaagacccaaaacggggatacaaatgcccctgagagagcagtggtatactggaatagatgaggatgggcacatggtggagaggcgtgtttttgtgtaccagcccttcttctctgccgacctcctcaactggaaaaacaataccccatcctatactgaaaagccgcaagctctaattgatttgctccaaactattatccagacccataaccccacttgggctgattgccaccagttgctcatgttcctctttaacacagatgaaaggcggagagtgctccaagcagcaactaagtggctagaggaacatgcaccggctgattaccaaaacccccaagagtatgtaaggacccagttaccgggaaccgacccccagtgggacccaaatgaaagagaggatatgcaaaggctaaaccgatacagggaagctctcttggaaggattaaagaggggagcccagaaggccacaaacgtggccattcagggaaaagaagaaagtccagcacaattctacgagaggctgtgtgaggcctattgtatgtatactccctttgatcccaatagtcctgaaaatcagcgcatgattaacatggctttagttagtcaaagtgcagaagacattagaagaaaactgcagaaacaggctgggtttgcagggatgaacacatcacagttattagaaatagctaaccaggtgtttgtaaacagggatgcagtaagccctaaggaaaaccgcagagagaatgaacatcaggtccggcgaaatgccgacctgttagctgcagcaatcacaggggtccccccaaagaggcaagggaaggggggccccgggaaagaaattcagcctggttgtcagagcttgcagcgtaatcagtgtgcttattgtaaagaaataggacattggaagaacaaatgccctcagctaaaaggaaaacaaggtgactcggagcaggaggatccagacaaggaggaaggggccctgctcaacctggcagaaaggacccccaaagagcctatggtcaggatgacagttgggggtaaagacattgattttcttgtagataccggtgctgaacattcggtagtaaccaccccggtcagccccttatccaaaaagactattgacataattggagccacaggagtttcagcaaaacaagctttctgcttgccccggacttgtactgtaggaggacataaagtgattcatcagtttttgtacatgcctgattgtcccttgcccttgttgggaagggacttgcttagcaaactgagagccactatctattttacagagcatggctctttgctgctaaagttacccggaacgggagtcattatgacccttatggtaccccgagaggaggaatggaaacttttcttaactgagtcgggccaagagataagaccagctctggctaagtggtggccaagagtgtgggcagaagacaaccctccagggttggcagtcaaccaagcccccgtacttatagaagttaagcctagggcccagccggttaggcaaaaacagtacccggtccccagagaagctcttcaaggtatccaggtccatctcaagtgcctaagaacctttggaattatagttccttgtcagtctccatggaacactcccctcctgcctgttcccaagcctgggaccaaggactacaggccggtacaggatttgcgcttggttaatcaggctacagtgactttacacccaacagtacctaactggtacacattgctggggttgctgccagctgaggacagctggttcacctgcttggacctgaaagatgctttctttagcatcagattagcccctgagagccagaagctgtttgcctttcagtgggaagatccggagtcaggtgtcactactcagtacacttggatccggcttcccaaagggttcaagaactcccccaccatcttcggggaggcattggctcaagacctccagaagtttcccaccagagacctaggctgcatgttgctccagtacgttgatgacctttttctgggacaccctacggcagtcaggtgcgccaagggaacagatgctctactccggcacctggaggactgtgggtataaggtgttcaagaaaaaagttcagatctgccgacagcaggtacgttacttgggatttactatccggcagggggagtgcagcctgggatcaaaaagaaagcaagtcatttgtaatctaccggagcctaagaccagaaggcagagccctgtcaagcatgactgtgtagaagtgttggactcagtttactctagcagacctgacctccgggaccagccttgggcatcagtagactgggtactatacgtggatgggagcagcttcatcaacccacaaggagagagatgtgcagggtatgcggtggtaactctggacactgttgttgaagcccgatcgttgccccagggcacttcagctcagaaaactgaactcattgctttaatttgggccttagaactcagtgaagcacctgatcttgtacctacttattctaaagaagaaaatgactttctccaggcagagggaggacaagtgatggaggaaggattgattcggttaccagatgggagagtagctgtgccacagctgctaggagctgcagttgtactggctgtccatgaaaccacccatctaggtcaggaatcacttgaaaagttgttaggctggtatttctacatctcgcatttgtcagcccttgccaaaacggtgacccagcggtgtgttacctgccgacagcataatgcgaggcaaggtctagctgttccacctggcatacaagcttatggagaagccccctttgaagatctggatccaggtggacttcacagagatgccaaagtgtggagatttggactgcctttatggatcggctcagataacgggccggcatttgtggctgacttggtacagaagatggcaaaggtattggggatcacatggaaactgcatgctgcctaccggcctcagagttccggaaaggtggagcagatgaatcggactatcaaaaatagtttagggaagaacaaaaaggacccagtttatcttcagaagggggaagccaacccctcctgtgctgccggtcactgtaacccactagaactaataattaccaatcccctagatccccgttggaaaaacggagaacgtgtaaccctggggattgatgggacagggttaaacccccaagttgccattttaattagaggggaggtccccaagcgctctcccaaaccagtatttcaaaccttttatgaggagctgaatctgccagcaccagaacttccaaaaaagacaaaaaatttgtttctccaattagcagaaaatgtagctcattcccttaatgttacttcttgttatgtatgcgggggaaccactatcggagaccgatggccttgggaagcccgagagttggtgcctactgatccagctcctgacataattccagttcagaaggcccaagctagcaacttctgggtcttaaaaacctcaattattggacaatactgtatagctagagaagggaaagactttatcatccctgtaggaaagcttaattgtataggtcagaagttgtataacagcacaacaaagacaattacttgttggggcctaaaccacactgaaaagaagccatttagtaaattttctaagttaaaaactgcttgggctcatccagaatctcatcaggactggatggctcccgctggactatactggatatgtgggcacagagcctatattcggttacctgataaatgggcaggcagttgtgttattggcactattaagctgtgctttttcttattacccataaaaacgggtgagctcctaggtttccccatctatgcctcccaagaaaagagaggcatagttataggaaactggaaagataatgagtggccccctgaaaggatcatacagtattatgggcctgccacatgggcacaagacggctcatggggataccgaacccccatctacatgctcaatcggatcatacggttgcaggccatcttaaaaataattactaatgaaactggcagagctttgactgttttggcttggcaagaaacccaaatgaggaatgctatctatcagaatagactggccttggactacttgctagcagctgaaggaggagtttgtggaaactttaacttaaccaattgctgcctacaaatagatgatcaaggacaggtggttgaaaacatagtcagggacatgacaaaggtggcacatgtgcctgtacagattaaactgtacacgagtttaatcctgagtctttatttggaaaatggtttccagctatgggaggatttaaaaccctcatgaagtacatctaactgtcctaagaataaagataaggatgaagaccaatctgaactgcttactgctgacagagggggctgttttggggaaatggcagtcagaactccctcagaggcctatctaaaggttcccagcagaagaagccatcgtccaaagctccggttgaatgactgtttggagtttgatggcctgaaggcaagaacagacaaactgggctatta

SEQ ID NO: 6467 - DNA, 459 bp, Homo sapiens; identical to SEQ ID NO: 3570
  SIMILAR (287)..(457): 361254mologous to Reticuloendotheliosis virus C end of pol protein (reverse transcriptase),accession number X01455,Smith- Waterman Score=89.

SEQ ID NO: 6468 - DNA, 801 bp, Homo sapiens; identical to SEQ ID NO: 5833
  SIMILAR (223)..(798): 691254mologous to Homo sapiens olfactory receptor,accession number Y10529,Smith-Waterman Score=671.

SEQ ID NO: 6469 - DNA, 1761 bp, Homo sapiens; identical to SEQ ID NO: 3581
  SIMILAR (1273)..(1698): 461254mologous to Baboon endogenous virus strain M7 gag-pol precursor polyprotein,accession number D10032,Smith-Waterman Score= 285.

SEQ ID NO: 6470 - DNA, 1342 bp, Homo sapiens
  SIMILAR (1196)..(1342): 571254mologous to Homo sapiens BC85395_3,accession number AC005255,Smith-Waterman Score=122.
tcagaggatccagaactgcagccggtcctcgctttgctgtccctgtccctgtccatgtatatggtcacggtgctgaggaacctgctcagcatcctggctgtcagctctgactccccgctccacacccccatgtgcttcttcctctccaaactgtgctgagctgacatcggtttcaccttggccatggttcccaagatgattgtgaacatgcagtcgcatagcagagtcatctcttatgagggctgcctgacacggatgtctttctttgtcctttttgcatgtatggaagacatgctcctgactgtgatggcctatgactgctttgtagccatctgtcgccctctgcactacccagtcatcgtgaatcctcacctctgtgtcttcttcgtcttggtgtcctttttccttagcccgttggattcccagcattttttcccaccagttacaggcatagggtttttcctcagtaggcttcttgccctgtagcataaggtctgatttgctaatgaagggtttctcacattcaacacattcatagggtttctctcctgtgtgtgtctgctgatgtttagtgaagtcagactttctacagcaagttggctgtcctacctgagttatcatgtggtctgaaagtttgtccctcacacaggattccagaacactcctactgtggtctgaatgtttgtccctcacacaggattccagaatactgttgctgggttctgagtatttgttcctcacataggattccagaaaactgctatgagggtccgaatgtttgcccttcaaatagtattccagaacactgctgctggtgtctgaatgtttatttctcacaaaggattccagagcactgctaggagtgtctgaatgcttgtccctcacataggattccagaactctcctgctgtggtctgaatgtttgtaccccatgtagtactcaagaacactgctgctggggtctgaatgtttgtccctcccataggattccagagcactgctaggagcatctgaatgcttgtccctcacataggattccagaactctcctgctgtggtctgaatgtttgtaccccatgtagtactcaagaacactgctgctggggtctgaatgtttgtccctcacataggattccagaacactgctgctctgtgtcttcttcgtcttggtgtcctttttccttagcccgttggattcccagctggcagttgtttgctgatttgatggaacaggcattggcatgtacctgacttcagctgtgtcaccaccccccaggaatggtgtggtggcgtcagtgatgtatgctgtggtcacccccatgctgaaccttttcatctgcagc

SEQ ID NO: 6471 - DNA, 2379 bp, Homo sapiens; identical to SEQ ID NO: 3583
  SIMILAR (1801)..(2376): 691254mologous to Homo sapiens olfactory receptor,accession number Y10529,Smith-Waterman Score=702.

SEQ ID NO: 6472 - DNA, 554 bp, Homo sapiens
  SIMILAR (379)..(549): 641254mologous to Reticuloendotheliosis virus C end of pol protein (reverse transcriptase),accession number X01455,Smith- Waterman Score=213.
gcacctgatcttgtacctacttattctaaagaagaaaatgactttctccaggcagagggaggacaagtgatggaggaaggattgattcggttaccagatgggagagtagctgtgccacagctgctaggagctgcagttgtactggctgtccatgaaaccacccatctaggtcaggaatcacttgaaaagttgttaggctggtatttctacatctcgcatttgtcagcccttgccaaaacggtgacccagcggtgtgttacctgccgacagcataatgcgaggcaaggtctagctgttccacctggcatacaagcttatggagaagccccctttgaagatctggatccaggtggacttcacagagatgccaaagtgtggagatttggactgcctttatggatcggctcagataacgggccggcatttgtggctgacttggtacagaagatggcaaaggtattggggatcacatggaaactgcatgctgcctaccggcctcagagttccggaaaggtggagcagatgaatcggactatcaaaaatagtttagggaa

SEQ ID NO: 6473 - DNA, 620 bp, Homo sapiens
  SIMILAR (620)..(198): 601254mologous to Homo sapiens BC85395_3,accession number AC005255,Smith-Waterman Score=415.
tgataactcaggtaggacagccaacttgctgtagaaagtctgacttcactaaacatcagcagacacacacaggagagaaaccctatgaatgtgttgaatgtgagaaacccttcattagcaaatcagaccttatgctacagggcaagaagcctactgaggaaaaaccctatgcctgtaactggtgggaaaaaatgctgggaatccaacgggctaaggaaaaaggacaccaagacgaagaagacacagaggtgaggattcacgatgactgggtagtgcagagggcgacagatggctacaaagcagtcataggccatcacagtcaggagcatgtcttccatacatgcaaaaaggacaaagaaagacatccgtgtcaggcagccctcataagagatgactctgctatgcgactgcatgttcacaatcatcttgggaaccatggccaaggtgaaaccgatgtcagctcagcacagtttggagaggaagaagcacatgggggtgtggagcggggagtcagagctgacagccaggatgctgagcaggttcctcagcaccgtgaccatatacatggacagggacagggacagcaaagcgaggaccggctgcagttctggatcctctga

SEQ ID NO: 6474 - DNA, 1086 bp, Homo sapiens
  SIMILAR (166)..(612): 401254mologous to Murine leukemia virus pol polypeptide,accession number AF019230,Smith-Waterman Score=282.
tcacggaccaagaactaccagccggtacaggatttgcgcttgcttcatcaagctaaactgactttccatccaacagtacctaacccgtccacattgttggggttcccgccagctgaggacagctggttcacctgcttggacctgaaagatgctttctttcctatcagattagcccctgagaggcagaagctgtttgcctttcagtgggaagatccggagtcaggatggcccccctgttggagggccttggcagcaactgccctgctagtacaagaagcaaataagctgactcttgggcaaaaactgaacattaaggcctcccgtgctgtcgtgactttaatgaatactaaaggacatcattggctaacgaatgccacactcaccgactaccagactttgctctgtgaaaatccccgtataaccattgaagtttgtaacaccctccaccccgccaccttgctcccggtatcaaagagccctgtcaagcctggttgtgtagaagtgttggactcaattgactctagcagacctgacctctgggaccagccttgggcatcagtagactgggaactatacttggatgggagcagcttcttcaacccccaaggagaggtggagggtatgcaggggggacaccagcgagcttccaccttgctgggtttgcggaattcccgcgctgactcagaggctcgaaaagcagcatcttcccccttctgggcatcagggctccctcaagcacctgatctgggacctacttcttctaacgaagaaaaggactttctccagcatgatatgaggcaaggtctagctgttctgcccggcataagagcttctggagcagccccctttgaaggtctccaagtggacttcacagagatgtcaaaatgtggaggtaacaagtatgtagtagttcttgggcatacctactctgggtgggaggaggcctatcaaacacgaacagagaaatctcgtgaagtaacccctgtgcttcttcgtgatctgattcctagatttcgacggcctttagggatcggctcagacaacgggcctgcgtttttggttgccttggtacagaagacggcaaag

SEQ ID NO: 6475 - DNA, 3118 bp, Homo sapiens
  SIMILAR (66)..(2366): 431254mologous to Feline leukemia virus gag-pol precursor polyprotein gPr80,accession number AF052723,Smith-Waterman Score= 1547.
gggagagaggctcaccacttttgagtccacggggcttgcacctccacaagacaaacatccctaggccacccagagtaggcaagagaggaggtgaagcctcgggagaaacccctcccttggcagctggtttaagacccaaaacggggatacaaatgcccctgagagagcagtggtatactggaatagatgaggatgggcacatggtggagaggcgtgtttttgtgtaccagcccttcttctctgccgacctcctcaactggaaaaacaataccccatcctatactgaaaagccgcaagctctaattgatttgctccaaactattatccagacccataaccccacttgggctgattgccaccagttgctcatgttcctctttaacacagatgaaaggcggagagtgctccaagcagcaactaagtggctagaggaacatgcaccggctgattaccaaaacccccaagagtatgtaaggacccagttaccgggaaccgacccccagtgggacccaaatgaaagagaggatatgcaaaggctaaaccgatacagggaagctctcttggaaggattaaagaggggagcccagaaggccacaaacgtggccattcagggaaaagaagaaagtccagcacaattctacgagaggctgtgtgaggcctattgtatgtatactccctttgatcccaatagtcctgaaaatcagcgcatgattaacatggctttagttagtcaaagtgcagaagacattagaagaaaactgcagaaacaggctgggtttgcagggatgaacacatcacagttattagaaatagctaaccaggtgtttgtaaacagggatgcagtaagccctaaggaaaaccgcagagagaatgaacatcaggtccggcgaaatgccgacctgttagctgcagcaatcacaggggtccccccaaagaggcaagggaaggggggccccgggaaagaaattcagcctggttgtcagagcttgcagcgtaatcagtgtgcttattgtaaagaaataggacattggaagaacaaatgccctcagctaaaaggaaaacaaggtgactcggagcaggaggatccagacaaggaggaaggggccctgctcaacctggcagaaaggacccccaaagagcctatggtcaggatgacagttgggggtaaagacattgattttcttgtagataccggtgctgaacattcggtagtaaccaccccggtcagccccttatccaaaaagactattgacataattggagccacaggagtttcagcaaaacaagctttctgcttgccccggacttgtactgtaggaggacataaagtgattcatcagtttttgtacatgcctgattgtcccttgcccttgttgggaagggacttgcttagcaaactgagagccactatctattttacagagcatggctctttgctgctaaagttacccggaacgggagtcattatgacccttatggtaccccgagaggaggaatggaaacttttcttaactgagtcgggccaagagataagaccagctctggctaagtggtggccaagagtgtgggcagaagacaaccctccagggttggcagtcaaccaagcccccgtacttatagaagttaagcctagggcccagccggttaggcaaaaacagtacccggtccccagagaagctcttcaaggtatccaggtccatctcaagtgcctaagaacctttggaattatagttccttgtcagtctccatggaacactcccctcctgcctgttcccaagcctgggaccaaggactacaggccggtacaggatttgcgcttggttaatcaggctacagtgactttacacccaacagtacctaactggtacacattgctggggttgctgccagctgaggacagctggttcacctgcttggacctgaaagatgctttctttagcatcagattagcccctgagagccagaagctgtttgcctttcagtgggaagatccggagtcaggtgtcactactcagtacacttggatccggcttcccaaagggttcaagaactcccccaccatcttcggggaggcattggctcaagacctccagaagtttcccaccagagacctaggctgcatgttgctccagtacgttgatgacctttttctgggacaccctacggcagtcaggtgcgccaagggaacagatgctctactccggcacctggaggactgtgggtataaggtgttcaagaaaaaagttcagatctgccgacagcaggtacgttacttgggatttactatccggcagggggagtgcagcctgggatcaaaaagaaagcaagtcatttgtaatctaccggagcctaagaccagaaggcagagccctgtcaagcatgactgtgtagaagtgttggactcagtttactctagcagacctgacctccgggaccagccttgggcatcagtagactgggtactatacgtggatgggagcagcttcatcaacccacaaggagagagatgtgcagggtatgcggtggtaactctggacactgttgttgaagcccgatcgttgccccagggcacttcagctcagaaaactgaactcattgctttaatttgggccttagaactcagtgaaggtgactcttaaatttgagaaacattggaatagtggattaattcggagtagcggtttttgtgatccacagatgaagcacagagaaaaggatagagatggagacacaaaaacattgatctcccaagctgtagagactgggtctcctttgggaatatctacaactaccaactgcacaacaaagtagtaagtgcagcttcgaatttgtcttgtggtaggccacgatcctgtgcccacaaggacagtgcacaggtcatccgagcacacggctgagcccggtaggcaaaggaaggaaggtccaggtcacagggcagcgaggcccagcacaatgaaggagaatggaaacacaccacacctcaattagaatgggatccaattcttttacaaaaatttttttctgattacaaaatttaagggaaaaagggaaagttcttccttcctacagactgacatgtaataaatggagatggaacacacaaaaaaaaaaaaaaaaa

SEQ ID NO: 6476 - DNA, 3735 bp, Homo sapiens
  SIMILAR (2104)..(2778): 941254mologous to Homo sapiens putative p150,accession number U93567,Smith-Waterman Score=1089.
gaaatgactaacaaggtcacgggggagtgtactccccctgcaatactggcagtaatctcgtcctccccaaacctggatgtgagcgacaagatcacagagggggtgtacacaccctgcgacattggaagtaatatgatcctctccccacctggatattgggaaagatatcacagcgcggaggatccagaactgcagcccatcctcgctgggctgtccctgtccatgtatctggtcacggtgctgaggaacctcctcatcagcctggctgtcagctctgactcccacctccacaccccaatgtgcttcttcctctccaacctgtgctgggctgacatcggtttcacctcggccacggttcccaagatgattgtggacatgcggtcgcatagcggagtcatctcttatgcggactgcctgacacggatgtctttcttggtcctttttgcatgtgtagaagacatgctcctgactgtgatggcctatgactgttttgtagccatctgtcgccctctgcactacccagtcatcgtgaatcctcacctctgtgtcttcttagtttcggtgtcctttttccttagcctgttggattcccagctgcacaggatccttttgtcttactgtaaaattgttccctccattctaaggatttcaacatcagatgggaaatataaagccttctccacctgtggctctcacctggcacttgtttgcttattttatggagcaggcattggcgtgtacctgacttcagctgtgtcaccaccccccaggaatggtgtggtggtgtcagtgatgtacactgtggtcacccccatgctgaaccctttcatctacagcctgagaaacagggacattcaaagcaccctgcggaggctgctcagcagaacagtcgaatctcatgatctgttccatcctttttcttgtgtggggaagcgcaaatccaaccaagaatgtgataccacacatttggatggatgtgataaacaaacaagcattggtgaaactagagggaaggagtacaccctgtgtgacagtaggagtaacctcacccaaggatataaggaacaaatacagaggatgcacacgtgttgtgacattagcagtaacatccatttaggatattacgaatattaccacaatgtgaataccccctgtgatattaggagtaacatccccctacaatattgggaaccatatcacacggtgtacaccccctgtgacattagagggaggcccatgaaccgaggaagcaggtggccatctgtggcagctgtcacagcccagcataaagctaagcacttctacttattatatcattcaaaagctgcctcagcctgcaagggcagtaattccccaaagcaggctccagggcccaaggaaagccctcggcagggaaacattgagtgtcaggcacagggaatcaggccatcgggtcacctggacaccgtaaggctccaagagctgccccctctccaccaggaggaactgacttaccaaggtgacagtctagagactgcttgcccaattaaagccatgatccccaatctcacactccaactacgggaggacattcaaaccaaaggcaaagaagttgaaaactttgaaaaaaatttagaagaatgtataactagaataaccaatacggagaagtgcttaaaggagctgatggagctgaaaaccaaggctcgagaactacgtaaagaatgcagtagcctcaggagccgatgccatcaactggaagaaagggtatcagcaatggaagatgaaatgaatgaaatgaagtgggaagggaagtttagagaaaaaagaataaaaagaaataagcaaagcctccaagaaatatgggactatgtgaaaagaccaaatctacgtctcattggtgtacctgaaagtgacggggagaatggaactaagttggaaaacactctgcaggatatcgtccagaacttccccaatctagcaaggcagaccaatgttcagattcaggaaatacagagaacgccacaaagatactcctcgagaagagcaactccaagacacataattgtcagattcaccaaagttgaaatgaaggaaaaaatgttaagggcagccagagagaaagaaatacaaactaccatcagagaatactacaaacacctctacgcaaataaactagaaaatctagaggaaatggataaattccttgacacatacactctcccaagactaaaccaggaagaagttgaatctctgaatagaccaataacaggctctgaaattgtggcaataatcaatagcttaccaaccaaaaagagtccaggaccagatggattcacagccgaattctaccagaggtacaaggaggaactggtaccattccttctacaactattccaatcaatagaaaaagagggaatcctccctaactcattttatgaggccagcatcatcctgataccaaaggctggcagagacacaaccaaaaaagagaattttagaccaatatccttgatgaacgttgatgcaaaaatcctcaataaaatattggcaaaacgaatccagcagcacatcaaaaagcttatccaccatgatcaagtgggcttcatccctgggatgcaaggctggttcaatatacgcaaatcaataaatgtaatccagcatataaacagagccaaagacaaaaaccacatgattatctcaatagatgcagaaaaggcctttgacaaaattcaacaacccttcatgctaaaaactctcaataaattagaattggaaaaaactactttaaagttcatatggaaccaaaaaagagcccgcatcgccaagtcaatcctaagccaaaagaacaaagctggaggcatcacactacctgacttcaaactatactacaaggctacagtaaccaaaacagcatgcctggccccacaccacagtccatcaactcctgctccaggtggaaacctcagaaacccacaaagctcggacctgctccaggtcaccaagcagcagggccaggcactggcaatccaacgagaagccccactacatcgcattccagctcctgaagccattccctggtattttcagccccagccggccacacagctcggatctcctcctgtggatccccccagctctgcgatgatggcagaagagcacacagatctcgaggcccagatcgtcaaggatatccactgcaaggagattgacctggtgaaccgagaccccaagaacattaacgaggacatagtcaagaacgcctgccttcttcagaaaaacaaacacccatttgccccccggctcaggctacacaacacccagaggaaccagatgcccaccagccctacaaacacttgttccaggtttgtgctcatcagggacaccctgttgcacaaagaagaaactgacctggtggattttgaagacgtgatcgcagagcctgtgggcacctacagctttgacggcgtgtggaaggtgagctacaccaccttcactgtctccaagtactggtgctaccgtctgttgtccacgctgctgggcgtcccactggccctgctctggggcttcctgttcgcctgcatctccttctgccacatctgggcggtggtgccatgcattaagagctacctgatcgagatccagtgcatcagccacatctactcactctgcatccgcaccttctgcaacccactcttcgcggccctgggccaggtctgcagcagcatcaaggtggtgctgcggaaggaggtctaa

SEQ ID NO: 6477 - DNA, 1863 bp, Homo sapiens; identical to SEQ ID NO: 3586
  SIMILAR (1201)..(1860): 701254mologous to Homo sapiens olfactory receptor,accession number Y10529,Smith-Waterman Score=795.

SEQ ID NO: 6478 - DNA, 1461 bp, Homo sapiens
  SIMILAR (13)..(456): 431254mologous to Feline leukemia virus gag-pol precursor polyprotein gPr80,accession number AF052723,Smith-Waterman Score= 283.
atgcggggacacttcacctgcgtcgaccttctcaactggaaaaacaatacaccgccctataccgaaaagccacaagccctaactgatttgctccaagctgttatccagacccacaaccccacctgggctgattggcgccagttgctcatgttcctctttaacagcgaagaaaggcggagagtcctccaagcagcaactaagtggctagaggaacatgcaccagctgattatcaaaacccccaagagtatggaaggacccagttgccaggaaccgacccccagttggacccacatgaaagagaggagatgcaaaggctaaaccgagacagggaagctctcttggaaggattaatgaggggagctcagaaggccacaaatgttaacaagctctctgaggtcattcagggagaagaagaaagtccagcacaattctacgagagattgtgtgaggcctatctccgtcaaagcgcagaagacatgagaagaaaactgcagaaacaggctgggcttgcagggatgaatccatcacaattaccagaaatagctagccaggtgtttgtaaacaaggatacaccacggaccaaggactaccggccggtacaggatttgcgcttgctccatcaagctacactgactttacatccaacagtacctaacccgtccacattattggtgttgccgccagctgaagacagctggttcaccttctggaacctgaaagacgctttctttcctatcagattagcccctgagaggcagaagctgtttgcctttcagtgggaagatccggagtcagagagccctgtcgagcctgattgtgtagaagtgttggattcagttgactctagcagacctgacctccgggaccaagcttgggcatcagtagactgggaactatacgtgtatgggagcagcttcttcaacccccaaggagagagaggttgcagtaaaaacaggggtaccataagcaaccacctctttcctcaacgatgtgatgaaagcaaaagccaagtatcttcatgtatccaacgtaaaaatataaaaagttacccccgtcggctgcagttggagctatggcggcggcagctgtcactgggcctagcccggggtgtggacctggggactccccagaagggcccgagggggaggctcacggagcgtcggcggaaggcacacaggatgttaaagctttacaacggcctctcggaaggggaggcggtgagactcctcgcggggaccgaccccctggaccccactgatctgaacggggcacacttcaacccggaagtttacctagacaagctgcctagagagtgccctctggcccagctgatggacagtgagacggacatggtgcagcagatccgggctctagacagcgacatgcaaaccctggtctatgagaactacgataagttcatccccgccacagaaattgacaaacagcataaaactgtatga

SEQ ID NO: 6479 - DNA, 1605 bp, Homo sapiens
  SIMILAR (187)..(684): 441254mologous to Gibbon ape leukemia virus pol polyprotein,accession number M26927,Smith-Waterman Score=304.
atgcagctgggaatccaacaggctaaggaaaaaggacaccaaaatgaagaagacacagaggttgatgaccttctgctgggacaccccacggcagtcgggtgtgccaagggaacagatgccctacattggcacctggaggactgtgggtgtaaggtgtccaagaagaaagctcagatctgccgacagcaggccttggcagcaactgccctgcgagtacaagaagcaaataagctgactcttgagcaaaacctgaacataaaggcctcccgtgctgtggtgactttaatgaatactaaaggacatcattggctaacgaatgccagactcacccagtaccagacttggctctgtgaaaatccccgtataaccattgaagtttgtaacagcctacaccccgccaccttgctcccggtatcagagagccccgtcgagcctcgttgtgtagaagtgttggacacaattgactctagcagacctgacctccggggccagccttgggcatcagtagactgggaactatacgtggatgggagtagcttcttcaacccccaaggagagagaggtgcagggtgtgcagtgataaccctggacactgttgttgaagccagatcgttgtcccaggccacatcagcccagaaagctgaactcattgctttcattcgggccttagaactcagtgagggggacaccagcgagcttccaccttgctgggtttggggaattcccgcgctgactcagaggctcgaaaagcagcattgcttcggggcagcagtgttccctcaagcacctgatcttggacctacttcttctaaagaagaaaaggactttctccaggtagagggaaggacaagtgatggaggaaggatggattcggttaccggatgggagagtactgtgccacagctgctaggagctgcagttgtactggctgtgcaagaaaccacccatcgacatcaggagtcactggaaaagttgttaggccggtatttctacatctcgcctttgtcagctcttgccaaaacggtgaggcagcggtgtgttacctgccgacagcatgatgcgaggcaaggtccagccgttctgcctggcataggagcttatggagcagccccctttgaaggtctccaggtggacttcacagagatgccaaagtgtggaggtaacaagtatgtactagttcttgtgtgtacctactctgggtgggtggaggcttatccaacgctaactgagaaagctcgtgaagtaacccgtgtgcttcttcgagacctgattcctagatttcgaccgcccttacggatcggctcagacaaggggcctgcgtttttggctgccttgttacagaagacggcaaagatgggcacacgcagtgacacacagctagcacacataggcacagtcctgcgggacatccatgtcagtgtctgttctgatgggccgaatctaagaacaggtttgaacgtcatccttgggggtgtggagtggcagagcactcctgggaatcttgtaagaagacaaggagagacaggacttcatcttcacatctaccactggtggcaggctgtggccatcttccccgtgtacctgggctcgagcctgcacatgaag

SEQ ID NO: 6480 - DNA, 7103 bp, Homo sapiens
  SIMILAR (2430)..(6368): 761254mologous to Homo sapiens NuMA protein,accession number Z11583,Smith-Waterman Score=4590.
  misc_feature (1)...(7103): n = a,t,c or g
gaacaatatcacagaagaggtgtacactccctgcgatattgggattaatatcgtacgcttcttccgtgaatattaggagcaatatcaccgggtggctgtacattgatcgctatgttggcagtcatgtcatactctacccgctgggtattaggatgggtgtcacaggagagatgaaaggcgaaaggcggagagggctccacgcagcaactaagtggctagaggaacatgcaccagctgattatcaaaacccccaagagtatggaaggacccagttaccaggaacccagccccagttggacccacatgaaagagaggatatgcaaaggctaaaccgagacagggaagctctcttggaaggattcaagaggggagctcagaaggccacaaacgttaacaaggtctctgaggtcattcagggaaaagaagaaagtccagcacaattccaccagagactgtgtgaggcctatcgtatgtatactccccttgatcacgatagccctgaaaatcagcgcatgattcacatggctttagtccgtcaaagcgcagaagacatgagaagaaaactgcagaaacaggctgggcttgcagggatgaatccatcacaattactagaaatagctagccaggtgtttgtaaacagggatgcagtaagccctaaggaaaacagcaaagagaatggaggtcaggcccggcgacacgatgacctgtttagccctgtcgagcctgattgtgtagaagtgttggactcaattcactctagcagacctgacctccgggaccagccttggccatcaggagactgggaactatatgtggatgggagcagcttcttcaacccccaaggagagagaggtgcagggtatgcagtgataaccctggacactgttgttgaagccacatcgttgccccaggccacttcaggccagaaagctgaactcattgctttcattggggccttagaactcagtgagggtgagactgtcaacatttacactgattctcgccatggcactgaagagggacagcaaatcttgaagcagccggtgtcagagagactggactttgtgtgcagttttctgcagagaaggaacagcttctacatgggcacttgccaggatgagcctgagcagctggatgactggaaccgcattgcagagctgcagcagcgcaatcgagtgtgccccccacatctgaagacctgctatcccctggagtccaggccttccctgagcctgggcaccatcacagatgaggagatgaaaactggagacccccaagagaccctgcgccgagccagcatgcagccaatccagatagccgagggcactggcatcaccacccggcagcagcgcaaacgggtctccctagagccccaccagggccctggaactcctgagtctaagaaggccaccagctgtttcccacgccccatgactccccgagaccgacatgaagggcgcaaacagagcactactgaggcccagaagaaagcagctccagcttctactaaacaggctgaccggcgccagtcgatggccttcagcatcctcaacacacccaagaagctagggaacagccttctgcggcggggagcctcaaagaaggccctgtccaaggcttcccccaacactcgcagtggaacccgccgttctccgcgcattgccaccaccacagccagcgccgccactgctgccgccattggtgccacccctcgagccaagggcaagctgggccaggacgacgtgacgctggacaacctgttcagggtccacgagcacacaggagaagttggtgctgtgcagggcaggggtcagctgctccagcaccaaggccttgcacagctgcgtacctgtgctcccacgttcccggctggagcggaagggaaggaaaggtatggtttccaggaagttcaccctgttttctacgttgttgtcattgcagaaaatcgaaaacatccctcttccccagaatgcctggtatctgcacagaaggtgctagagggatcagagctggaactggcgaagatgaccatgctgctcttataccactctaccatgagctccaaaagtcccagggactgggaacagtttgaatataaaattcaggctgagttggctgtcattcttaaatttgtgctggaccatgaggacgggctaaaccttaatgaggacctagagaacttcctacagaaagctcctgtgccttctacctgttctagcacattccctgaagagctctccccacctagccaccaggccaagagggagattcgcttcctagagctacagaaggttgcctcctcttccagtgggaacaactttctctcaggttctccagcttctcccatgggtgatatcctgcagaccccacagttccagatgagacggctgaagaagcagcttgctgatgagagaagtaatagggatgagctggagctggagctagctgagaaccgcaagctcctcaccgagaaggatgcacagatagccatgatgcagcagcgcattgaccgcctagccctgctgaatgagaagcaggcggccagcccactggagcccaaggagcttgaggagctgcgtgacaagaatgagagccttaccatgcggctgcatgaaaccctgaagcagtgccaggacctgaagacagagaagagccagatggatcgcaaaatcaaccagctttcggaggagaatggagacctttcctttaagctgcgggagtttgccagtcatctgcagcagctacaggatgccctcaatgagctgacggaggagcacagcaaggccactcaggagtggctagagaagcaggcccagctggagaaggagctcagcgcagccctgcaggacaaggccagggcaaaaggagatcttggtaacaagatgatgggccccatgtttgctgatgtttatgagggcttgtgtggtaatctgaaatgccttgaagagaagaacgaaatccttcagggaaaactttcacagctggaagaacacttgtcccagctgcaggataacccaccccaggagaagggcgaggtgctgggtgatgtcttgcagctggaaaccttgaagcaagaggcagccactcttgctgcaaacaacacacagctccaagccagggtagagatgctggagactgagcgaggccagcaggaagccaagctgcttgctgagcggggccacttcgaagaagaaaagcagcagctgtctagcctgatcactgacctgcagagctccatctccaacctcagccaggccaaggaagagctggagcaggcctcccaggctcatggggcccggttgactgcccaggtggcctctctgacctctgagctcaccacactcaatgccaccatccagcaacaggatcaagaactggctggcctgaagcagcaggccaaagagaagcaggcccagctagcacagaccctccaacagcaagaacaggcctcccagngcctccgccaccaggtggagcagctaagcagtagcctgaagcagaaggagcagcagttgaaggaggtagcggagaagcaggaggcaactaggcaggaccatgcccagcaactggccactgctgcagaggagcgagaggcctccttaagggagcgggatgcggctctcaagcagctggaggcactggagaaggagaaggctgccaagctggagattctgcagcagcaacttcaggtggctaatgaagcccgggacagtgcccagacctcagtgacacaggcccagcgggagaaggcagagctgagccggaaggtggaggaactccaggcctgtgttgagacagcccgccaggaacagcatgaggcccaggcccaggttgcagagctagagttgcagctgcggtctgagcagcaaaaagcaactgagaaagaaagggtggcccaggagaaggaccagctccaggagcagctccaggccctcaaagagtccttgaaggtcaccaagggcagccttgaagaggagaagcgcagggctgcagatgccctggaagagcagcagcgttgtatctctgagctgaaggcagagacccgaagcctggtggagcagcataagcgggaacgaaaggagctggaagaagagagggctgggcgcaaggggctggaggctcgattacagcagcttggggaggcccatcaggctgagactgaagtcctgcggcgggagctggcagaggccatggctgcccagcacacagctgagagtgagtgtgagcagctcgtcaaagaagtagctgcctggcgtgagcggtatgaggatagccagcaagaggaggcacagtatggcgccatgttccaggaacagctgatgactttgaaggaggaatgtgagaaggcccgccaggagctgcaggaggcaaaggagaaggtggcaggcatagaatcccacagcgagctccagataagccggcagcagaacgaactagctgagctccatgccaacctggccagagcactccagcaggtccaagagaaggaagtcagggcccagaagcttgcagatgacctctccactctgcaggaaaagatggctgccaccagcaaagaggtggcccgcttggagaccttggtgcgcaaggcaggtgagcagcaggaaacagcctcccgggagttagtcaaggagcctgcgagggcaggagacagacagcccgagtggctggaagagcaacagggacgccagttctgcagcacacaggcagcgctgcaggctatggagcgggaggcagagcagatgggcaatgagctggaacggctgcgggccgcgctgatggagagccaggggcagcagcaggaggagcgtgggcagcaggaaagggaggtggcgcggctgacccaggagcggggccgtgcccaggctgaccttgccctggagaaggcggccagagcagagcttgagatgcggctgcagaacgccctcaacgagcagcgtgtggagttcgctaccctgcaagaggcactggctcatgccctgacggaaaaggaaggcaaggaccaggagttggccaagcttcgtggtctggaggcagcccagataaaagagctggaggaacttcggcaaaccgtgaagcaactgaaggaacagctggctaagaaagaaaaggagcacgcatctggctcaggagcccaatctgaggctgctggcaggacagagccaacaggccccaagctggaggcactgcgggcagaggtgagcaagctggaacagcaatgccagaagcagcaggagcaggctgacagcctggaacgcagcctcgaggctgagcgggcctcccgggctgagcgggacagtgctctggagactctgcagggccagttagaggagaaggcccaggagctagggcacagtcagagtgccttagcctcggcccaacgggagttggctgccttccgcaccaaggtacaagaccacagcaaggctgaagatgagtggaaggcccaggtggcccggggccggcaagaggctgagaggaaaaatagcctcatcagcagcttggaggaggaggtgtccatcctgaatcgccaggtcctggagaaggagggggagagcaaggagttgaagcggctggtgatggccgagtcagagaagagccagaagctggaggagaggctgcgcctgctgcaggcagagacagccagcaacagtgccagagctgcagaacgcagctctgctctgcgggaggagctcgagcacaccagcacacaggccctggtgagtgagctgctgccagctaagcacctctgccagcagctgcaggccgagcaggccgctgccgagaaacgccaccgtgaggagctggagcagagcaagcaggccgctgggggactgcgggcagagctgctgcgggcccagcgggagcttggggagctgattcctctgcggcagaaggtggcagagcaggagcgaacagctcagcagctgcgggcagagaaggccagctatgcagagcagctgagcatgctgaagaaggcgcatggcctgctggcagaggagaaccgggggctgggtgagcgggccaaccttggccggcagtttctggaagtggagttggaccaggcccgggagaagtatgtccaagagttggcagccgtacgtgctgatgctgagacccgtctggctgaggtgcagcgagaagcacagagcactgcccgggagctggaggtgatgactgccaagtatgagggtgccaaggtcaaggtcctggaggagaggcagcggttccaggaagagaggcagaaactcactgcccaggtggagcagctagaggtatttcagagagagcaaactaagcaggtggaagaactgagtaagaaactggctgactctgaccaagccagcaaggtgcagcagcagaagctgaaggtggggcagctgggggaatgggtctggcctctggacaagggagggaagctattctctaagctctggggccgtggggggttggtttataagtggttcctgctaatctataaaatcagctatgccactggcattgttggctacatggctgtcatgtttaccctctttggtcttaacttattattcaagatcaaaccagaagatgccatggactttggcatctcccttctcttctatggcctctactatggagttctggaacgggactttgcagaaatgtgtgcagactacatggcatctaccatagggttctacagcgagtcgggcatgcctaccaaacatctttcagacagtgtgtgtgctgtgtgtgggcagcagatctttgtggacgtcagtgaagaggggatcattgagaacaccggtgctcagcttccacgagttctgcatccgtggctggtgcatcgtgggaaagaagcaaacgtgtccctactgcaaagagaaggtagacctcaagaggatgttcagcaatccgtatcctttattggggtcgttgttgggagtgggctgtgggaagaaagtactggccagtgtgacctgcatttgggtcctcctggggccctcacttctgcccccaaccagaacatgtcaaaccatgaacaacaaaaagattatgaaggtgatgatgaggataaagaggatgatgacagacaccatggcatcatgaacccttactga

SEQ ID NO: 6481 - DNA, 2524 bp, Homo sapiens
  SIMILAR (158)..(946): 331254mologous to Baboon endogenous virus strain M7 gag-pol precursor polyprotein,accession number D10032,Smith-Waterman Score= 368.
atattaggaaaaaatgtccctggggatgtgaacagccctgcgatattgagagtagtatcatcctctccccttgcatactgggaaaaatatcacagattatatttggatcaatatcaccggctgggtgtacacctactgcgatattgaacgtaatatcatgctctctccctccctggacattagaagcaataacacagctcgtttacgacccaaaacggggacacaaatgcccctgagagagcagcggtatactgggatagataaggatggtcacttggtggagaggcgtgcttttggctaccagcccatcacctgcgtcaaccttctcaactggaaaaacaatacacagaactataccgaaaagccacaagccctaattgattttctccaagctgttatccagacccacaaccccaccttggctgattggcaccagttgctcatgttcctctttaacagcgaagaaaggcggagagtcctccaagcagtaactaagtggctagaagaacatgcaccagctgattatcaaaacccccaagagtatggaaggacccagttgccaggaaccgacccccagttggacccacatgaaagagaggagttgcaaaggctaaaccgagacagggaagctctcttggaaggattcaagaggggagctcagaaggccacaaacattaacaagctctctgaggtcattcagggaaaagaagaaagtccagcacaattcgacgagagactgtgtgaggcctatcgtatgtatactccctttgatcccgatagccctgaaaatcagcgcatgattcacatggctttagtccgtcaaagcgcagaagacatgagaagaaaactgcagaaacaggctgggcttgcagggatgaatccatcacaattactagaaatagctagccagatgtttgtaaacagggatgcagtaagccctaaggaaaacggcaaagagaatggagatggggtttctaaaggatggcccccctgtttgagggccttggcagcaactgccctgctagtacaagaagcaaataagctgactcttgggcaaaacctgaacataaaggcctcccgtgctgtggtgactttaatgaatactaaaggacatcattggctaacggatgccagactcatcaagtaccaaactttgctctgtgagaatccccgtataaccattgaagtttgtaacaccctacaccccgcctccttgctcccggtatcagagagcactgtcgagcctgattgtgtagaagtgttggattcagttgactctagcagacctgacctccgggaccaagcttgggcatcaggagactggaaactatacgtgtatgggagcagcttcttcaacccccaaggaaagagagaggtgcaggcccttgccaaaacggtgaggcagcggtgtgttacctgccgacagcatgatgcgaggcaaggtccagccgttccacacggcatacgagcttatggagcagccccctttgaaggtctccaggtggacttcaaagagatgccaaagtgtggaggtaacaagtatgtactatttcttgggcgtacctactctgggtgggtggaggcctatccaacacgaactgagaaagctcgtgaagtaacccctgtgcttcttcgggatctgattcctaaatttcgaccgcccttatggatcggctcaaacaacgggcctgcatttttggctgccttggtacagaaaacggcaaagatattaggaaaaaatgtcactggggatgtgaacagccctgcgatattgagagtagtatcatcctctccccccttgtatattgggaacaacatcacagaggatccagaactgcagccagtcctcgctttgctgtccctgtccctgtccatgtatctggtcacggtgctgaggaacttgctgagcatcctggctgtccgctctgagtccccgctccacacaaccatgtacttcttcctctccatcctgtgctgggctgacatcggtttcacctcagccacagttcccaagatgattgtggacatgcagtggtatagcaaagtcatctctcatgcgggctgcctgacacagatgtctttcttggtcctttttgcatgtatagaaggcatgctcctgactgtgatggcctatgactgctttgtaggcatctgtcgccctctgcactacccagtcatcgtgaatcctcatctctgtgtcttctttgttttggtgtcctttttccttagcctgttggattcccagctgcacagttggattgtgttacaattcaccatcatcaagaatgtggaaatctctaattttgtctgtgacccctctcaacttctcaaacttgcctgttctgacagcgtcatcaatagcatcttcatatattttggtagtactatgtttggttttcttcccatttcagggatccttttgtcttactataaaatcgtcccctccattctaaggatttcatcgtcagatgggaagtataaagccttctccacctatggctctcacctagcagttttttgctga

SEQ ID NO: 6482 - DNA, 3022 bp, Homo sapiens
  SIMILAR (245)..(673): 611254mologous to Homo sapiens Human G-protein coupled receptor GRIR-1,accession number Y28279,Smith-Waterman Score=394.
ggaaggagagtatgctattactcccaatatcgcaggagttgtacacccttttgtgttttttggtccaatatccaggaaaatagaggatgatatttctcccaatgtcgaagtaattctagagcacccctgtgatattctccctaatatccagaaaatattaggaaaaaatgtcactggggatgtgaacagtcctgcgatattgagagtagtatcatcatctccccccttggatattgggaacaacatcacagaggatccagaactgcagccggtcctcgctttgctctccctgtccctgtccatgtatctggtcacggtgctgaggaacctgctcagcatcctggctgtcagctctgactcccacctccacacccccatgtacttcttcctctccaacctgtgctgggctgacatcggttacacctcggccacggttcccaagatgattgtggacacgcagtcgcatggcagagtcatctctcatgctggctgcctgacacagatgtctttcttggtcctttttgcatgtatagaagacatgctcctgactgtgatggcctatgactgctttgtagccatctgttgccctctgcactacccagtcatcgtgaatcctcacctctgtgtcttcttcgttttggtgtcctttttccttagcctgttggattcccagtttattcctccggtcacagagggtgttcaccctgtgatatttttcatcatagctttgtgggatgttactcctaaagtcacacggggtgtacacagagtcacacagtgatatgagctgtaatattaggtgagacccataggtggagaaggctttatacttcccacctgatgatgaaaccctcagaatggaggaaacaattttatcgtaagagaaaagtgtccccgagatgggaagaaaaccaaatatggcatcagggaaatacaggattatgttattgttgaaggtgtcacaacatgcaagatgggggagttgagaagggtcacagaagaaattaggaatttccacatccttgaagcaggtcatttgtaaggcaatcaaattgtacagctgggcatctaaaagatcaggagtatgtctgtcttccatgcctccaaaaatggcaaagagagacatctgagtcaggcagcctgcataggagatgactctgctgtgagattggatgtccacagtcatcttggggactgtggtggaggtgaaactgatgtcaggcaaggacaggttggagaggaagaagtacatgggggtgtggaggtgggagtcagggctgatggccaggatgatgagcaggttccccagcgccatgaccaggcacgtggacaggaacagcccagtgaggaccggctgccgttctggatcctctgagctttgaacggcccttcccctctgctgggccatgaccacggagaacaggtccactgtcctccccacacaagaaaaaggatggagcagatcttgagataacagatcatgagattcgactgttctgctgcgcagcctccacagggcactttgaatgtccctatttctcaggctgtagatgaaagggttcagcatgggggtgaccacagcgtacatcactgatgccaccacaccattcctggggggtggtgacaccagctgaagtcaggtacacgccaatgcctgttccataaaataagcaaacaactgccaggtgagagccacaggtggagaaggctttagacttcctatctgatgatgaaattcttagaatggaggggacattgttagcgtaagacaaaaggatccctgaaatgggaagaaaaccaaacataatactatctaaatatatgaatatggttagtgaatgcccctgtcagaacaggcaaggttgagaagttgagatgggtcacagaaaaaaaattatagatttccacattcttgaagaaggtgagttgtgtaacacaatccagctgtgcagctgggaatccaacaggctaaggaaaaaggacaccaaaactaagaagacacagaggtgaggattcatgatgactcggtagtgcagggggtgacagatgggcagatggctacaaagcagtcataggccatcacagtcaggagcatgccttctatacatgcagcaaggagcaggaaagacatctgtgtcaggcagcccgcatgagagatgactctgctatgcgactgcgtgtccacaatcatcttgggaaccatggccgaggtgaaaccgatgtcaggccagcacaggttggagaggaagaagtacatgggggtgtggagggggcagtcagagctgacagccaggatgctgaaaaggttcctcagctccgtgaccagatacatggacagggacagggacagcaaagcgagggccggctgcagttctggatcctctgagagtcccaggaggaggaattctgagacacctgtgagattccgtggctctgtgtgacttggacacccggaggtggagaggatgataatactcccaatatcacaaggggtgtacaccacccctgtttgatatcgttggtaatatgccagcggggcagaggatgatattacagccaatatcgcaggggatgtacacccccttgtgacattcttccttctatccctgactttccatccaacagtacctagcccgtccacattgttggggttgctgccagccgaggacagctggttcacctgcttggacctgagagacgctttctttcctatcagattagccccggagagccagaagctgtttgcctgtgctgggctgacatcggtttcaccttggccacggttcccaagatgattgtggacatgcagtcgcatagcagagtcatctctcatgcgggctgtctgacgcagatgtctttcttcatcctttttgcatgtatagaaggcatgctcctgactgtgatggcctatgactgctttgtagccatctgtcgccctctgcactacccagtcatcgtgaatcctcacctctgtgtcttcttcgttttggtgtcctttttccttagcctgttggattcccag

SEQ ID NO: 6483 - DNA, 3197 bp, Homo sapiens
  SIMILAR (2009)..(2554): 461254mologous to Feline leukemia virus gag-pol precursor polyprotein gPr80,accession number AF052723,Smith-Waterman Score= 398.
atggaggaaggatggattcggttaccagatgggagactagctgtgccacagctgctaggagctgcagttgtactggctgtgcaagaaaccacccatcgagatcaggagtcactggaaaagttgttaggctggtatttctacatctcacttctgtcagcccttgccaaaacgatttcgaccgccttacggatcggctcagacaacgggcctgtgtttttggctgccttggtacagaagacagcaaaggtgtccaagacacagagagccacggaatctcacaggtgtctgagaattcctcctcctgggactctcagaggatccagaactgcagccgtcctcgctttgctgtccctgtccctgtccatgtatctggtcacggtgctgaggaacctgctcagcatcctggctgtccgctctgactcccccctccacacccccatatacttcttcctctccaacctgtgctgggctgacatcggtttcacctcggccacagttcccaagatgattgtggacatgcagtcgcatagcagagtcatctctcatgcaggctgcctgacgcagatgtctttcttggtcctttttgcatgtatagaaggcatgctcctgactgtgatggcctatgactgctttgtagccatctgtcaccctctgcactacccagtcatcgtgaatcctcacctctgtgtcttcttcgttttggtgtcctttttccttagcctgttggattcccagctgcacagttggattgtgttacaattcaccatcatcaagaatgtggaaatctctaattttgtctgtgacccctctcaacttctcaaatttgcctgttctgacagcatcatcaatagcatattcatatatttccataaggatccagaacggccagctggtccttgctggactgttcctgtccatagtgactggtcatggtgatggggaacctgctcatcatctctggccgtcagccctgactcccacctccacacccacatgtacttcttcctcatccaacctgtccttgcctgacatcggtttcacctccaccacggtccccaagatgagcgtggacatccagtctcacagcagagtcatctcctatgcaggctgcctgactcaaatgtctctctttgccatttttggaggcatggaaaaaagacatgctcctgagatattaagatccaaatggcaggggggcgaggcgccccccgcgattcggggagtaataccacccgcctctccccccgcatatattaagatccaaatggcagggaggcgaggcgccccccgcgatgcggggaattatattcggatcaatatcaccggctgtgtgtacacctactgcgatattgaacgtagtatcatgctctctccctccctggagattaggagcaatatcacagctcgtttacgacccaaaacggggacacaaatgcccctgagagtgcagcgttatactgggatagacgaggatggtcacgtggtggagaggcgtgtttttggtgaagaaaggcggagagtcctccaagcaggaactaagtggctagaggaacatgcactagctgattatcaaaacccccaagaatatggaaggacccagttgccaggaaccgacccccagttggacccacatgaaagagaggagatgcaaaggctaaaccgagacagggaagctctcttggaaggattaatgaggggagctcagaaggccacaaacgttaacaagctctctgaggtcattcagggaaaagaagaaagtccagcacaattctacgagagactgtgtgaggcctatcgtatgtatactccctttgatcccgatagccctgaaaatcagcacatgattcacatggctttagtccgtcaaagcgcagaagacatgagaagaaaactgcagaaacaggctgggcttgcagggatgaatccatcacaattactagaaatagctagccaggtgttcataaacagggatgcagtaagccctaaggaaaatggcaaagagaatggaggatggcccccctgtttgagggccttggcagcaactgccctgctagtacaagaagcaaataagctgactcttgggcaaaacctgaacataaaggcctcccgtgctgtggtgactttaatgaatactaaaggacatcattggctaacggatgccagactcaccaagtaccaaactttgctctgtgaaaatccccgtataaccactgaagtttgtaacaccctacaccctgccaccttgctcccggtatcagagagccctgtcgagcctgattgtgtagaagtgttggactcagttgactctagcagacctgacctccgggaccaggcttgggcatcagtagactgggaactatacgtggatgggagcagcttcttcaacccccaaggagagagaggtgcagggtatgcagtggtaaccctggacactgttgttgaagccagatcgttgccccaggccacttcagcccagaaagctgaactcgttgctttcattcgggccttagaactcagtgaggttgagactgtcaacatttacactgattctcgaggacaccagcgagcttccaccttgctgggtttggggaattcccgcgctgactcagaggctcgaaaagcagcatctgcccccttctgggcatcagtgctccctcaagcacctgatcttggacctacttcttctaaagaagaaaaggaccttctccagatttcgaccgccttacggatcggctcagacaacgggcctgtgtttttggctgccttggtacagaagacagcaaagatattaggaaaaaatgtcactggggatgtgaacagccctgcgatattgagagtagtatcatcccctccccccttgcatattgggaaacaacatcacagcaaaaaggaatgtagtaggagggcagggtgataataaggagaaggtgagcaacgaacatgtgagcaatacaatctaagtcataaggaagttcaagggaaggtactatgactggacgtgtacgaaccttctgtcatggaaccagagattggagaccgtgggaacacatccaaatccacatctccgtgacaaggtggtgctgatttccagtggtcctccctggtgggggaatcacgtagctctgactctggagcgtgttgttgtgtttctctttcagtacgagcttgtctgtggccctgcagttcctcccttatga

SEQ ID NO: 6484 - DNA, 1874 bp, Homo sapiens
  SIMILAR (621)..(1391): 311254mologous to Mus musculus ankyrin 3,accession number L40632,Smith-Waterman Score=247.
  misc_feature (1)...(1874): n = a,t,c or g
accatgcnnnnnnnnnnnnnnnnnnnnnnnnnnnnnnnnnaggattcacaatttgaacaaattctattttaagcttcatattttcctcagcatttnnnnnnnnnncacgtacagagaccatgtccagggcagcagctgcagccggacccccacgccaggccacccctgcctctccccggtggtccaatgactgtgtactgcgcagggaatgcagcaaccccatcgggcacactcttcagcactacccggggaggtaccaggatcatgtacaactggaaattcccaatagagtgctgaactcaccagtgaccaaaacaccctcgagggacccgcccaccacttccggggtcaccagccctgccagtgatgagcccccggcagacatacagacagcccagaacagcaggcaggtggtgaagggtcagagtttgacctggacatctaaaggcctagccatgagaaggaaaggaagcagagacctggtggttgacagtgccaagtccctggaagatggcccatctgcagcacttcactcgaaactctatgaagccatcatgagagaagactgcactacgatcgaggtactcctgagaaatcaccctgtcaaccagcccatcaccattctgcccaactccgccagcaacagattacttctgacccagccgacagagtctatcatccccatccatctggctgccaagtaccacaaggcccagagtctgctctgcctgttacggcacggtgctgacccagaagtcagggacacgacaggcctcaccacactcaacttaatgctactgcactggccagtcacttccaccacgtgggcaaaaccaggcaacagaacgcacaggatcctgacagacattcagaatagcagcatcacatgtctccgcatcttgtgtgcgcacggagctcaagtgaacactcaaggggaaatcagcaacaaacgttcaccactccacctggccatagcatatggttgctatccagttctctccattttgacccaaaatggtgccgatgtcaatgctattaatgaagccagcatgacaccccttcacatggccgcaaacatgctgaataaggagatgatggaaacgctcattgcctatggagcaaacgtcaactgtgctgtctcttccacggggaacacgcccctgaagcttgcagtgtgcactgcatcaagcaaagcaggccgactcctcggggcgggggtcagctgcatccgtctgctactcactcacggagccaaagtcaacgcccaggactacaagggccaaacagccatccatgaggcatgctttggaggcagagaggcaatcatcaatctcctgcttgaatttgaagcaaatgttaacattttaacaagaaacggggaatctccaatttatatgtaccttcagcgcagttgcaatgtaagagatacggcacttctggccaggctactttatcacacttatcctctgagaatgaccaataaccaaggaattctacctgcaggaatcatgctaccagaattccgcctcttaagggacaccctaataaagcaatcgcaaaaacctttatccctacagggtatctgccaaagaaacatcaggaatatttatggtgagaaatacaagcagcccttgaagcaattcctcccagtgacaatatggaattctgtctactgctggtatgacttggcatatacctcttgaaataagacctcccagtttcacagcagagggactttcggccactccaactgcattttctggctagacatggcccagaaaatgcttcccctatcacctgtgacatcccaaatgtgccaactactgattcttgaacatgttccaaaaaacaaagtgatttgtctattaaaaaaa

SEQ ID NO: 6485 - DNA, 429 bp, Homo sapiens
  SIMILAR (1)..(426): 671254mologous to Homo sapiens NAG13,accession number AF194537,Smith-Waterman Score=473.
atgataaaaaccctcaacaaaacaggcatacaagggacttacttcaaagtaataaaagcgatatatgacaaacccatagtcaacatcatattgaacgaggaaaagttgaaagcattccccctgagaaatggaacaaaacgtccttcacaacaatgtccactttcaccatttctagtcaacataacacaggaagtcctagccagagtacttatagaagagaaagaaataaagggcatccaaattggaaaagaggatgtcaaactgtcactgtttaccaataatatgattagatacctagaaaaccctgaagattcatccaaaaagctcctagatctgataaatggattcagtaaagtctcaggatacaaaatcaatgtacacaaatcagtagcactgctgtataccaacaacaaccaagctgaaaattaa

SEQ ID NO: 6486 - DNA, 475 bp, Homo sapiens
  SIMILAR (38)..(451): 501254mologous to Homo sapiens DNA binding protein,accession number Z97054,Smith-Waterman Score=329.
ttgccgggtcgacccacgcgtccgggaagaggtgcctttgaaacctgggggtgggagtattcttgtgacacaaaataataaagcggagtacgtccagcttggtactgaacttcgaatgacaagagccattcagcctcagatcaatgcttttttacagggctttcatatgttcattccaccctccctcatacagctttttgatgaatatgaattggagctactgctttctggcatgccagaaattgatgtgagtgattggataaaaaatacagaatacacaagtggctatgaaagagaagatccagttattcagtggttctgggaagttgtagaagacattactcaagaggagagagttcttctcttacagtttgttacgggcagttccaggggtcccacatgggtgggttttgctaatatcatggggtgggaagtgggattgcaaaacttttacaatcgctggctgtgccatata

SEQ ID NO: 6487 - DNA, 504 bp, Homo sapiens
  SIMILAR (70)..(210): 531254mologous to Homo sapiens upstream regulatory element binding protein 1,accession number AF057569,Smith-Waterman Score= 121.
atggaaacagggacaccagatgttgcagtaatccagatgagaagtgatgatagcttggactggggtgctgaaatggaggcggagtacgtccagcttgttactgaacttcgaatgacaagagccattcagcctcagatcaatgcttttttacagggctttcatatgttcattccaccctccctcatacagctttttgatgaatatgaattgctgccagtgcagataggatcaaagcaagcagaggaacatggaagggctagactggctaagtcttctggcctccatctttctccattactggatgctacctgccctcgaacatcagactccaagtcttcagcttttggactcttggacctacaccaggggctctcagaccttcagccacagactaaaggctgcactgtcggcttccctatttttgaggttttggactcaaactggcttccttgctcattagcttgcagacagcttactgtggaacttcatcttctgatcatgtga

SEQ ID NO: 6488 - DNA, 593 bp, Homo sapiens
  SIMILAR (288)..(560): 761254mologous to Homo sapiens protein translocase,accession number AJ005895,Smith-Waterman Score=339.
  misc_feature (1)...(593): n = a,t,c or g
atcgtagttcctagtccatgtggtggaattccgctcgggagccctgcccatggcgaattgtggatgattgcggtggagccttcactatgggtgtcatcggtggcggagtcttccaggccatcaagggtttccgcaatgcccctgtttgcagattgctgtctgaagctcccttgtttatctactcttgctcaagatctgtgtctcccaccgttaatgtgagctctgagagggcagagagcagacctaccttgttcatggctgtatccctgcatatggcatggtgcttggcacatataggaattcggcaccggttgagaggtagtgccaatgctgtgaggatccgagccccccagattggaggtagcttcgcagtgtgggggggcctgttctccaccatcgactgtggcctggtgcggcttcggggcaaggaggatccctggaactctatcaccagtggagcaattgaccggggctgttctgggctgcccgcagtgncccactggcaatgggtgggctcagcaatgatggggggcatcctgttggcctcattgagggggttggnatcctcctaatcggtaaacagccacagttcg

SEQ ID NO: 6489 - DNA, 849 bp, Homo sapiens
  SIMILAR (264)..(554): 401254mologous to Homo sapiens protein translocase,accession number AJ005895,Smith-Waterman Score=113.
ccgacgatttcgtgccagcgccatggaggagtacgctcgggagccctgcccatggcgaattgtggatgattgcggtggagccttcactatgggtgtcatcggtggcggagtcttccaggccatcaagggtttccgcaatgcccctgttggaattcggcaccggttgagaggtagtgccaatgctgtgaggatccgagccccccagattggaggtagcttcgcagtgtgggggggcctgttctccaccatcgactgcggcctggtgcggcttcgggcgcaaggaggatccctggaactctatcaccaagtggagcatttgaccggggctgtgctgggctgcccgcaggtggcccactggccatgggtgggcttcagcaatgatgggggggcatcctgtttgcgcctcatttgagggcgtttggcatcctcctcactcgctacacagcccaagcagttccgaaatgcgcccccattcctggaggaccccaagccaagctgccccctaaggatggcaccccggccatcaggctaccccaagctatcagcagtaccactgaggaagccactgccaccatgggagctacttctcggttccctccccgatgggtctaccctcaaagggagggctggctcccaagttagccctgggaccctccagagagggtttctactctgctccctagtcccagggtgggggtggggcaccccagctgccctgacagatgggtcccctttttctctctcagggcaccccagccccacactcacatgtacgaagttctcaccccagctcctttgtgtggcaccctgatgagtatttaaagcccgttttgaaatgccaaaaaaaaa

SEQ ID NO: 6490 - DNA, 2277 bp, Homo sapiens
  SIMILAR (385)..(1440): 261254mologous to Homo sapiens Human thyrotropin GPR N- terminal sequence,accession number W03626,Smith-Waterman Score=276.
tttcgtggccgcttgaaaagctagctgaccctggggcggccacaggagctctggcccgctgaggctggcgatgaggccgcagggagggttactgcgtgcttgtgacagacgatttttaaagtcagggcttgaaagaacaaacaaaacctggggaagagtcaggaagacactgccggaaatcgtggtatccatagagacgctatcggaagttggggttgctaggaagccgcggcgcgtctgctaagctgcaaatggctgaagtcccggaggattatgattccggcccagaatgaagatggagagctggagcctgagaggcctgaactgcctggacttcataaattgtatgaaaatgccgaaccagacaccatggcaaaggcagactcgaagctaccagcagagatttaccaagagccacagccagagaccgaggaagaggacttcaaagagggggagccagacagtgctaagaacgtgcagctgaaacctggcgggacgtcccaggaaggaattgccaaggagtccaagagagacgtaccaagcgaaactgaaccagggatacaccaagaggtaaagtcggaaacatccagagagatgggagagtttttcaaagatttggaggcccctatggatgaaacgcataaagagtcagacctagagccaccagaggaggctaaaccaaatgttacagaggatgtgttcctagagtcagctatggaaacagatccagatccagtgccaccaacggaaaccatgtctgaggtttcgggggccacagtcagagagagaaatttagaattactagaggaggagactgaaccgggggttccagaggaatcacttagagtgcaacatgaagagacaggtctagagcctccagagcagaccaaacaagattttccaagtgagaaactaggagaatcacttgaagagacagatcttcagccaccaaagatgaccaaaccagagactccagaggagacacaaagagagtcaactgagaagaaaaggacagagccacccgagcaggctagactggaatttctggagaaggaaccaagaaagtctagtgaggaggcaggtctagagcctccagaagagactcaaccagaggttccagaggagatgcaaagaaaggcaactgaggagaaagggacagaactacctgagcggactaaaccagactttccagaccacaagccaagaaagtctactgatgagaacgttcctgagccactagaagagatcaaattagagtttcctgaggaagaatcaagaaaaacaaatgaggaaacaattctagaacaatcagaaatgatgaaaccagaaagtccagaagagataagaaagtcaaatgagaaaaaaaatccacagccaccagaggagactggtccagtgctaccacaggagatcaacccacaagttgaagagaaaacacaaacaaagccaactgagaaaattctagagttaccagatgaaaccaaaccaagggagacacatgtagaattttccaaggaagacaggccagaaccaataaagtctaagtattctgtaggaaacgatgagctagagcaccgtgagcctaaaagaggaaagttgtcactaagtgacaaatttagaaaagaatattacgcattaggatctctcagagaaagtgaagaatcaattggtacacattatgagtttttgcaaccactccaaaaattgcttaatgtcagtgaagaatgctcatactcagatccctcagagtctcagacagaattaagtgagttcgttcatgaaaaggaagttgtagatttgtcccaagagttgaaggaacgggtctctgaagatgacgaaacccagccagaaaaagggactgagttacaatttgagcatcttaattgggatccagaggaagttgcagagtggattagccagctaggcttccctcaatacaaggagtgttttatcacaaacttcatcagtggccgaaaactcattcacgtcaactgctcaaacctccctcagatggggataacaaactttgaggacatgaaggcaatttctcggcatacgcaggagctcctggaaattgaagagccattattcaaacgctccatcagccttccctatagggatattatcggcttatatttagagcaaaaaggtcatactgggataaaatctgattccttgactttatctgaatttgtcaaagcagcaggattacaggattatgctccagaaataactgcccctgaagagaatgaggaattaccttgcactgaaccatag

SEQ ID NO: 6491 - DNA, 3765 bp, Homo sapiens; identical to SEQ ID NO: 3979
  SIMILAR (994)..(2463): 951254mologous to Homo sapiens putative p150,accession number U93572,Smith-Waterman Score=2459.

SEQ ID NO: 6492 - DNA, 1296 bp, Homo sapiens
  SIMILAR (280)..(1293): 991254mologous to Homo sapiens p40,accession number U93564,Smith-Waterman Score=1717.
atggcgggcgcccctcccccagcctcgttgccgccttgcagtttgatctcagactgctgtgctagcaatcagcgagattccgtgggcgtaggaccctctgagccaggtgtgggatatagtctcgtggtgcgccgtttcttaagccggtctgaaaagcgcaatattcgggtgggagtgacccgattttccagatggaaatgcagaaatcacccgtcttctgcgtcgctcacgctgggagctgtagaccggagctgttcctattcggccatcttggcaaagatggggaaaaaacagaacagaaaaactggaaactctaaaacgcagagcgcctctcctcctccaaaggaacgcagttcctcaccagcaacagaacaaagctggatggagaatgattttgacgagctgagagaagaaggcttcagacgatcaaattactctgagctacgggaggacattcaaaccaaaggcaaagaagttgaaaactttgaaaaaaatttagaagaatgtataactagaataaccaatacagagaagtgcttaaaggagctgatggagctgaaaaccaaggctccagaactacgtgaagaatgcagaagcctcaggagccgatgcgatcaactggaagaaagggtatcagcaatggaagatgaaatgaatgaaatgaagcgagaagggaagtttagagaaaaaagaataaaaagaaatgagcaaagcctccaagaaatatgggactatgtgaaaagaccaaatctacatctgattggtgtacctgaaagtgatgtggagaatggaaccaagttggaaaacactctgcaggatattatccaggaaaacttccccaatctagcaaggcaggccaacgttcagattcaggaaatacagagaacgccacaaagatactcctcgagaagagcaactccaagacacataattgtcagattcaccaaagttgaaatgaaggaaaaaatgttaagggcagccagagagaaaggtcgggttaccctcaaaggaaagcccatcagactaacagcggatctctcggcagaaaccctacaagccagaagagagtgggggccaatattcaacattcttaaagaaaagaattttcaacccagaatttcatatccagccaaactaagcttcataagtgaaggagaaataaaatactttatagacaagcaaatgctgagagattttgtcaccaccaggcctgccctaaaagagctcctgaaggaagcactaaacatggaaaggaacaaccggtaccagccgctgcaaaatcatgccaaaatgtaa

SEQ ID NO: 6493 - DNA, 407 bp, Homo sapiens
  SIMILAR (41)..(208): 661254mologous to Homo sapiens Human secreted protein, SEQ ID NO: 6908,accession number G02827,Smith-Waterman Score=192.
gctcgaccgagtgaggcaatgcgtcaccctgctctcactcatgcacagtgcactgcactcactgtcctgtgcccactgtctggcactccctagtgagatgaacctggtaccttagatggaaatgcagaaatcacccgtcttctgcgtcactcacgctgggagctgtagaccagagctgttcctattcggccatcttggctgccctccgcttcccttgtttttaacagggagaattaagcctcttcattgtctttattctttttttttttttcaattgccctaacagtttccgagagcagtgttccgtgactcctcagttaagccaccagttcttccgagcccaacacagggtctttggtgtgaaaatttctgttttttccttattgctttaaaaaaaaaaaagtcga

SEQ ID NO: 6494 - DNA, 528 bp, Homo sapiens
  SIMILAR (501)..(151): 491254mologous to Homo sapiens Spir-1 protein,accession number AJ277587,Smith-Waterman Score=236.
tcatgcttctggagcaaaactaccacgttttggaactggaagagacctagaaatcacagaatcagctcctctcatcaaagggagaatacgctgatggccagcaagatcaagtgtccattccagcacccagtccgtacaccctgagcgggcctcagactcagagctgtccagttcggccagagttggggctctgaggagcttcttccgctgtgcaggcacctgctgtgaggtacttaacccgttttcttttgtttgtgatgtcaaacctccattcaccatagatgactccacaagattcccaaagctatatacagatccaatagaatccccaagaaaatcctggggaggagccaagatggccgaataggaacagctccggtctacagctcccagcgtgagcgacgcagaagacggtgatttctgcatttccatctgaggtaccgggttcatctcactagggagtgccagacagtgggcgcaggccagtgtgtgtgcgcaccgtgcgcgagccgaagcagggcgaggcat

SEQ ID NO: 6495 - DNA, 897 bp, Homo sapiens
  SIMILAR (40)..(177): 471254mologous to Homo sapiens Human secreted protein, SEQ ID NO: 6908,accession number G02827,Smith-Waterman Score=99.
atgcctcgccctgctttggctggcgcacggtgcgcgcaaccactgacctgcgcccactgtctggcactccctagtgagatgaacccgttacctcagatggaaatgcagaaatcaccgtcttctgcgtcactcaggctgggagctgtagactggagctgttcctattcggccatcttggctcctccccctcttaacttcccattcttatacccataccatattcacataattcctgaaagatgtcatgacatagatccccatggagaagatcctgtggagatgacaccaggaggcctgatgaattacaaatctcaagggactgccttctccctgggctgctgttttgaaaagaaaaaaacaagaaaatttgaggatactatgcctggagaggtggttgaaaataggtacaatgaacaagggctctgtcatcctgggaccctctatcctaggaaacaagtggaacaaatcaaaagatttatactaactgaagaatataaaactatcagacagaagaatttcccagaaagcagcagcaaagaaaaagaaaataaggagtctcttcttgtgccaccaccacgcaggtctgtggtgagtactgcctgctactgccaatgtttcctcaaagcccgtggtctcttcactcagcttgtggtaaatactgccaggcctctccctttagagcagtgggctcccctgtggcccagggcaggtccagaaatgctttccaggaaccaaggcctgaaatcaaaggccctaggagcctccttggtgctctacctcaatctggtgaccaagctgcaagaccaagttccctttactcttccctctccttgccttaagcaagacgagtttctccctgtggccaccagaactgggaatgtgctgagtgacacctga

SEQ ID NO: 6496 - DNA, 8083 bp, Homo sapiens
  SIMILAR (91)..(5874): 1001254mologous to Homo sapiens CENP-E,accession number Z15005,Smith-Waterman Score=9572.
taaatttaaaggcggggcggcctgtgagccctgaagtgccggccgcggagggtcctggccattttggtgggaccagttcagcctgataggatggcggaggaaggagccgtggccgtctgcgtgcgagtgcggccgctgaacagcagagaagaatcacttggagaaactgcccaagtttactggaaaactgacaataatgtcatttatcaagttgatggaagtaaatccttcaattttgatcgtgtctttcatggtaatgaaactaccaaaaatgtgtatgaagaaatagcagcaccaatcatcgattctgccatacaaggctacaatggtactatatttgcctatggacagactgcttcaggaaaaacatataccatgatgggttcagaagatcatttgggagttatacccagggcaattcatgacattttccaaaaaattaagaagtttcctgatagggaatttctcttacgtgtatcttacatggaaatatacaatgaaaccattacagatttactctgtggcactcaaaaaatgaaacctttaattattcgagaagatgtcaataggaatgtgtatgttgctgatctcacagaagaagttgtatatacatcagaaatggctttgaaatggattacaaagggagaaaagagcaggcattatggagaaacaaaaatgaatcaaagaagcagtcgttctcataccatctttaggatgattttggaaagcagagagaagggtgaaccttctaattgtgaaggatctgttaaggtatcccatttgaatttggttgatcttgcaggcagtgaaagagctgctcaaacaggcgctgcaggtgtgcggctcaaggaaggctgtaatataaatcgaagcttatttattttgggacaagtgatcaagaaacttagtgatggacaagttggtggtttcataaattatcgagatagcaagttaacacgaattcttcagaattccttgggaggaaatccaaagacacgtattatctgcacaattactccagtatcttttgatgaaactcttactgctctccagtttgccagtactgctaaatatatgaagaatactccttatgttaatgaggtatcaactgatgaagctctcctgaaaaggtatagaaaagaaataatggatcttaaaaaacaattagaggaggtttctttagagacgcgggctcaggcaatggaaaaagaccaattggcccaacttttggaagaaaaagatttgcttcagaaagtacagaatgagaaaattgaaaacttaacacggatgctggtgacctcttcttccctcacgttgcaacaggaattaaaggctaaaagaaaacgaagagttacttggtgccttggcaaaattaacaaaatgaagaactcaaactatgcagatcaatttaatataccaacaaatataacaacaaaaacacataagctttctataaatttattacgagaaattgatgaatctgtctgttcagagtctgatgttttcagtaacactcttgatacattaagtgagatagaatggaatccagcaacaaagctactaaatcaggagaatatagaaagtgagttgaactcacttcgtgctgactatgataatctggtattagactatgaacaactacgaacagaaaaagaagaaatggaattgaaattaaaagaaaagaatgatttggatgaatttgaggctctagaaagaaaaactaaaaaagatcaagagatgcaactaattcatgaaatttcgaacttaaagaatttagttaagcatcgagaagtatataatcaagatcttgagaatgaactcagttcaaaagtagagctgcttagagaaaaggaagaccagattaagaagctacaggaatacatagactctcaaaagctagaaaatataaaaatggacttgtcatactcattggaaagcattgaagacccaaaacaaatgaagcagactctgtttgatgctgaaactgtagcccttgatgccaagagagaatcagcctttcttagaagtgaaaatctggagttgaaggagaaaatgaaagaacttgcaactacatacaagcaaatggaaaatgatattcagttatatcaaagccaattggaggcaaaaaagaaaatgcaagttgatctggagaaagaattacaatctgcttttaatgagataacaaaactcacctcccttatagatggcaaagttccaaaagatttgctctgtaatttggaattggaaggaaagattactgatcttcagaaagaactaaataaagaagttgaagaaaatgaagctttgcgggaagaagtcattttgctttcagaattgaaatctttaccttctgaagtagaaaggctgaggaaagagatacaagacaaatctgaagagctccatataataacatcagaaaaagataaattgttttctgaagtagttcataaggagagtagagttcaaggtttacttgaagaaattgggaaaacaaaagatgacctagcaactacacagtcgaattataaaagcactgatcaagaattccaaaatttcaaaacccttcatatggactttgagcaaaagtataagatggtccttgaggagaatgagagaatgaatcaggaaatagttaatctctctaaagaagcccaaaaatttgattcgagtttgggtgctttgaagaccgagctttcttacaagacccaagaacttcaggagaaaacacgtgaggttcaagaaagactaaatgagatggaacagctgaaggaacaattagaaaatagagattctccgctgcaaactgtagaaagggagaaaacactgattactgagaaactgcagcaaactttagaagaagtaaaaactttaactcaagaaaaagatgatctaaaacaactccaagaaagcttgcaaattgagagggaccaactcaaaagtgatattcacgatactgttaacatgaatatagatactcaagaacaattacgaaatgctcttgagtctctgaaacaacatcaagaaacaattaatacactaaaatcgaaaatttctgaggaagtttccaggaatttgcatatggaggaaaatacaggagaaactaaagatgaatttcagcaaaagatggttggcatagataaaaaacaggatttggaagctaaaaatacccaaacactaactgcagatgttaaggataatgagataattgagcaacaaaggaagatattttctttaatacaggagaaaaatgaactccaacaaatgttagagagtgttatagcagaaaaggaacaattgaagactgacctaaaggaaaatattgaaatgaccattgaaaaccaggaagaattaagacttcttggggatgaacttaaaaagcaacaagagatagttgcacaagaaaagaaccatgccataaagaaagaaggagagctttctaggacctgtgacagactggcagaagttgaagaaaaactaaaggaaaagagccagcaactccaagaaaaacagcaacaacttcttaatgtacaagaagagatgagtgagatgcagaaaaagattaatgaaatagagaatttaaagaatgaattaaagaacaaagaattgacattggaacatatggaaacagagaggcttgagttggctcagaaacttaatgaaaattatgaggaagtgaaatctataaccaaagaaagaaaagttctaaaggaattacagaagtcatttgaaacagagagagaccaccttagaggatatataagagaaattgaagctacaggcctacaaaccaaagaagaactaaaaattgctcatattcacctaaaagaacaccaagaaactattgatgaactaagaagaagcgtatctgagaagacagctcaaataataaatactcaggacttagaaaaatcccataccaaattacaagaagagatcccagtgcttcatgaggaacaagagttactgcctaatgtgaaaaaagtcagtgagactcaggaaacaatgaatgaactggagttattaacagaacagtccacaaccaaggactcaacaacactggcaagaatagaaatggaaaggctcaggttgaatgaaaaatttcaagaaagtcaggaagagataaaatctctaaccaaggaaagagacaaccttaaaacgataaaagaagcccttgaagttaaacatgaccagctgaaagaacatattagagaaactttggctaaaatccaggagtctcaaagcaaacaagaacagtccttaaatatgaaagaaaaagacaatgaaactaccaaaatcgtgagtgagatggagcaattcaaacccaaagattcagcactactaaggatagaaatagaaatgctcggattgtccaaaagacttcaagaaagtcatgatgaaatgaaatctgtagctaaggagaaagatgacctacagaggctgcaagaagttcttcaatctgaaagtgaccagctcaaagaaaacataaaagaaattgtagctaaacacctggaaactgaagaggaacttaaagttgctcattgttgcctgaaagaacaagaggaaactattaatgagttaagagtgaatctttcagagaaggaaactgaaatatcaaccattcaaaagcagttagaagcaatcaatgataaattacagaacaagatccaagagatttatgagaaagaggaacaacttaatataaaacaaattagtgaggttcaggaaaacgtgaatgaactgaaacaattcaaggagcatcgcaaagccaaggattcagcactacaaagtatagaaagtaagatgctcgagttgaccaacagacttcaagaaagtcaagaagaaatacaaattatgattaaggaaaaagaggaaatgaaaagagtacaggaggcccttcagatagagagagaccaactgaaagaaaacactaaagaaattgtagctaaaatgaaagaatctcaagaaaaagaatatcagtttcttaagatgacagctgtcaatgagactcaggagaaaatgtgtgaaatagaacacttgaaggagcaatttgagacccagaagttaaacctggaaaacatagaaacggagaatataaggttgactcagatactacatgaaaaccttgaagaaatgagatctgtaacaaaagaaagagatgaccttaggagtgtggaggagactctcaaagtagagagagaccagctcaaggaaaaccttagagaaactataactagagacctagaaaaacaagaggagctaaaaattgttcacatgcatctgaaggagcaccaagaaactattgataaactaagagggattgtttcagagaaaacaaatgaaatatcaaatatgcaaaaggacttagaacactcaaatgatgccttaaaagcacaggatctgaaaatacaagaggaactaagaattgctcacatgcatctgaaagagcagcaggaaactattgacaaactcagaggaattgtttctgagaagacagataaactatcaaatatgcaaaaagatttagaaaattcaaatgctaaattacaagaaaagattcaagaacttaaggcaaatgaacatcaacttattacgttaaaaaaagatgtcaatgagacacagaaaaaagtgtctgaaatggagcaactaaagaaacaaataaaagaccaaagcttaactctgagtaaattagaaatagagaatttaaatttggctcaagaacttcatgaaaaccttgaagaaatgaaatctgtaatgaaagaaagagataatctaagaagagtagaggagacactcaaactggagagagaccaactcaaggaaagcctgcaagaaaccaaagctagagatctggaaatacaacaggaactaaaaacttgctcgtatgctatcaaaagaacacaaagaaactggtgataaacttagagaaaaaatttcagaaaagacaattcaaatttcagacattcaaaaggatttagataaatcaaaagatgaattacagaaaaagatccaagaacttcagaaaaaagaacttcaactgcttagagtgaaagaagatgtcaatatgagtcataaaaaaattaatgaaatggaacagttgaagaagcaatttgagccaaactatctatgcaagtgtgagatggataacttccagttgactaagaaacttcatgaaagccttgaagaaataagaattgtagctaaagaaagagatgagctaaggaggataaaagaatctctcaaaatggaaagggaccaattcatagcaaccttaagggaaatgatagctagagaccgacagaaccaccaagtaaaacctgaaaaaaggttactaagtgatggacaacagcaccttatggaaagcctgagagaaaagtgctctagaataaaagagcttttgaagagatactcagagatggatgatcattatgagtgcttgaatagattgtctcttgacttggagaaggaaattgaattccacagaatcatgaagaaactgaagtatgtgttaagctatgttacaaaaataaaagaagaacaacatgaatgcatcaataaatttgaaatggattttattgatgaagtggaaaagcaaaaggaattgctaattaaaatacagcaccttcaacaagattgtgatgtaccatccagagaattaagggatctcaaattgaaccagaatatggatctacatattgaggaaattctcaaagatttctcagaaagtgagttccctagcataaagactgaatttcaacaagtactaagtaataggaaagaaatgacacagtttttggaagagtggttaaatactcgttttgatatagaaaagcttaaaaatggcatccagaaagaaaatgataggatttgtcaagtgaataacttctttaataacagaataattgccataatgaatgaatcaacagagtttgaggaaagaagtgctaccatatccaaagagtgggaacaggacctgaaatcactgaaagagaaaaatgaaaaactatttaaaaactaccaaacattgaagacttccttggcatctggtgcccaggttaatcctaccacacaagacaataagaatcctcatgttacatcaagagctacacagttaaccacagagaaaattcgagagctggaaaattcactgcatgaagctaaagaaagtgctatgcataaggaaagcaagattataaagatgcagaaagaacttgaggtgactaatgacataatagcaaaacttcaagccaaagttcatgaatcaaataaatgccttgaaaaaacaaaagagacaattcaagtacttcaggacaaagttgctttaggagctaagccatataaagaagaaattgaagatctcaaaatgaagcttgtgaaaatagacctagagaaaatgaaaaatgccaaagaatttgaaaaggaaatcagtgctacaaaagccactgtagaatatcaaaaggaagttataaggctattgagagaaaatctcagaagaagtcaacaggcccaagatacctcagtgatatcagaacatactgatcctcagccttcaaataaacccttaacttgtggaggtggcagcggcattgtacaaaacacaaaagctcttattttgaaaagtgaacatataaggctagaaaaagaaatttctaagttaaagcagcaaaatgaacagctaataaaacaaaagaatgaattgttaagcaataatcagcatctttccaatgaggtcaaaacttggaaggaaagaacccttaaaagagaggctcacaaacaagtaacttgtgagaattctccaaagtctcctaaagtgactggaacagcttctaaaaagaaacaaattacaccctctcaatgcaaggaacggaatttacaagatcctgtgccaaaggaatcaccaaaatcttgtttttttgatagccgatcaaagtctttaccatcacctcatccagttcgctattttgataactcaagtttaggcctttgtccagaggtgcaaaatgcaggagcagagagtgtggattctcagccaggtccttggcacgcctcctcaggcaaggatgtgcctgagtgcaaaactcagtag

SEQ ID NO: 6497 - DNA, 648 bp, Homo sapiens
  SIMILAR (322)..(474): 721254mologous to Homo sapiens Human secreted protein, SEQ ID NO: 6908,accession number G02827,Smith-Waterman Score=204.
acaggaccctcagctgcaggtctgttggagtttgctagaggtccactccagaccgtttgcctgggtatcagcagcggtgtctgcagaaccacggattttcatgaaccgcgaatgctgctgtctgatcgttcctctggaagttttgtctcagaggagtacctggccatcccgtcggaaaagcgcagtattcgggtgggagtggcccgattttccaggtgccatctgtcacccctttccttgaccaggaaagggaactcccggaccccttgcgcttcccgtgtgatgcgatgccacgccctgcttcggctggcgcacggtgcgctgcacccactgtcctgcacctactgtctggcactccctagtgagatgaacccggtatctcagatggaaatgcagaaatcacccgtcttctgcgtcgctcacactgggagctgtagaccggagctgttcctatttggccatcttggctcctcccacttcttcctttataaaacggtgggacacatggaagcttatactctcagtgaaaaaggcatcaatcaaatattctgcccactagcacaaggagatgaggaggaagtgtgtttgccttggcctgggaaatctcctatcagtatttatgctacacttcaggtatggaaaccctaa

SEQ ID NO: 6498 - DNA, 2067 bp, Homo sapiens
  SIMILAR (1051)..(2064): 981254mologous to Homo sapiens p40,accession number U93564,Smith-Waterman Score=1712.
atggcgctggcatctgcttggcttctaggacaccctcagggagcttttactcgtggcagggtttcactttctgcagtttcacttatccatggccagccacagtctgaaaatattaaatggaatattccagaattaaacaactcacatgtagactgccaaagtgtatgggatgctttcaagggtgcatttatttcaaaacatccttgcaacattactgaagaagactatcagccactaatgaagttgggaactcagaccgtaccttgcaacaagattcttctttggagcagaataaaagatctggcccatcagttcacacaggtccagcgggacatgttcaccctggaggacacgctgctaggctaccttgctgatgacctcacatggtgtggtgaattcaacacttccagtgaggctctgggccctgtgggattgcccagggatgtggagggctttccagatattttgaaggactcggatgttgtgatctacgttgtatctgctgtagggggccctgcaagcctagtaatgctgtgggtcttgtacacactcatggagagacttatgccaggatcccaccataaaagagctggaatcgattataagcaaaaggaatattcaattttcctgcaagaatatctacagccagaaaaggccatgagcattctacagcagttagacaggaaaacagaaagaatgaatgaaggagcaactgtaaaagcaatcttgcggcggaggagccaagatggccgaataggaacagctccggtctacagctcccagcgtgagcgacgcagaagacgggtgatttctgcatttccatctgagggcacagacaaacaaaaagacagcagtaacctctgcagacttaagtgtccctgtctgacagctttgaagagagcagtggttctcccagcacgcagctggagatctgagaacgggcagactgcctcttcaaaaggaaaactaacaaccagaaaggacatctacaccgaaaacccatctgtacatcaccatcatcaaagaccaaaagtagataaaaccacaaagatggggaaaaaacagaacagaaaaactggaaactctaaaacgcagagcgcctctcctcctccaaaggaacgcagttcctcaccagcaacagaacaaagctggatggagaatgattttgacgagctgagagaagaaggcttcagacgatcaaattactctgagctacgggaggacattcaaaccaaaggcaaagaagttgaaaactttgaaaaaaatttagaagaatgtataactagaataaccaatacagagaagtgcttaaaggagctgatggagctgaaaaccaaggctcgagaactacatgaagaatgcagaagcctcaggagccgatgcgatcaactggaagaaagggtatcagcaatggaagatgaaatgaatgaaatgaagcgagaagggaagtttagagaaaaaagaataaaaagaaatgagcaaagcctccaagaaatatgggactatgtgaaaagaccaaatctacgtctgattggtgtacctgaaagtgatgtggagaatggaaccaagttggaaaacactctgcaggatattatccaggagaacttccccaatctagcaaggcaggccaacgttcagattcaggaaatacagagaacgccacaaagatactcctcgagaagagcaactccaagacacataattgtcagattcaccaaagttgaaatgaaggaaaaaatgttaagggcagccagagagaaaggtcaggttaccctcaaaggaaagcccatcagactaacagcggatctctcggcagaaaccctacaagccagaagagagtgggggccaatattcaacattcttaaagaaaagaattttcaacccaaaatttcatatccagccaaactaagcttcataagtgaaggagaaataaaatactttatagacaagcaaatgctgagagattttgtcaccaccaggcctgccctaaaagagctcctgaaggaagagctaaacatggaaaggaacaaccggtaccagccgctgcaaaatcatgccaaaatgtaa

SEQ ID NO: 6499 - DNA, 870 bp, Homo sapiens
  SIMILAR (307)..(867): 941254mologous to Cloning vector pBACe3.6 levansucrase,accession number U80929,Smith-Waterman Score=896.
atggcgggcgcccctcccccagcctcgctgccgccttgcagtttgatcttagactgctgtgctagcaatcagcgagattccgtgggcgtaggaccctccgagccaggtgtgggatatagtctcgtggtgcgccgtttcttaagccggtctgaaaagcgcaatattcgggtgggagtgacccgattttccagtgagatgaacccggtacctcagatggaaatgcagaaatcaccgtcttctgcgtcgctcacgctgggagctgtagaccggagctgttcctattcggccatcttggctcctcccctcgggttctgtttttatccactctatgaaaactctaccttgcagagcgctaaaaaacgcgatgctgagttagcgaacggcgccctcggtatcatagagttaaataatgattacacattgaaaaaagtaatgaagccgctgatcacttcaaacacggtaactgatgaaatcgagcgcgcgaatgttttcaaaatgaacggcaaatggtacttgttcactgattcacgcggttcaaaaatgacgatcgatggtattaactcaaacgatatttacatgcttggttatgtatcaaactctttaaccggcccttacaagccgctgaacaaaacagggcttgtgctgcaaatgggtcttgatccaaacgatgtgacattcacttactctcacttcgcagtgccgcaagccaaaggcaacaatgtggttatcacaagctacatgacaaacagaggcttcttcgaggataaaaaggcaacatttgcgccaagcttcttaatgaacatcaaaggcaataaaacatccgttgtcaaaaacagcatcctggagcaaggacagctgacagtcaactaa

SEQ ID NO: 6500 - DNA, 372 bp, Homo sapiens
  SIMILAR (309)..(338): 601254mologous to Homo sapiens CENP-E,accession number Z15005,Smith-Waterman Score=41.
gatctggaaatacaacaggaactaaaaactgctcgtatgctatcaaaagaacacaaagaaactgttgataaacttagagaaaaaatttcagaaaagacaattcaaatttcagacattcaaaaggatttagataaatcaaaagatgaattacagaaaaagatggaaatgcagaaatcaccgtcttctgcgtcgcccacgctggaagctgtagaccggaactgttcctattcggccatcttggctcctcctcgcaggatgatctcccgaaacgagcacaaccgccctcgggcaccagaggaagatccccagagtgtgatattcccaatcgtgagtccaggtgatgtcattgttcaattcccgaaatatgagtga

SEQ ID NO: 6501 - DNA, 1303 bp, Homo sapiens
  SIMILAR (344)..(1297): 941254mologous to Homo sapiens p40,accession number U93564,Smith-Waterman Score=1531.
atgtcaacaggcctcacagctgaaggctttacccacccaatcctgctccccctcttctaacagctatgaaaccttcctagtttcaccccttcacccgttccagttttacataagttttcctcactacacagagatggttcctcccttgacacctgaggattacaattcgagaggagattttggtggggacacagagacaaaccatattatttcaaagttccacaggtctctagagcaggtgcaaaatgctgccagtcggaggagccaagatggccgaataggaacagctccggtctacagctcccagcgtgagcgacgcagaagacgggtgatttctgcatttccatctgaggaacgcagttcctcaccagcaatggaacaaagctggatggagaatgactttgaggagctgagagaagaaggcttcagacgatcaaattactctgagctacgggaggacattcaaaccaaaggcaaagaagttgaaaactttgaacaaaatttagaagaatgtataactagaataaccaatacagagaagtgcttaaaggagctgatggagctgaaaaccaaggctcgagaactacgtgaagaatgcagaagcctcaggagccgatgtgatcaactggaagaaaggatatcagtgatggaagatgaaatgaatgaaatgaagcgagaagggaagtttagagaaaaaagaataaaaagaaatgagcaaagcctccaagaaatatgggactatgtgaaaagaccaaatctacgtctgattggtgtacctgaaagtgatggggagaatggaaccaagttggaaaacactctgcagcatattatccaggagaacttccccaatctagcaaggcaggccaacgttcagattcaggaaattcagagaacgccacaaagatactcctcgagaatagcaattccaagacacataattgtcagattcaccaaagttgaaatgaaggaaaaaatgttaagggcagccagagagaaaggtcgggttaccctcaaagggaagcccatcagactaacagcagatctctcggcagaaaccctacaagccagaagagagtgggggccaatattcaacattcttaaagaaaataattttcaacccagaatttcatatccagccaaactaagcttcataagtgaagaagaaataaaataccttacagacaagcaaatggtgagagattttgtcaccaccaggcctgccctaaaagagctcctgaaggaagcactaaacatggaaaggaacaaccggtaccagctgctgcaaaatcatgccaaattctaa

SEQ ID NO: 6502 - DNA, 2307 bp, Homo sapiens
  SIMILAR (445)..(2304): 941254mologous to Homo sapiens putative p150,accession number U93563,Smith-Waterman Score=3011.
gcaatggcgggctcccctcccccagcctcgctgctgccttgcagtttgatctcagactgctgtgctagcaatgagcgaggctccgtgggcgtaggacccttcgatccaggtgcggaatataatctcctcatgtgccatttgttaagcctgttgggaaagcgcagtattagggtgggagtgacccaattttccaggtgccgtctgtcacccctttctttgactaggaaagggaattccctgacctcttgcgcttcccgggtgaggcgatgcctcgccctgctttggctcacgcacccgtgcgcgcaccccacttgcctgcgcccactggtctggcactcgctagtgagatgaacccggtacctcagatggaaatgcagaaatcacccgtcttctgcgtcgctcacgctgggagctgtagaccagagcttgttcctattcggccatcttggctcacaattaaaagaactagaaaagcaagagcaaacacattcaaaagctagcagaaggcaagaaataactaaaagcagagcagaactgaaggaaatagagacacaaaaaacccttcaaagaattaatgaatccaggagctggttttttgaaaggatcaacaaaattgatagaccgctagcaagactaataaagaagaaaagagagaagaatcaaatacacgcaataaaaaatgataaagggaatatcaccaccgatcccacagaaatacaaactaccatccgagaatactacaaacacctctacgcaaataaactagaaaatctagaagaaatcgataagttcctcgacacatacagcctcccaagactaaaccaggaagaagttgaatctctgaatagaccaatagcaggctctgaaattgtggctttaatcaatagcttaccaaccaaaaagagcccaggaccagatggattcacagccgaattctaccagaggtacaaggaggaactggtaccattccttctgaaactattccaaccaatagaaaaagagggaatcctccctaactcattttatgaggccagcatcatcctgataccaaagcttggcagagacacaaacaaaaaagagaattttagaccaatatccttgatgaacattgatgcaaaaatcctcaataaaatactggcaaaacgaatccagcagcacatcaaaaagcttatccaccatgatcaagtgggcttcatccctgggatgcaaggctggttcaatatacgcaaatcaataaatgtaatccagcatataaacagaaccaaagacaaaaaccacatgattatctcaatagatgcagaaaaggcctttgacaaaattcaacaacccttcatgctaaaaactctcaataaattaggtattgatgggacatatctcaaaataataagagctatctatgacaaacccacagccaatatcatactgaatgggcaaaaactggaagcattctctttgaaaactggcacaagacagggaggccctctctcaccactcctattcaacatagtgtgggaagttctgaccagggcaattaggcaggagaaggaaataaagggtattcaattaggaaaagaggaagtcaaattgtccctgtttgcagatgacatgattgtatatctagaaaaccccattgtctcagcccaaaatctccttaagctgataagcaacttcagcaaagtctcaggatacaaaatcaatgtacaaaaatcacaagcattcttatatgccaataacagacaaacagagagccaaatcatgagtgaactcccattcacaattgcttcaaagagaataaaatacctaggaatccaacttacaagggacatgaaggacctcttcaaggagaactacaaaccactgctcaatgaaataaaagaggatagaaagaaatggaagaacattccatgctcatgggtaggaggaatcaatatcgtgaaaatggccatactgcccaaggtaatttatagattcaatgccatccccatcaagctaccaatgccttccttcacagaattggaaaaaagtactttaaagttcatatggaaccaaaaaagagcccgcattgccaagtcaatcctaagccaaaagaacaaagctggaggcatcatgctacctgacttcaaattatactacaaggctacagtaaccaaaacagcatggtactggcaccaaaacagagatatagatcaatggaacagaacggagccctcagaaataacgccgcatatctacaactatctgatctttgacaaacctgagaaaaacaagcaatggggaaaggattccctatttaataaatggtgctga

SEQ ID NO: 6503 - DNA, 1620 bp, Homo sapiens
  SIMILAR (952)..(1137): 571254mologous to Arabidopsis thaliana putative protein,accession number AL162506,Smith-Waterman Score=147.
atggcagccaagatattgtattgcaaagacaagaaacagagagacagagttattagtaacgggattgagggggatgtttgcaagcccctggagcaatacttcagatacccagggcttttggggggtagagctcacctgtgggggtggttgattggctgttgttcagctcatcttagagaagtaaaacaaggagatcagataaaatgttggaaaggttaccaagctttctacagaagctggctctttctggctacttctatcacagctttcctgtcaactgggtttttcatcaagttcttgagttttgaatcttcttcatcttatcttggatcaaatgtagtatctccaactcaattctacatctttcaccaccattttctctgttctgcccttagaaaagtgttcgctcatcctgctgagattcaaggagagtcacccctggctaacttacagatgatgcagatgactccgttgccacctgcctctgtaaatctccaggccactttccttttctttaaaatgcccatcatgaatgggcatttctccaattgcaatagcctggctcatccatttctctccctgcccttccttatgttggggaattactcacctactctgggcctcatcttctttgtggactttggagaccgttctgcttttatattgtctgtaggtgaattgtttccatggtctccctacttgcctggagctgtggaatgcaccatgaaccaggaacagcatggggcagagccctcagaggaccacagctattgtgattgtcagcctctaagaggaccctactcatcctcacctcctggtactgacacccatccatgtgaagggctggctcctgcttcgccttctgccatgagtaaaatctccccgaggcttccccagaagcagatgcagccttgcttcctatatagcctgcagaactccagaggaatctttgaagaagaagaagaagaagaagaagaagaagaagaagaagaagaagaagaagaagaagaagaagatgatgaggaggaagaagaagaagaaaaatggttttatacaatgctggataaacatcccatagacaccataatggaggactccacaagagaagggcatgttggttttgttttctcaggcacttctagacctgctcttgttttacaagttctcctgtctcagtgtggacagctggtaggactgatctcctctcagcacagcctggaattagtgccagaacaaaatatacagctggatgtttgtcacaattctaatgtccctgcaaagatgagatgcatgaatcacacagcaatctcatcaaaaagatgtctccagactctaaccaccagtatttcaggcccaagggatctcagacttgtcattctctttagtactgcagcattccccagaggagagaaccagaaatcccgtagaaaatgcagaagtagaagaataactaatagagattttctcttccgcctcataagtctggtggatgaactgaacattaaccctcaccgggtaaccttgagaagccctcatgaatgtgcagcaattacaatccatcgcacttgccagcgacctggtaaaaatcaagacagggcctcactttgtgactcaggctga

SEQ ID NO: 6504 - DNA, 318 bp, Homo sapiens; identical to SEQ ID NO: 2962
  SIMILAR (102)..(251): 801254mologous to Arabidopsis thaliana putative protein,accession number AL162506,Smith-Waterman Score=202.

SEQ ID NO: 6505 - DNA, 159 bp, Homo sapiens; identical to SEQ ID NO: 2961
  SIMILAR (54)..(113): 601254mologous to Oryza sativa similar to RING-H2 finger protein RHA1a (AF078683),accession number AP000616,Smith-Waterman Score=62.

SEQ ID NO: 6506 - DNA, 282 bp, Homo sapiens; identical to SEQ ID NO: 2959
  SIMILAR (116)..(232): 841254mologous to Homo sapiens Human secreted protein HCHPF68, SEQ ID NO:163,accession number Y86248,Smith-Waterman Score =168.

SEQ ID NO: 6507 - DNA, 264 bp, Homo sapiens
  SIMILAR (4)..(111): 801254mologous to Homo sapiens Human secreted protein HCHPF68, SEQ ID NO:163,accession number Y86248,Smith-Waterman Score =152.
tgacagaagaagaagaagaagaagaagaagaagaagaagaagaagaagaagaagaagaagaagaagaagaagaagaagaaggagaagaagaagaaagaggaggaggaggaggcaaacctctgaacctcttttttacagatgagcacacgttacccattatttcagtgtcaggacatgtctccgtgtactgtattccctatgtaagaggcaatctggacctaaaagagtgtccaagagataagctagaagtagatctgcagatag

SEQ ID NO: 6508 - DNA, 181 bp, Homo sapiens
  SIMILAR (3)..(113): 911254mologous to Homo sapiens dJ1022E24.3 (KIAA0835, similar to myelin transcription factor 1 (MYT1)),accession number AL121581,Smith-Waterman Score=176.
aagaagaagaagaagaagaagaagaagaggaagaggaagaggaagaagaagaagaagaagaagaagaagaagaagaagaagaagaagaagaagaagaagaagaagaagaacaggccatgtgaggttgccacaccacctacaaaacagggataccacagtccccaggtaaggatcacaggag

SEQ ID NO: 6509 - DNA, 435 bp, Homo sapiens; identical to SEQ ID NO: 2964
  SIMILAR (315)..(166): 501254mologous to Plasmodium falciparum serine repeat antigen,accession number AB021826,Smith-Waterman Score=87.

SEQ ID NO: 6510 - DNA, 591 bp, Homo sapiens; identical to SEQ ID NO: 6325
  SIMILAR (103)..(420): 631254mologous to Homo sapiens Human follicle stimulating hormone GPR N-terminal sequence,accession number W03627,Smith- Waterman Score=323.

SEQ ID NO: 6511 - DNA, 333 bp, Homo sapiens
  SIMILAR (13)..(150): 411254mologous to Drosophila melanogaster BACN4L24.d,accession number AL121805,Smith-Waterman Score=91.
ctaggtgaggaagggccgggtccagagcacggagaacaacccccggttgaggagcgtccgcaggaacgctcggtgtcggggtcctttcctttgcagccgcacgccgccggcggcacctctgcacctgcgccctctcgcccgcagattccgccaagggctggaagggacgtaaccgggaaggagcaggactgccggagcattgagtaatatcagccgcctagagcggacccacgaaacctggaattcaattggttggtgagcagtcctgagcctaatatcttctccctccaggtcctgacctgagggctgcatcaagatcttgtcattccacat

SEQ ID NO: 6512 - DNA, 451 bp, Homo sapiens
  SIMILAR (343)..(197): 381254mologous to Canis familiaris zinc finger protein,accession number AJ388557,Smith-Waterman Score=112.
tcaccaagatgttaagggaagtttgccaagaggcatcaaccaattgaattccaggtttcgtgggtccgctctaggcggctgatagtactcaatgctccggcagtcctgctccttcccggttacgtcccttccagcccttggcggaatctttagcaaattgtctttattactttgtacactgctttcaccagtctgctcttccatggctaacggggcagaactgttatttttagggttttccacatccagtatgttcataagatttctaccctgtgtgaacttccagatgtcgaataaaggctggatgctgaccaaagacctttccacattttttacatgtgtgtagggttgctcaccagtagtattcccctgatgcttcataatggttgatcccagagagaatgccctttcacactcattacattcatagggtttctgtccagtgtgagtt

SEQ ID NO: 6513 - DNA, 3023 bp, Homo sapiens
  SIMILAR (1)..(2193): 851254mologous to Homo sapiens similar to rat clathrin heavy chain mRNA (ratcarhc),accession number D21260,Smith-Waterman Score= 3307.
  misc_feature (1)...(3023): n = a,t,c or g
gaggccaagctcacagaccagcttcccctcntcatcgtgtgtgatcgttttggctttgtccatgaccttgtcctatatttataccgcaacaacctgcagaggtacattgagatctacgtgcagaaggtcaaccctagccggaccccagctgtgattggagggctgcttgatgtggattgttctgaggaagtgattaaacacttaatcatggcagtgagaggacagttctctactgatgagttggtggctgaagtagaaaaaagaaataggctcaagctgctgcttccctggctggagtcccagattcaggaaggctgtgaggagcctgccactcacaatgcactggctaaaatctacatcgacagcaacaacagccccgagtgcttcctgagagagaatgcctactatgacagcagcgtggtgggccgctactgtgagaagcgagacccccatctggcctgtgttgcctatgagcgggggcagtgtgaccttgagctcatcaaggtgtgcaataagaattctctgttcaaaagcgaggcccgctacctggtatgcagaaaggatccggagctctgggctcacgtccttgaggagaccaacccatccaggagacagctaattgaccaggtggtacagacagcattgtcagaaacacgggatcctgaagagatttcggtcactgtcaaagcctttatgacagccgacctgcctaatgaactgattgaactgctggagaagatagttctggataactctgtcttcagcgagcacaggaatctacagaatctgttgatcctgactgccatcaaggcagaccgcacacgggtcatggagtacatcagccgcctggacaactatgacgcactggacatcgcgagcatcgctgtcagcagcgcgctgtatgaggaggccttcaccgttttccacaagtttgatatgaatgcctcagcaatccaggtcctgatcgagcacattggaaacctggaccgggcatatgagtttgcggagagatgcaatgagcctgctgtgtggagtcagctggcccaagcccagctccagaaagatttggtgaaggaagccatcaactcctatatcagaggggacgacccttcctcttacctggaagttgttcagtcagccagcaggagcaacaactgggaggatctagttaaatttctgcagatggccaggaaaaagggccgtgagtcctatatagagactgaacttatttttgccttggctaaaaccagccgtgtttctgagctagaagattttattaatggacccaacaatgcccacatccagcaggttggagaccgctgttacgaggagggaatgtacgaggctgccaagctgctctatagcaatgtttctaactttgcccgcctggcttccaccttggttcacctcggtgagtatcaggcagcagtggacaacagccgcaaggccagcagcacccggacgtggaaggaggtgtgctttgcctgcatggatggacaagagttccgcttcgcacagctgtgtggtcttcacatcgtcattcatgcagatgagctggaggagctgatgtgctattaccaggatcgtggctactttgaggagctgatcttgctgttggaagcggccctgggcctggagcgggcccacatgggcgtgttcactgagctggccatcctctactccaaattcaagccacagaagatgctggagcatctggagcttttctggtcccgtgtcaacatcccaaaggtgctgagggctgcagagcaggcacacctgtgggctgagctggtgttcctctatgacaagtacgaggagtatgacaatgctgtgctcaccatgatgagccaccccactgaggcctggaaggagggtcagttcaaggacatcattaccaaggttgccaacgtcgagctctgttacagagccctgcagttctatttggattacaaaccactgctcatcaatgacctgctgctggtgctttcaccccggctggaccacacctggacagtcagtttcttttcaaaggcaggtcagctgcccctggtgaagccttacctgcggtcagtccagagccacaacaacaagagtgtgaatgaggcactcaaccacctgctgacagaggaggaggactatcagggcttaagggcatctatcgatgcctatgacaactttgacaacatcagcctgatgccatgcagcatgctgcagagtcgcgggatgctgagctggcccagaagttgctgcagtggttcctggaggaaggcaagagggagtgcttcgcagcttgtctcttcacctgctatgacctgcttcgcccagacatggtgcttgagctggcctggaggcacaacctcgtggacttggccatgccctacttcatccaggtgatgagggagtacctgagcaaggtggacaaactggatgccttggagagtctgcgcaagcaagaggagcatgtgacagagcctgcccctctcgtgtttgattttgatgggcatgaatgagacccagctgattgcactaagccctgccgtgggcccagcccctgccagcttcccctatggatatgcctctgctcccaacttcgccagcctccagtgtacaacttccgcgtgtagtggtcgttgtcaccacccaccctacctgcagagttactaacttctccaaggagcatgtcactccagcagcacaggggacgcaatgggaggcagggacacctggacaatatttatttttgctgaaacccaatgacggcaacctctgagccatcccagagcctggggaggccagggtagaggctgacggcgcaagaccagctttagccgacaacagagactggactgtgggccctcctgctggagccaggccttcctcctgggcgcctccgactggctggagctgccccctccaggccagtttgaagactacatgaacacgtcttgtttggaggtaccggacctcataaaaggactctcagcctcttggcaatcataaatattaaagtgggtttatccagg

SEQ ID NO: 6514 - DNA, 5542 bp, Homo sapiens
  SIMILAR (98)..(4975): 991254mologous to Homo sapiens clathrin heavy chain 2,accession number U60802,Smith-Waterman Score=8392.
ggcttctggttcggcccacctctgaaggttccagaatcgatagtgaattcgtgattcctgccgctgccgccgccgccgccgaggtcccgcaccagccatggcgcagatcctccctgttcgctttcaggagcacttccagctccaaaaccttggaattaatccagctaacattggattcagcacactgaccatggaatctgacaagttcatatgtatccgagagaaagttggtgagcaggcacaggtcacgatcattgacatgagtgacccaatggctccgatccgacggcctatctctgcagagagtgccatcatgaatccagcctctaaggtgatagctctgaaagctgggaagacacttcagatctttaatattgagatgaagagtaaaatgaaggctcatactatggcagaagaagtgattttctggaaatgggtttctgtgaacactgttgccttggtgaccgagaccgcggtctaccactggagcatggaaggtgactcccagcccatgaagatgtttgatagacataccagtctggtgggctgccaggtgattcactaccggactgatgagtaccagaagtggctgctgctcgtaggcatctcggctcagcaaaaccgtgtggttggagcaatgcagctctactctgtggataggaaggtttcacaacacatagaaggccatgctgcggcttttgcagagttcaagatggaggggaatgccaagcctgccacccatttctgctttgctgtacgtaatcccacaggaggcaagttgcacatcattgaagttggacagcctgcagcgggaaaccaaccttttgtaaagaaagcagtagatgtgttttttcctccagaggcacagaatgattttccagtggctatgcagattggagctaaacatggtgttatttacttgatcacaaagtatggctatcttcatctgtacgacctagagtctggcgtgtgcatctgcatgaaccgtattagtgctgacacaatatttgtcactgctccacacaaaccaacctctggaattattggtgtcaacaaaaagggacaggtactgtcagtttgtgttgaggaagataacattgtgaattatgcaaccaacgtgcttcagaatccagaccttggtctgcgtttggccgttcgtagtaacctggctggcgcagagaagttgtttgtgagaaaattcaataccctctttgcacagggcagctatgctgaagccgccaaagttgcagcgtctgcaccaaagggaatcctgcgtaccagagagacggtccagaaattccagagtatacccgctcagtctggccaggcttctccattgctgcagtacttcggaatcctgctcgaccagggtcagctcaataaacttgaatccttagaactttgccatctggttcttcagcaggggcgtaagcaactcctagagaagtggctgaaagaagataagctggagtgctcagaggagctcggagacttggtcaaaaccactgaccccatgctcgctctgagtgtgtaccttcgggcaaatgtgccaagcaaagtgatccagtgttttgcagaaacaggccaattccagaaaattgtgctctatgccaaaaaggttgggtacaccccagactggatctttctgctgaggggtgtaatgaagatcagtccggaacagggccagcagttttctcgaatgctagtgcaggacgaggagccgctggccaacattagccagattgtggacattttcatggaaaacagtttaattcagcagtgtacttccttcttattggatgccttgaagaataatcgcccagctgagggactcctgcagacatggctgttggagatgaaccttgttcatgcaccccaggttgcagatgccatccttggaaataaaatgtttactcattacgaccgggcccacattgcccagctctgtgagaaggcaggcctcctgcagcaagcactggagcactacaccgacctctatgacatcaagagggctgtggtccacactcacctcctcaatcccgagtggcttgtcaatttctttggctccttatcggtggaggattctgtggagtgtctgcatgccatgctgtctgctaacatcagacagaaccttcagctgtgtgtgcaggtggcctctaagtaccacgagcagctgggcacgcaggccctggtggagctctttgaatccttcaagagttacaaaggcctcttctacttcctgggctcaatcgtgaacttcagccaagacccagatgtgcatctgaaatacattcaggctgcctgtaagacagggcagatcaaggaggtggagaggatatgccgagagagcagctgctacaacccagagcgtgtgaagaacttcctgaaggaggccaagctcacagaccagcttcccctcatcatcgtgtgtgatcgttttggctttgtccatgaccttgtcctatatttataccgcaacaacctgcagaggtacattgagatctacgtgcagaaggtcaaccctagccggaccccagctgtgattggagggctgcttgatgtggattgttctgaggaagtgattaaacacttaatcatggcagtgagaggacagttctctactgatgagttggtggctgaagtagaaaaaagaaataggctcaagctgctgcttccctggctggagtcccagattcaggaaggctgtgaggagcctgccactcacaatgcactggctaaaatctacatcgacagcaacaacagccccgagtgcttcctgagagagaatgcctactatgacagcagcgtggtgggccgctactgtgagaagcgagacccccatctggcctgtgttgcctatgagcgggggcagtgtgaccttgagctcatcaaggtgtgcaatgagaattctctgttcaaaagcgaggcccgctacctggtatgcagaaaggatccggagctctgggctcacgtccttgaggagaccaacccatccaggagacagctaattgaccaggtggtacagacagcattgtcagaaacacgggatcctgaagagatttcggtcactgtcaaagcctttatgacagccgacctgcctaatgaactgattgaactgctggagaagatagttctggataactctgtcttcagcgagcacaggaatctacagaatctgttgatcctgactgccatcaaggcagaccgcacacgggtcatggagtacatcagccgcctggacaactatgacgcactggacatcgcgagcatcgctgtcagcagcgcgctgtatgaggaggccttcaccgttttccacaagtttgatatgaatgcctcagcaatccaggtcctgatcgagcacattggaaacctggaccgggcatatgagtttgcggagagatgcaatgagcctgctgtgtggagtcagctggcccaagcccagctccagaaagatttggtgaaggaagctatcaactcctatatcagaggggacgacccttcctcttacctggaagttgttcagtcagccagcaggagcaacaactgggaggatctagttaaatttctgcagatggccaggaaaaagggccgtgagtcctatatagagactgaacttatttttgccttggctaaaaccagccgtgtttctgagctagaagattttattaatggacccaacaatgcccacatccagcaggttggagaccgctgttacgaggagggaatgtacgaggctgccaagctgctctatagcaatgtttctaactttgcccgcctggcttccaccttggttcacctcggtgagtatcaggcagcagtggacaacagccgcaaggccagcagcacccggacgtggaaggaggtgtgctttgcctgcatggatggacaagagttccgcttcgcacagctgtgtggtcttcacatcgtcattcatgcagatgagctggaggagctgatgtgctattaccaggatcgtggctactttgaggagctgatcttgctgttggaagcggccctgggcctggagcgggcccacatgggcatgttcactgagctggccatcctctactccaaattcaagccacagaagatgctggagcatctggagcttttctggtcccgtgtcaacatcccaaaggtgctgagggctgcagagcaggcacacctgtgggctgagctggtgttcctctatgacaagtacgaggagtatgacaatgctgtgctcaccatgatgagccaccccactgaggcctggaaggagggtcagttcaaggacatcattaccaaggttgccaacgtcgagctctgttacagagccctgcagttctatttggattacaaaccactgctcatcaatgacctgctgctggtgctttcaccccggctggaccacacctggacagtcagtttcttttcaaaggcaggtcagctgcccctggtgaagccttacctgcggtcagtccagagccacaacaacaagagtgtgaatgaggcactcaaccacctgctgacagaggaggaggactatcagggcttaagggcatctatcgatgcctatgacaactttgacaacatcagcctggctcagcagctggagaagcatcagctgatggagttcaggtgcattgcggcctatctgtacaagggcaataactggtgggcccagagcgtggagctctgcaagaaggatcatctctacaaggatgccatgcagcatgctgcagagtcgcgggatgctgagctggcccagaagttgctgcagtggttcctggaggaaggcaagagggagtgcttcgcagcttgtctcttcacctgctatgacctgcttcgcccagacatggtgcttgagctggcctggaggcacaacctcgtggacttggccatgccctacttcatccaggtgatgagggagtacctgagcaaggtggacaaactggatgccttggagagtctgccgccaagcaagaggagcatgtgacagagcctgcccctctcgtgtttgattttgatgggcatgaatgagacccagctgattgcactaagccctgccgtgggcccagcccctgccagcttcccctatggatatgcctctgctcccaacttcgccagcctccagtgtacaacttccgcgtgtagtgggcgttgtcaccacccaccctacctgcagagttactaacttctccaaggagcatgtcactccagcagcacaggggacgcaatgggaggcagggacacctggacaatatttatttttgctgaaacccaatgacggcaacctctgagccatcccagagcctggggaggccagggtagaggctgacggcgcaagaccagctttagccgacaacagagactggactgtgggccctcctgctggagccaggccttcctcctgggcgcctccgactggctggagctgccccctccaggccagtttgaagactacatgaacacgtcttgtttggaggtaccggacctcataaaaggactctcagcctcttggcaatcataaatattaaagtcggtttatccaggcaaaaaa

SEQ ID NO: 6515 - DNA, 5322 bp, Homo sapiens
  SIMILAR (45)..(3611): 991254mologous to Homo sapiens clathrin heavy chain 2,accession number U60802,Smith-Waterman Score=6096.
attcctgccgctgccgccgccgccgccgaggtcccgcaccagccatggcgcagatcctccctgttcgctttcaggagcacttccagctccaaaaccttggaattaatccagctaacattggattcagcacactgaccatggaatctgacaagttcatatgtatccgagagaaagttggtgagcaggcacaggtcacgatcattgacatgagtgacccaatggctccgatccgacggcctatctctgcagagagtgccatcatgaatccagcctctaaggtgatagctctgaaagctgggaagacacttcagatctttaatattgagatgaagagtaaaatgaaggctcatactatggcagaagaagtgattttctggaaatgggtttctgtgaacactgttgccttggtgaccgagaccgcggtctaccactggagcatggaaggtgactcccagcccatgaagatgtttgatagacataccagtctggtgggctgccaggtgattcactaccggactgatgagtaccagaagtggctgctgctcgtaggcatctcggctcagcaaaaccgtgtggttggagcaatgcagctctactctgtggataggaaggtttcacaacccatagaaggccatgctgcggcttttgcagagttcaagatggaggggaatgccaagcctgccacccttttctgctttgctgtacgtaatcccacaggaggcaagttgcacatcattgaagttggacagcctgcagcgggaaaccaaccttttgtaaagaaagcagtagatgtgttttttcctccagaggcacagaatgattttccagtggctatgcagattggagctaaacatggtgttatttacttgatcacaaagtatggctatcttcatctgtacgacctagagtctggcgtgtgcatctgcatgaaccgtattagtgctgacacaatatttgtcactgctccacacaaaccaacctctggaattattggtgtcaacaaaaaaggacaggtactgtcagtttgtgttgaggaagataacattgtgaattatgcaaccaacgtgcttcagaatccagaccttggtctgcgtttggccgttcgtagtaacctggctggggcagagaagttgtttgtgagaaaattcaataccctctttgcacagggcagctatgctgaagccgccaaagttgcagcgtctgcaccaaagggaatcctgcgtaccagagagacggtccagaaattccagagtatacccgctcagtctggccaggcttctccattgctgcagtacttcggaatcctgctcgaccagggtcagctcaataaacttgaatccttagaactttgccatctggttcttcagcaggggcgtaagcaactcctagagaagtggctgaaagaagataagctggagtgctcagaggagctcggagacttggtcaaaaccactgaccccatgctcgctctgagtgtgtaccttcgggcaaatgtgccaagcaaagtgatccagtgttttgcagaaacaggccaattccagaaaattgtgctctatgccaaaaaggttgggtacaccccagactggatctttctgctgaggggtgtaatgaagatcagtccggaacagggcctgcagttttctcgaatgctagtgcaggacgaggagccgctggccaacattagccagattgtggacattttcatggaaaacagtttaattcagcagtgtacttccttcttattggatgccttgaagaataatcgcccagctgagggactcctgcagacatggctgttggagatgaaccttgttcatgcaccccaggttgcagatgccatccttggaaataaaatgtttactcattacgaccgggcccacattgcccagctctgtgagaaggcaggcctcctgcagcaagcactggagcactacaccgacctctatgacatcaagagggctgtggtccacactcacctcctcaatcccgagtggcttgtcaatttctttggctccttatcggtggaggattctgtggagtgtctgcatgccatgctgtctgctaacatcagacagaaccttcagctgtgtgtgcaggtggcctctaagtaccacaagcagctgggcacgcaggccctggtggagctctttgaatccttcaagagttacaaaggcctcttctacttcctgggctcaatcgtgaacttcagccaagacccagatgtgcatctgaaatacattcaggctgcctgtaagacagggcagatcaaggaggtggagaggatatgccgagagagcagctgctacaacccagagcgtgtgaagaacttcctgaaggaggccaagctcacagaccagcttcccctcatcatcgtgtgtgatcgttttggctttgtccatgaccttgtcctatatttataccgcaacaacctgcagaggtacattgagatctacgtgcagaaggtcaaccctagccggaccccagctgtgattggagggctgcttgatgtggattgttctgaggaagtgattaaacacttaatcatggcagtgagaggacagttctctactgatgagttggtggctgaagtagaaaaaagaaataggctcaagctgctgcttccctggctggagtcccagattcaggaaggctgtgaggagcctgccactcacaatgcactggctaaaatctacatcgacagcaacaacagccccgagtgcttcctgagagagaatgcctactatgacagcagcgtggtgggccgctactgtgagaagcgagacccccatctggcctgtgttgcctatgagcgggggcagtgtgaccttgagctcatcaaggtgtgcaatgagaattctctgttcaaaagcgaggcccgctacctggtatgcagaaaggatccggagctctgggctcacgtccttgaggagaccaacccatccaggagacagctaattgaccaggtggtacagacagcattgtcagaaacacgggatcctgaagagatttcggtcactgtcaaagcctttatgacagccgacctgcctaatgaactgattgaactgctggagaagatagttctggataactctgtcttcagcgagcacaggaatctacagaatctgttgatcctgactgccatcaaggcagaccgcacacgggtcatggagtacatcagccgcctggacaactatgacgcactggacatcgcgagcatcgctgtcagcagcgcgctgtatgaggaggccttcaccgttttccacaagtttgatatgaatgcctcagcaatccaggtcctgatcgagcacattggaaacctggaccgggcatatgagtttgcggagagatgcaatgagcctgctgtgtggagtcagctggcccaagcccagctccagaaagatttggtgaaggaagccatcaactcctatatcagaggggacgacccttcctcttacctggaagttgttcagtcagccagcaggagcaacaactgggaggatctagttaaatttctgcagatggccaggaaaaagggccgtgagtcctatatagagactgaacttatttttgccttggctaaaaccagccgtgtttctgagctattaagattttattaatgggacccaacaatgcccacatccagcaggttggagaccgctgttacgaggagggaatgtacgaggctgccaagctgctctatagcaatgtttctaactttgcccgcctggcttccaccttggttcacctcggtgagtatcaggcagcagtggacaacagccgcaaggccagcagcacccggacgtggaaggaggtgtgctttgcctgcatggatggacaagagttccgcttcgcacagctgtgtggtcttcacatcgtcattcatgcagatgagctggaggagctgatgtgctattacccggatccttgtgttctttgaggagctgatcttgctgttggaagcggccctgggcctggagcgggcccacatgggcgtgttcactgagctggccatcctctactccaaattcaagccacagaagatgctggagcatctggagcttttctggtcccgtgtcaacatcccaaaggtgctgagggctgcagagcaggcacacctgtgggctgagctggtgttcctctatgacaagtacgaggagtatgacaatgctgtgctcaccatgatgagccaccccactgaggcctggaaggagggtcagttcaaggacatcattaccaaggttgccaacgtcgagctctgttacagagccctgcagttctattttggattacaaaccactgctcatcaatgacctgctgctggtgctttcaccccggctggaccacacctggacagtcagtttcttttcaaaggcaggtcagctgcccctggtgaagccttacctgcggtcagtccagagccacaacaacaagagtgtgaatgaggcactcaaccacctgctgacagagaaggaggactatcaggatgccatgcagcatgctgcagagtcgcgggatgctgagctggcccagaagttgctgcagtggttcctggaggaaggcaagagggagtgcttcgcagcttgtctcttcacctgctatgacctgcttcgcccagacatggtgcttgagctggcctggaggcacaacctcgtggacttggccatgccctacttcatccaggtgatgagggagtacctgagcaaggtggacaaactggatgccttggagagtctgccgccaagcaagaggagcatgtgacagagcctgcccctctcgtgtttgattttgatgggcatgaatgagacccagctgattgcactaagccctgccgtgggcccagcccctgccagcttcccctatggatatgcctctgctcccaacttcgccagcctccagtgtacaacttccgcgtgtagtgggcgttgtcaccacccaccctacctgcagagttactaacttctccaaggagcatgtcactccagcagcacaggggacgcaatgggaggcagggacacctggacaatatttatttttgctgaaacccaatgacggcaacctctgagccatcccagagcctggggaggccagggtagaggctgacggcgcaagaccagctttagccgacaacagagactggactgtgggccctcctgctggagccaggccttcctcctgggcgcctccgactggctggagctgccccctccaggccagtttgaagactacatgaacacgtcttgtttggaggtaccggacctcataaaaggactctcagcctcttggcaatcataaatattaaagtcggtttatccaggcaaaaaa

SEQ ID NO: 6516 - DNA, 501 bp, Homo sapiens; identical to SEQ ID NO: 4250
  SIMILAR (179)..(487): 1001254mologous to Homo sapiens hnRNPcore protein A1,accession number X79536,Smith-Waterman Score=538.

SEQ ID NO: 6517 - DNA, 558 bp, Homo sapiens
  SIMILAR (1)..(555): 751254mologous to Homo sapiens hnRNPcore protein A1,accession number X79536,Smith-Waterman Score=753.
atgaatgcaaggccacacaaggtggatgaagagttgtggaaccaaagagagctgtctaagaagattctcaaagaccagacatttgttgctggcattaaagaagacacagaagaacatcacctaagagattattttcaacagtatggaaaaatggaagtgattgaaatcatgactgaccgaggcagtggcaagaaaaggggctttgcctttgtaacctttgacaaccatgactctgtggataagactgtcgttcagaaataccacactgcaaatgaccacaactgtgaaggtaggaaagccctgtcaaagcaagagatggctagtgcttcatccagccaaagaggacatagtagttctggaaactttcgtggtggccatggaggtggttttggtgggaatgacatctttggttatggagaaaacttcagtggtcatggtggctttagtggcagctgtggtggtggaggatatggtagcagtgggggtggctataatgaatttggtaatgatgggagcaacactggaggtggtggaagctacaatgattttggcaattaa

SEQ ID NO: 6518 - DNA, 648 bp, Homo sapiens
  SIMILAR (163)..(645): 841254mologous to Homo sapiens hnRNPcore protein A1,accession number X79536,Smith-Waterman Score=733.
atgctggctgcagcgggatgggcagctccaggtgcgagcatgggtgctgactccctgcgaggctatggctggactatgtaccacaagcagcttccacggctggcatcagggaatgcggtggcacctggaatcttgggagaagccagaaactgcagagccccaaagcagacatttgttgctggcattaaagaagacacagaagaacatcacctaagagattattttcaacagtatggaaaaatggaagtgattgaaatcatgactgaccgaggcagtggcaagaaaaggggctttgcctttgtaacctttgacaaccatgactctgtggataagactgtcgttcagaaataccacactgcaaatgaccacaactgtgaaggtaggaaagccctgtcaaagcaagagatggctagtgcttcatccagccaaagaggacatagtagttctggaaactttcgtggtggccatggaggtggttttggtgggaacgacatctttggttatggagaaaacttcagtggtcatggtggctttagtggcagctgtggtggtggaggatatggtagcagtgggggtggctataatgaatttggtaatgatgggagcaacactggaggtggtggaagctacaatgattttggcaattaa

SEQ ID NO: 6519 - DNA, 1119 bp, Homo sapiens
  SIMILAR (11)..(427): 661254mologous to Homo sapiens protein A1-alpha (AA 1- 320),accession number X06747,Smith-Waterman Score=446.
aggacgagggctgaggaagctcttcattggagggttgagcttttaatttattgatgagagcctgaagagccaggttggggaatggggaacgctcacggactgtgtggtaatgagagatccaaacaccaagcgctccaggggctttgggtttgtcacatatgccacttgtggaggaggtggatgcagctatgaatgcaaggccacacaaggtggatggaagagttgtggaaccaaagagagctgtctccagagaagattctcaaagaccaggtgcccacattaacttgtgaaaaagatatttgttggtggcattaaagaagacactgaagaacatcacctaagagattattttgaacagtatggaaaaattgaagtgattgaaatcatgactgaccgaggcagtggcaagaaaaggggctttgcctattgtaacctttgacgaccatgactccgtggataagattgtcattcagaaataccatactgtgaatggccacaactgtgaagttagaaaagccctgtcaaagcaagagatggctagtgcttcatccagccaaagaggtcgaagtggttctggaaactttggtggtggtcgtggaggtggtttcggtgggaatgacaacttcggtcgtggaggaaacttcagtggtcgtggtggctttggaggcagccgtggtggtggtggatatggtggcagtggggatggctataatggatttggtaatgatggaagcaattttggaggtggtggaagctacaatgattttgggaattacaacaatcaggcttcaaattttggacccatgaagggaggaaattttggaggcagaagctctgggccctatgggcggtggaggccaatacttttgctaaaccccgaaaaccaaggtggctatggcggttccagcagcagcagtagctatggcagtggcagaagattttaattaggaaacaaagcttatcaggagaggagagccagagaagtgacagggaagctacaggttacaacagatttgtgaactcagccaagcacagtggtggcagggcctaactgctacaaagaagacatgttttagacaaatactcatgtgtatgggcaaaaaactcgaggactgtatt

SEQ ID NO: 6520 - DNA, 1515 bp, Homo sapiens
  SIMILAR (448)..(1512): 951254mologous to Homo sapiens putative p150,accession number U93563,Smith-Waterman Score=1745.
atgcagggaccaagaaacccagcccagtacctcatcatggaccacacagctcgtggggacactgggaatccactgctcttgggttctggtggcagtggagagtggcagccaccccaagctcctttgaacactttcagcatcactagtggcactttgtacgggtcccatggtgttattcaaagtttatggtattgcattagctacgatgaaagaaatgaacgcagctcctcatcagcaatggaacaaagctggatggagaatgactttgacgagctgagagaagaaggcttcagacgatcaaattactccgagctacgggaggacattcaaaccaaaggcaaagaagttgaaaactttgaaaaaaatttagaagaatgtataactagaataaccaatacagagaagtgcttaaaggagctgacggagctgaaaaccaaggctcgagaactaccaccacaccatacctattccaaaattgaccacatacttggaagtaaagctctcctcagcaaatgtaaaagaacagaaattataacaaactatctctcagaccacagtgcaataaaactagaactcaagattaagaatcccattcaaaactgctcaactacatggaaactgaacaacctgctcctgaatgactactgggtacataacgaaatgaaggcagaaataaagatgttctttgaaaccaacgagaacaaagacacaacataccagagtctctgggatgcattcaaagcagtgtgtaggggaaaatttatagcactaaatgcccacaagagaaagcaggaaagattcaaaattgacaccctaacatcacaattaaaagaactagaaaagcaagagcaaacacattcaaaagctagtagaaggcaagaaataactaaaatcagagcagaactgaaggaaatagagacacaaaaaacccttcaaaaaattaatgaatccaggagctggttttttgaaaggatcaacaaaattgatagaccactagcaagactaataaagaaaaaaagagagaagaatcaaatagatgcaataaaaaatgataaaggggatatcaccaccgatcccatagaaatacaaactaccatcagagaatactacaaacacctctatgcaaataaactagaaaatctagaagaaatggataaattccttgacacatacaccctcccaagactaaaccaggaagaagttgaatctctgaataggccaataacaggctctgaaattgtggcaataatcaatagcttaccaaccaaaaagagtccaggaccagatggattcacagccaaattctaccagaggtacaaggaggaactggtaccattccttctgaaacaattccaatcaatagaaaaagagggaatcctccctaactcattttatgaggccagcatcatcctgataccaaagccgggcagagacacaaccaaaaaagagaattttagaccaatatccttgatgaacgttgatgcaaaaatcctcaataaaatactggcaaactga

SEQ ID NO: 6521 - DNA, 3677 bp, Homo sapiens
  SIMILAR (1178)..(1555): 331254mologous to Homo sapiens Ps 2=basic proline-rich protein(PRB1L precursor protein=basic proline-rich proteins (Ps, PmF, PmS, and Pe) precursor) {C-terminal},accession number S62941,Smith-Waterman Score=87.
atgagcttctcactcacgttcaccgagctggccaacatcgccatcccacagtgcggggtgctgaacttcaaggccctgcacctcctgctgcacggcatcttggagcacatccacatggccgagctcaagaaagtcctctcaggcgatgaggacttcctgcagacctcgcaggtggtcatcatgcccagggaaggagacgcccagcctatcctcaaccccatgaagaggctcagcaatgtcttcgaccacgtggtgagccgcctcgacaagttggagaaccagctggccctgctgcaggacctgccctccactgcccagctgctggaagccagccagggcactgcccggcccgtccaggacctgtggcatctgatcaagctccggaagatggtggagggtcatgatgaagtcatggccaagtcaatgcagaccctgcaggacttgctcactgatcttcatgcactccaggtcaccatcacagccctcagaaaagaagtggacatgctgaagaacatgcttgacaaggtacacccagaaagaatggacatctttgctgaagacttcaaaatacagaactggaagatggttgcactgcagcgggaagtggcttctctccagaataagtttaaaaccatccccaaaaccgaggacatggtgctctggagtggccttcatgatgccatgttcacctcagaaattggttcatcaccactggacctgtggcagtctgtagagcagctcccagaggctgccctggcccagaccaccaagtaccttgaagctactcgtgccgtccaggtctccgagcccgtccaaaacccccagctactgcagactgtctggcattatgagccatatcagtctcgccagggagaagccctccagctcgcagctgtccaagtaaagggggaggaaaatgatgtccccagcctaaggggccttcgggagagggcccgcaaggatggggcccccaaggatagaactcgcaaggttggggtccccaaagatagaggtggcaaggatgtggaccccaaggatagagctcacaaggatgatgtccccaaagatagaggtggcaaggatgtggaccccaaggatagagctcacaaggatgatgtccccaaagatagaggtggcaaagatggggaccccaaggatagagttggcaaggatggggcccccaaggaagcacagcctaaggctccccagtctgcccttcaccggctgaaaaccaccgctgccatcgccgccgctgccgccgcagcctacgccgctgccacatcctccgctgcccaggcagccaaagttgctgccaagtttgtcaaggatgccccagccaccaaaatggccgccattgcaacagacacggctgcagctgggcccctaggggtctttgcagatgtcctgggtgcagggccttcccggggagccacagaatcccagatcttgggcgatgattccgaaatctacgaaatcctctctccctcctactctgctgccagcatcggtcccgatccagccctgtcccaggccatggtggctaccaagcaggccatgagccctgaagacaagaagagggctgtcaagtattccatgagccacatagcccagatacctgtcaaacacgactctctgaaggaagaatttgcccagctgtcctgtaacctgaaccagcgcttgagttatctaggtgcagctgtgttctgcagcaaaacaggctgggggaaagcgagctggctgcgaaggcagctgctgcctctcaaagctgattcactggtgcgggggggggcccagcaggtgtggggctacacggttctgtgtctcaggtggctgttcagacggcaggaggaagaacttgagagaatttggggcaaccaaatagagatgatgaaggatcgctacatcactttggacaaggcggtggagaacctgcagattcgcatggatgagttcaagactctccaggctcaaatcaaaagactggaaatgaacaaggtgaataagagcacgatggaggaggagctgagagagaaagctgacaggagtgccctggcaggcaaggcaagccgcgttgacctggagactgtggccttggagctgaacgagatgattcagggcatactcttcaaggtcacgatccatgaggacagctggaagaaggctatggaggagctcagcaaggacgtgaacaccaagttagtccacagtgatctggatcccttgaagaaagaaatggaagaggtctggaaaatcgtccggaagctgctgattgagggcttaagactggatcctgacagtgctgctggctttaggaggaagctgttcaagcgcgtgaagtgcatctcctgtgaccggcctgtggagatgatgactggcccacagctgatcaccatccgcaaagcccacctgctgtcccggctgcggccagccagcgccaacagctgcgagtacttgcagcggcaacagatgagggaacagcagtggctgcagctccaggacctcggtatccaggaggattgtcagcaggactggggtgatggcccccaaaacgccaccagcctcaagtgcaagtcctgcaacctgttgacgctctatccctacggggatccccacgtgatcgactatgacagcgccgaggtggacatcctgggcgtggatgggatcctgtacaaaggccgcgtgaacagccagcgtggggctcagcccttggccgtcgcaaaggagctggcagctgtgaaggctccatctcccccgtcacaaagcctgtatgaccgtgtgcactccagtgccctatttggcgccatctgcccccccctgtgcccccgctccagtgcctgctcagctgcctcgggccctcacctgacgatgccagctcgaccaccttccctgccacctctgctgctgctgccaccgctgattccatccctaagggacccccagcaggccccagggtccaccaggctctcaagagctccacacattgagtcccgagtcggcaggaagccccccgaggagcccgccaacccgaccatgaactcattaacactaagggataaacaacagacgccagcacgtgtgttggaaaagggcactgtgagtacccgaaagtggactgcccagggctctgttgaaatacatccgttgtccaaatatgagcagtgctcaaaaacccagagaactttccaaacgcaggaattagaagtagccttgtgtcaaaagaactccattccggccaacctaggaggtctcccgtattcggggaagaagaccggagtcaaaggactcatctgtcctgtgccagggactgctgtgaaagcccctcagagacctccagggccacagcagccccacccagccccgcagtcagcctcggagacagcctggttccctgtggctgaccgcagggtgttctcagagaaccctggctggaccgctgcaaagaccctggggacactcagcagcccctgccaagcaggggcaggggtgggccgacaggatggggacccaggccaggaactaacttcacaggaaaagccctgggtgggcaggaagattccagagcacgctgtggctgacaagggctacaggcagcagtgtggagccggggaggctcggggtggccctgtcttctgggcggcggcccccagaaccagctggcagcaagcctcgtatacaag

SEQ ID NO: 6522 - DNA, 669 bp, Homo sapiens
  SIMILAR (177)..(275): 351254mologous to Escherichia coli D-xylose uptake protein (aa 1-61),accession number X04387,Smith-Waterman Score=42.
atgacacaggccctggaagaaatctcaggccacccagccttctctgaatctacaccaaccaaatgtttttctgtcacttgcatccacaaaagtcctgacaaggatagcaccttgaaggccccgcagcagcagctgccccttatgtgcgccaactcagcgtggccatccacagacgagccagcactacgctgcacgcgggccctccttcagcttcctcagcaaaccctcaccaaaggccccctggcgggtccagtgccaagtccgggacagagagatgatgaggatcgctacatcactttggacaaggcggtggagaacctgcagattcgcatggatgagttcaagagagacccaggccaccatgtcctggggtcatcttggtgccctttctccatggagctggagccagttccattcagcatgtccatcgtgcacccagcactacgccagaccctgcatgggggtctggcccacctggggtttattggcaatgcagcagctgattttgtgagactgctgaactttgacctggaccggggcgtgtttccagtagtcatccaggctgtggtggacgaaggagatggtgagtgcgtcctcttccgtcctcctgggcgtgcaggccgtgcagggaggaagcacgtcttgagggaggagtgcttgcagcagtga

SEQ ID NO: 6523 - DNA, 3650 bp, Homo sapiens
  SIMILAR (118)..(2010): 1001254mologous to Homo sapiens Tec protein-tyrosine kinase,accession number D29767,Smith-Waterman Score=3389.
cggcggccgcggatcccggcggcgatccgacctcgcagtctccccaggtccgccagcagccggttcagccagaatactgggatcttcagtggcaggaggagtaatcagaagacggagatgaattttaacactattttggaggagattcttattaagaggtcacagcagaaaaagaagacatcgcccttaaactacaaagagagactttttgtacttacaaagtccatgctaacctactatgagggtcgagcagagaagaaatacagaaaggggtttattgatgtttcaaaaatcaagtgtgtggaaatagtgaagaatgatgatggtgtcattccctgtcaaaataagtatccatttcaggttgttcatgatgctaacacactttacatttttgcacctagtccacaaagcagggacctgtgggtgaagaagttaaaagaagaaataaagaacaacaataatattatgattaaatatcatcctaaattctggacagatggaagttatcagtgttgtagacaaactgaaaaattagcacccggatgtgaaaaatacaatctttttgagagcagtataagaaaagcactacctccagcaccagaaacaaagaagcgaaggcctcccccaccaattccactagaagaagaagataatagtgaagaaatcgttgtagccatgtatgatttccaagcagcagaaggacatgatctcagattagagagaggccaagagtatctcattttagaaaagaatgatgtgcattggtggagagcaagagataaatatgggaatgaaggatatatcccaagtaattacgtaacgggaaagaaatcaaacaacttagatcaatatgaatggtattgcagaaatatgaatagaagcaaggcagagcaactcctccgcagtgaagataaagaaggtggttttatggtaagggattccagtcaaccaggcttgtacacagtctccctttataccaagtttggaggagaaggttcatcgggttttaggcattatcatataaaggaaacaacaacatctccaaagaagtattacctagctgaaaaacatgcttttggctccattcctgagattattgaatatcataagcacaatgcagcaggacttgtcaccaggcttcggtacccagttagtgtgaaagggaagaatgcacccaccactgcaggattcagctatgagaaatgggagattaacccttcagaactgacctttatgagggaattgggaagtggactgtttggagtggtgaggcttggcaaatggcgagcccagtacaaagtcgcaatcaaagctattcgggaaggtgcaatgtgcgaggaggactttatagaagaagctaaagtgatgatgaagctgacacacccgaagttagtgcagctttatggtgtgtgcacccagcagaaaccaatatacattgttactgagttcatggaaaggggctgccttctgaatttcctccgacagagacaaggtcatttcagtagagacgtactgctgagcatgtgtcaggatgtgtgtgaagggatggagtatctggagagaaacagcttcatccacagagatctggctgccagaaattgtctagtaagtgaggcgggagttgtaaaagtatctgattttggaatggccaggtattttctggatgatcagtacacaagttcttctggtgctaagtttcctgtgaagtggtgtccacctgaagtgtttaattacagccgcttcagcagcaaatcagatgtctggtcatttggtgttttaatgtgggaagtattcacggaaggcagaatgccttttgaaaaatacaccaattatgaagtggtaaccatggttactcgaggccaccgactctaccagccgaagttggcgtccaactatgtgtatgaggtgatgctgagatgttggcaggagaaaccagagggaaggccttctttcgaagatctgctgcgcacaatagatgaactagttgaatgtgaagaaacttttggaagataagtgatgtgtgaccagtggctcccagattcccaagcacaaggaaggatgggcattttgtggcttttaatttattgagcacttggacatgtagatcattttacttatacagtggaaacacataaataatttgcttctagaccagcctctgtctagacttgcttctagacagaatctcccagagtgtggaaatgttgccttagaaatggtgattaaaatcactcatttctattcattcctcaggcacttgagtgacagttgtttaccaggcactgtgtgtagccccagggtttggccattcaggggtgcacacatgggaccatgttagctgatgccagttgaaggccagggtatttgggaaggggaagggtattagagtcatgaccaagcaacccttctttttccctttgacttctacagaaatctgggcctgagacattgtctacaattgggttctagatacatcaggaacccatcttggataaataaatacctatcttttgttttgaaaacatctcagttttcaagactgctcttagtattacatgaacaatatttgtatgctgtatatattgtaaatatatataatatataaagttatatatttatgagaaacacgaattgtcttttaattgaaacttttaatcctgtagtataggagttcaccttcttaggactagagactgtgccttatagctgttaattcatttccccctgaacatcaaatatgcctgaagagaagaaagtctagattcttctatgagtaacgccccctcctcactcaggtaaatgtgtctggggatgcctgtccagcttaaccacgtgcatttggcctatgtaatcctgcccatggtggccgcagctaatcagaatcagatggaaaattaaaccgggtaatctacttctaagccttaagaatattccctgggacacagacactataattggaagtgctgagctctggggcagaaggatcaggtgaccttcgcaacaaagtttgcccccacctcacataggacccggaagcagcctgagctgtggcggaggatccaggaagctacggagagaagcagccagcatggtgttccgtgcctcccggacgtttttcaggaggcctggttggacttgggttcctggatggtgggattgttgtacagcctctcaggagaccctgctgtcaagactgtgtgtgtggatttcccacccttagaagctctactaagacatcaacggaattagggccttcctttttgccttgtgagcgccaaggaaaagaaactatctcggtcacgtgagcgccacgaaagaaactgtatcagtcatccagagaccgtttattgcccaacacgttattcttgctgttggtggggtaactagccgaggaagacacagcgccttcccttcaggagttgcgtctcctctgcaggccacgatggtctgctctggagcattgggtgaacacacaggctggctgctctgggcagcgccttcactctgaccctggagaaccatttcatttcatcctggtcagtctagagtctgtgcaccaggcagtccatccactgaaggctgtgtttattcttttcctgtgcccctcataatggaagaaagtaaactgcttatcccgagccttaaaaaaa

SEQ ID NO: 6524 - DNA, 665 bp, Homo sapiens
  SIMILAR (148)..(663): 781254mologous to Homo sapiens dJ408N23.1 (suppression of tumorigenicity 13 (colon carcinoma) (Hsp70-interacting protein) (Progesterone receptor associated P48 protein)),accession number Z98048,Smith-Waterman Score=694.
atggacccccacaaagtgaacgagctttgggcctttgtgaaaatgtgtaagcaggatccgagcattctgcacaccgaggaaatgcatttcctgagggagtgggtggagagcacggtgggtaaagtaccacctgctactcagaaagctaaatcagaagaaaataccaaggaagaaaaacctgatagtaagagggtggaggaagacttaaaggcagacgaacaatcaagtgagaaaagtgatctagaaattgataaagaagagataatggaggagatgatggatcaggcaaatgataagaaagtggctgctattgaaaccctaaatgatggtgaactccagaaagccactgacttattcacagatgccatcaagctgaatcctcgcttggccattttgtatgccaagagggccagtgtcttcgtcaaattacagaagccaaatgctgccattcgagactgtgacagagccattgaaataaatcctgattcagctcagccttacaagtggcgagggaaagcacacagacttctaggccactgggaagaagcagcccatgatcttgcccttgcctgtaaattggattatgatgaagatgttagtgcaatgctgaaagaagttcaacctagggcacagaaaagtgaagaacatcaaagaaagtatgagtg

SEQ ID NO: 6525 - DNA, 1121 bp, Homo sapiens
  SIMILAR (225)..(770): 891254mologous to Homo sapiens dJ408N23.1 (suppression of tumorigenicity 13 (colon carcinoma) (Hsp70-interacting protein) (Progesterone receptor associated P48 protein)),accession number Z98048,Smith-Waterman Score=812.
ccagctccacttttcctcggatgccatggagactcgtaaccagctggacagcatacatcccagagctggaggggagcacaagcgaccctgactcacctgccgttgctcagaagggagagaaacctgtgaaactcggaaattccctctgggggagtcacactgagccagtgcctaggcctggaaccgggccacggcccctcagcttcgtccaccgcctcccgaccatggacccccacaaagtgaatgcacttcgggcttttgtgaaaatgtgtaagcaggatctgagcgttctgcacaccaaggaaatgcacttcctgagggagtgggtggagagcatggggggtaaactatcacctgctactcagaaagttaaatcagaagaaaataccaaggaagaaaaacctgatagtaagaaggtggaggaagacttaaaggcagacgaaccatcaagtgaggaaagtaatctattaattgataatgaagatgtgattgaaccagaccctgatgcccctcaagaaatgggagatgaaaatgcagagataacagaggagatgatggatcaggcaaatcataagaaagtggctgctattgaagccttaaatgatggtgaactgcagaaagccattgacttattcacagatgccatcaagctgaatcctcagttggccattttgtatgccaagagggccagtgtcttcatcaaattacagaagccaaatgctgccatccgagactgtgacagagccgttgaaatttatttcagctcagccttacaagtggcgagaaagtatgagcaaaaacgtgaagagcgagagatcaaagaaagaatagaaagagttaagaaggctcgagaagagcaagagagagcccagagggaggaagaagccagaggacagtcagtagctcagtatggctcttttccagatggacttccggggggaatgcttgaaatgagagggggcatgcctgggaagcccggaataactggactcaatgaaatttttagtgatccagaggttcttgcagccgtgcaggatcccaaagttatggtggcttcttccaggatgtggctcaaaacccagcaaatatgtcacaataccagggcaacccaaaggttatga

SEQ ID NO: 6526 - DNA, 3292 bp, Homo sapiens
  SIMILAR (455)..(568): 861254mologous to Homo sapiens dJ408N23.1 (suppression of tumorigenicity 13 (colon carcinoma) (Hsp70-interacting protein) (Progesterone receptor associated P48 protein)),accession number Z98048,Smith-Waterman Score=159.
gaccggaggcaggaggggagagagagagagagagagcccagagggaggaagattccacacgacagtcaagagctcagtatggctcttttacaggtggctttcctgggggaatgcctggtaattttcccggaggaatgcctggaatgggagggccttctgcgcggtcacgccgagcacagcgcctgagcctggaaccggaccgtagcccccccagttacgcccaccacctccctaccatggacccccgcagagtgaacgagcttcgggcctttgagaaaatgtgtaagcaggatccgagcgttctgcacaccgaggaaatgcgcttcctgcagggagtgcgtggagagcatgtgtggaaaagtaccacctgctactcacaaagctatgtcagaagaaaataccacggaagaaaaacctgatagtgagaaggcggaggaagacttacaggcagactgaaccatcaagtgaggaaagtgatcttaggaaattgattaaagaaggtgtgattgaaccagacactgatgctcctcaagaaatgggagatgaaaatgcggagataccggaggaagatgatggatcaggcaaatgataaaaaagtggctgctattgaagccctaaatgatggtgaactccagaaagccattgacttattcacagatgccatcaagctgaatcctcgcttggccattttgtatgccaagagggccagtgtcttcgtcaaattacagaagccaaattgctgccatccgagactgtgacagagccattgaaataaatcctgattcagctcagccttacaagtggcgggggaaagcacacaggcttctaggccactgggaagaagcagcccatgatcttgcccttgcctgtaaattggattatgatgaagatgctagtgcaatgctgaaagaagttcaacctagggcacagaaaattgcagaacatcggagaaagtatgagcgaaaacgtgaagagcgagagatcaaagaaagaatagaacgagttaagaaggctcgagaagagcatgagagagcccagagggaggaagaagccagacgacagtcaggagctcagtatggctcttttccaggtggctttcctgggggaatgcctggtaattttcccggaggaatgcctggaatgggagggggcatgcctggaatggctggaatgcctggactcaatgaaattcttagtgatccagaggttcttgcagccatgcaggatccagaagttatggtggctttccaggatgtggctcagaacccagcaaatatgtcaaaataccagagcaacccaaaggttatgaatctcatcagtaaattgtcagccaaatttggaggtcaagcgtaatgtccttctgataaataaagcccttgctgaaggaaaagcaacctagatcaccttatggatgtcgcaataatacaaaccagtgtacctctgaccttctcatcaagagagctggggtgctttgaagataatccctacccctctcccccaaatgcagctgaagcattttacagtggtttgccattagggtattcattcagataatgttttcctactaggaattacaaactttaaacactttttaaatcttcaaaatatttaaaacaaatttaaagggcctgttaattcttatatttttctttactaatcattttggatttttttctttgaattattggcagggaatatacttatgtatggaagattactgctctgagtgaaataaaagttattagtgcgaggcaaacataactcatttgaggataaagtttgtgttggatatgtggttcctgatgcattttgacttgtctttttaaatgctttatctttttctttaaagatttatttcaataaaactaattgggaccacccgtatttcagtaggacctgggtagggattggaagtacttggcagggcagcagcaatcttgctgtgtttgatataacatgcatccttgggcaggttgcccttaaatcttacactgtggtgaagggatgttttttttgtaatgctgcagtagagttggagtacttagttctcttgttgtccagtatatctaataagtgtttttcatattatttccacgtaagggaaataaggtagtacttttctttttatatttctatgcttaaaattctctttcctagtcaaaaattgcccaaatctgtgtttgctttctgcttgctacatttgtctcccttacttttcttgagctaaagacaggctttttccaccggcatcatcactgctatcatcattaacagcgtaattatacaagcatatttaatgctgagtttaatttaatatgtaatacatatggtaattgtagggtaatacccacaacaactgtagtttcttacttggccaagagaatgcttatttaagtgttagacttccattctggcaaaatcttgccttatcagaagacattggaaagagggattccctttggtgtttggtcttctacttagaaaaacctattgcagttagtttatcttgtagtattcatctttgtattctgaagataaggtttgaattaaattgatacacacagaggggaaccgattttttttatccaatgtgaattataaatgagataatccacagttattcattgtggagttgttgagactatgaaagactcattgtctttgtattcagctcttaaatagtgtaactatatccccacctctgcttgctttctttccctcccctccaatgataaagaaaatgataaattttctgttgtgcattcaattcttattttaaataagactaagtataggcattgtacctgacattgctacgtttctaccagtgtttcaatttaaagtgctagtgtttaaaaacattttcaagggataaggccttctgtactttgcttatttgaagaatcagtggtaggagcagtgaagtaaattctatggagtacatttctaaaataccacatttctgaaatcataaataagtttattcaggttctaaccctttgctgtacacaagcagacagaaatgcatctgttacataaatgagaaaaagctattatgctgatggagcatgctttttaaatcctttaaaaacactcaccatataaacttgcatttgagcttgtgtgttcttttgttaatgtgtagagttctcctttctcgaaattgccagtgtgtacttggcttaactcaagaacagtttcttctggattccttatttgatttatttaacctaattatattctaatattgcaaatattaccataagtgggtaaaagtaaaattcctcttctg

SEQ ID NO: 6527 - DNA, 433 bp, Homo sapiens
  SIMILAR (228)..(431): 811254mologous to Homo sapiens promyelocytic leukemia zinc finger protein; kruppel-like zinc finger protein; PLZF,accession number AF060568,Smith-Waterman Score=319.
cggcccccctttgaatctatctagtccgcgtggtggaattctgaagacgtacgggtgcgagctctgcgggaagcggttcctggatagtttgcggctgagaatgcacttactggctcattcagcgggtgccaaagcctttgtctgtgatcagtgcggtgcacagttttcgaaggaggatgccctggagacacacaggcagacccatactggcactgacatggccgtcttctgtctgctgtgtgggaagcgcttccaggcgcagagcgaccttgcagcagcacatggaggtccacgcgggcgtgcgcagctacatctgcagtgagtgcaaccgcaccttccccagccacacggctctcaaacgccacctgcgctcacatacaggcgaccacccctacgagtgtgagttctgtggcagctgcttccgggatgagag

SEQ ID NO: 6528 - DNA, 690 bp, Homo sapiens
  SIMILAR (277)..(447): 1001254mologous to Homo sapiens kruppel-like zinc finger protein,accession number Z19002,Smith-Waterman Score=309.
atgatcctgagccttttagcccacggacaacactcagtcaatgtgcaggcagctggggagtcgtggaaagagcactggcccatcagccctctcgctgcttctaaccgcttgctgctgctgttggtccccatgtgtgcccagagtcactggcttcaaacacagctgcactgcaccattcctctgtctgatcctcccaccggccatgtttcctcctggcccagagtgttcacagacactattccatcttccggattccgccattcacctggtgttctgggcactgacatggccgtcttctgtctgctgtgtgggaagcgcttccaggcgcagagcgcactgcagcagcacatggaggtccacgcgggcgtgcgcagctacatctgcagtgagtgcaaccgcaccttccccagccacacggctctcaaacgccacctgcgctcacatacagaacaatcccaatccacgatggagattgaggagttgctggaagaaataggagggacaccagaagagtgtggtgtcatggaagctaaaggaagaggtttcaaaaagaaaaaagcacgggtgctgcttactactgatttatacgggcaggcgtcctgcgggctccaggcttctctgccacagctggcggaggtgcttaaggccttggaccccgtgacctttgccctagtcctgctgtcattttga

SEQ ID NO: 6529 - DNA, 934 bp, Homo sapiens
  SIMILAR (86)..(391): 371254mologous to Homo sapiens zinc finger protein SBBIZ1,accession number AF076249,Smith-Waterman Score=214.
atttagcccctccggcagtgttgttcccttgacagagagacacagagccagaagtgagtctcctgggagaatggatgagcctaagcaacccagctcccaggtagaagagtcagcaatgatgggagtaagtggctatgtggagtatctccgagagcaggaagtatctgagcggtggttccggtacaaccctcgtctcacctgcatctattgcgccaaatctttcaaccagaagggaagcctggaccgccacatgcgcctacacatggggatcacaccattcgtctgccgcatgtggggcaagaagtatacccggaaagatcagttggagtatcatatccgcaagcacacaggcaacaagccctttcactgtcatgtctgtggcaaaagtttccccttccagactgaaacatccagggggagggggctgaccctcttcccctttgagccataagcagccagcatcagagccatgggctgatacttagattcacaaaatgccacatcaataggccagaagatgctcccaagatgttgccaaactggaggatcagcaacttacacaaaagcactaaaggctcctcccttcttattgcccgcctcacactttggaaaataatcaagcaaatcaactttctaattcagggatcaacagccttggtttgttaactttataagaaaaaaggttttttaacaaaacgatgatgataaatggtcatttatctatcagtcatgtttgaacactgtactttggtccatatcatcttggtggctataattgcccggatctaaaaaatgcagcaggagcctcaaccatccgaagcagccaaccgcaagagaggaggtagtcatgatggtgatgaggaggagaaatttctcctcttccttccctggcataacatgcatttttgtgtttcaagaaaaaaaaaaaaaaaaa

SEQ ID NO: 6530 - DNA, 1125 bp, Homo sapiens
  SIMILAR (172)..(726): 1001254mologous to Escherichia coli K12 transcriptional activator of nhaA,accession number AE000112,Smith-Waterman Score= 968.
atgctgagcgctagtcccctgggcccactgttctttctctatactttgtctctgtgtcttatttcttttctcagtctctcgtccaacctgatgagaaggcggcgggattacagggggagtgggccgtgcggcgagatactgagggtgcaggtctcctctagaggatcccccgttggcgtggctgatgcactttccaaacgcctggtcagtagcgtacttaacgccgcagtggtagaaggcgagcccattcatcttcgctgcttcgaatccacccacgaaatgctgctggagcaattaagtcagcataaactggatatgatcatttctgactgtccgatagactctacgcagcaggaaggcctgttctccgtgagaattggcgaatgtggcgtgagtttctggtgtacaaatccaccaccagaaaaaccgttcccggcttgtctggaagaacggcgacttttgattcctgggcgacgttcaatgttagggcgcaaattgcttaactggtttaactcccagggattaaacgtagaaatcctcggcgagtttgatgatgccgctttgatgaaagcttttggtgcgatgcacaatgcaatcttcgttgccccaacgctttatgcatatgacttttatgccgataaaactgtcgtagaaattggtcgcgtcgagaatgtgatggaagagtaccatgctatttttgctgagcggatgattcagcacccggcggcagtacagaatggttttcggcagcaggttttcttcattctgcttgctcagcaacttagacagctcttccgccatcggacggtcgttgatggagtcaaagcctacatccggccccagcagtttgaactgacgcaggttgttattacgcagcgcgccaatgtggtactgctgtacccagccgcgacgtgcatattcggcaccaaggaacaccagtaccgcagttttgaactgcgccacttcgtgctcgctcagggtttcgccagccagacggcgcgccagaatgctgtccagttccgcttcgttcgcttcagcaaacatcaccacatccagcgcgtggtcagacactttacagccgtgagcggcgaagtgatccagacgtttggtcagggcagtttgcag

SEQ ID NO: 6531 - DNA, 684 bp, Homo sapiens
  SIMILAR (82)..(177): 781254mologous to Homo sapiens metaxin,accession number U46920,Smith-Waterman Score=133.
atggcggcccccttggaactcagttgctggggaggcggctggggactcccatcggttcacagcgagtccctggtggtgatgaaatataatgctgattatgaactctcagcaaaacaaggggcagatacattggcttatattgctctcctcgaagagaagcttctccctgcagtggtgggacgagagactgagaaaagaagtaagacacagagacaaagtatagagaaagaacagtgggcccagcagactggcgctcagcatacggaggacctgcaccagcaccggtctctgagttccctcagtttttattattattttcactatctcagcaagaggaatgcagtaggagagcagggtgataatagggagaaggtcagcaagaaaacatggcctcagggctttcatgagaaactcaatgcagtggaaagccagaagggtgttaagtggggagtgaggagtgatgccatcaggcctgttttgggaaagcacttctgctgttgtgtagaggtaactgcaggaagccaagcccttgtggagagactcagtaagagactcttgcaacattccaggtgtcaaagagttcactgcagaagcagcagcagacatgaaaaggagatgaattttagatctattttgctggtagaattgatagaatttggtaatagatggaatatacaagagtag

SEQ ID NO: 6532 - DNA, 486 bp, Homo sapiens
  SIMILAR (1)..(129): 881254mologous to Homo sapiens FVT1 gene is disrupted in a t(2;18) chromosomal translocation involving Ig kappa gene in a follicular lymphoma,accession number X63657,Smith-Waterman Score= 178.
atgctgctgctggctgccgccttcctcgtggccttcgtgctgctgctgtacatggtgtctccgctcatcagccccaagcccctcgccctgcccggggcgcatgtggtgggttcccggggccccaggggttctgtggctgctcgtgaatccatgcaacatccctgggatgtggatgttttgtcctcagtttttccgatgagtcaactgaggcacagagaggctgagaaactttgccaaggacacagcggtcggtgtgggaaggatgagctaaacgacaaggcttgtgtgcgaggaatgaaggagaggtggataggtgtgatttatttcttggcggaagctcgcatattcagcgatccctgttctgcaaatgtggcacctttcttaaacagagagaatgcctccttgcctgcgcccagcactttcccgtttgcagtggctttctcacgagcattctcgtttggatctcccaaacccgaggcacagtga

SEQ ID NO: 6533 - DNA, 273 bp, Homo sapiens
  SIMILAR (161)..(271): 971254mologous to Rattus norvegicus nucleolar protein B23.2,accession number J04943,Smith-Waterman Score=176.
acgcggggtccctggtgtgattccgtcctgcgcggttgttctctggagcagcgttcttttatctccgtccgccttctctcctacctaagtgcgtgccgccacccgatggaagattcgatggacatggacatgagccccctgaggccccagaactatcttttcggtcagtttaggggctggtgcaaaggatgagttgcacattgttgaagcagaggcaatgaattacgaaggcagtccaattaaagtaacactggcaactttgaaaatgtctgt

SEQ ID NO: 6534 - DNA, 681 bp, Homo sapiens
  SIMILAR (211)..(462): 741254mologous to Homo sapiens nucleophosmin,accession number M23613,Smith-Waterman Score=333.
atggaagattcgatggacatggacacgagcaccctgaggccccagaattaccttttcagttgtgaactaaaggccaacaaagatgatcaccttaaggtagataatgatgaaaatgagctcaagttatctttaaacacagtcagtttagtggttggtgcaaaggatgaattgcacactgttgaagcagaggcaatgaattacaaaggcagtccaattaaagtaacactgtgtggctcaggaccagtacatattagtggacagcacttagtagctgtggaggaagaggcagagtcaggagatgaagaggaggaggatgtgaaactcttaagtatatctggaaagcaatctgccccagggggtggtagcaagtttccatggaaacaagtaaaacttgctgctgatgaagatgatgatgatgatgacaatgataattttgatgatgaggaaactgaagaaaagtctatactcacttttttggttattctgacctatgctatatggttggcccttgaacaacatgagtttgaactgcatggtccatttatatgtagattttcttctacctctgtcacccctgaaatggcaaaaccaatccctcttcttccacctcctcagtctactcaacatgaagacaatgaggatgaagaactttatgatgatccacttccacctagtgaatag

SEQ ID NO: 6535 - DNA, 634 bp, Homo sapiens
  SIMILAR (240)..(632): 971254mologous to Homo sapiens nucleophosmin,accession number M23613,Smith-Waterman Score=656.
ggctggggaggtcttgcaatcatgagggaaggcaaatgggaagcaaagtcatgtcttatgtggtggcgggcagggggacttgtgcacaggaactcctatttatacaaccatcagatatcttgagacaagaacagtatggggctccctggtgtgattccgtcctgcgcggctgttctctggagcagcattcatttatcttcgtctgccttgtctcctacctaagtgtgtgtcgccacccgatggaagatttgatggacatggacatgagccccctgaggccccagaactatcttttcagttgtgaactaaaggccgacaaagatgatcactttaaggtggataatgatgaaaatgagcaccagttatctttaagaacggtcagtttaggggctggtgcaaaggatgagttgcacattgttgaagcagaggcaatgaattacgaaggcagtccaattaaagtaacactggcaactttgaaaatgtctgtacagccaacggtttcccttgggggctttgaaataacaccaccagtggtcttaaggttgaagtgtggttcagggccagtgcatattagtggacagcacttagtagctgtggaggaagatgcagagtcagaagatgaagaggaggaggg

SEQ ID NO: 6536 - DNA, 479 bp, Homo sapiens
  SIMILAR (7)..(180): 771254mologous to Mus musculus Pro-Pol-dUTPase polyprotein,accession number Y12713,Smith-Waterman Score=259.
  misc_feature (1)...(479): n = a,t,c or g
naatgttccgccaagactgccatccgtggagtctcggaatgccttatccaccatcatggtattccacacagcactgcctctgaccaaggcactcactttacagctaaagaggtgtggcagtgggcttatgctcatggaattcactggtcttaccatgttctccatcatcctgaagaggctgcaaagaacggtggaatggccttttgaagtcacaattacaatgccaactaggtgacaacactttgcagggctgaggcaaagttctccagcaggccgtatatgttctgaattagcatccaatatacggtactgtttctcccatagccaggattcacggtccaggaatcaaggggtgaaactgaactgacaccactcaccatcacccctagtgatcccctagcaaaatttttgcttcctgttcccccgacattacattctgctggcctggagatcttagttccagagggagaaatacgaaa

SEQ ID NO: 6537 - DNA, 1542 bp, Homo sapiens
  SIMILAR (990)..(1061): 791254mologous to Mus musculus Pro-Pol-dUTPase polyprotein,accession number Y12713,Smith-Waterman Score=99.
atggtgggaaaagccaaatggaagccattagagctgcctctacctagaaaaatggtaagtcaaaaacaatatcgcatccttggagggactgcagagattagtgtcaccatcaaggacttgaaagacgcaagggtggtgattcccagcacatccccattctactctcctatctggcctgtgcagaagatagatggatcttggagaatgacagaggattatcgtaagcttaaccaagtggtaactccaactgcagcagctgtaccagatgtggtttcattacttgaacaaattaacacatctcccggtacccggtatgcagccattgatttgacaaatgcttttttctccattcctttccataaggcccaccagaagctatttgccttcagctggcaaggccagcaatatacctttactgtcctaccttggggggatatcaactctccagctctgtgtcataatcttattcggagagaccctgattgcttttcacttccacaagatatcacactggtccatcacattgatgacattatgttaactggatccagagagcaagaagtagcagacacacgggacttcttggtaaaggataagttgctgcatttggcccctcctacaaccaagaaacaggcacaacacctagtgggcctatttggattttggaggcaacatattcctcttttgggtgtattactccagcccatttatcgagtgactcaaaaggttgcgagttttgagtggagtcaagaacagaagacggctctgcaacaggtccaggctgctgtgcaagctgttctgccacttgggccatataacccagcagatccaatggtgcttgaggtctcagtggcagatagggatgctgtctgcagcctttgtcaggcccctataggtgaatcacagtggaggcctctaggattttggagcaaggccctgccatcttctgcagataactactctccttttgagagacagctcttggcctccataaagtgggtcatgcacagcagcattccatcagcaaatggaagtgatacatacacgatcgggctcaagcagactaccatccgtggactcgaggcatgccttatccactgtcagggtattccacacagcattgcctctgacaaagacgctcactttacaactaaagaagtgtggcagtggactcatgctcatgaaattcattggtgttaccatgttctccatcatcctgaagcagctggattgacagaacgatggaatcgccttttgaagtcacaattacaacgccaactaggtgacaatactttgcagggctcgggcaaagttctccagaaggccatgtatgctctgaatcaacatccaatatatggtactatttctcccatagccaggattcatggatccagtaatcaaggggtggaagtggcaccactcaccatcacccctagtgatccactagcaaaatttttgctttgtgttcccacaacattacgttctgctggcctagatgtcttagttccagagggaggaatgacacaacaacaattccattaa

SEQ ID NO: 6538 - DNA, 636 bp, Homo sapiens
  SIMILAR (223)..(495): 651254mologous to Mus musculus Pro-Pol-dUTPase polyprotein,accession number Y12713,Smith-Waterman Score=286.
atggggagaaaccagagcagaaaagctgaaaattctaaaaattggagtgcctcttctcctccaaaggatcacagctccttgccagctatggaacaaagctggatggagaatgactttgatgagttcacagaagtaggcttcagaaggtcggtaataacaaacttctctgagctaaaggagcatgttctaacctattgtaaggaagctaaaaacgttgaaaaaaggatttacaggtccaggaaccaagggatggaagtgaaagtggcaccactcaccatcacccctagtgatccactagcaaatttttttgcttctgttcccgcaacattacattctgctggcctagaggtcttagttccagagggaggaacactgccactgggagacacaacaatgattccattaaactggaagttaagattgcgaactggatactttggtctcctcctacgtttaagtcaacaggctaagaagggagctatggtgttggctgggtggttgacccagactatcaaaatgaaatcagtctactactccacaactgaggaaaaacccacgaccactgaggtgcttgctaaaggcaaagggaatacagaatgggtagtagaagaaggtagtcatcaacaccagctatga

SEQ ID NO: 6539 - DNA, 357 bp, Homo sapiens
  SIMILAR (224)..(355): 631254mologous to Mus musculus Pro-Pol-dUTPase polyprotein,accession number Y12713,Smith-Waterman Score=124.
tcacgatttattatcctcaaattccattcccatgaatactttcctggctccttcttgtacatactgtcttctggcgtacagttccttttctcccatggcaggcccagcacttccctgtccacaacgttcagcaaccagctgagcacttctggccacctcatcggctaaagatgcaggaatttttataagaactaatccagcatgttccccatcatcctgaagcagcatcacccctagtgatccactagcaaatttttttgcttctgttcccgcaacattacattctgctggcctagaggtcttagttccagagggaggaacactgccactgggagacacaacaatgattccattaaa

SEQ ID NO: 6540 - DNA, 342 bp, Homo sapiens
  SIMILAR (195)..(341): 371254mologous to Danio rerio homeodomain protein,accession number AF063018,Smith-Waterman Score=69.
  misc_feature (1)...(342): n = a,t,c or g
acgacgatttcgtctcttggacttacaccagtggtttgccaggggcttttgggcctttggtcacagactgaaggctgcactgtcagcttccctacttttgagggnnnnnnnnnnnnnnnnnnnnnnnnnnnnnnnnnnnnnnnnnnnnnnnnnnnnnnnnnnnnaccttgtgatcatgaagtagaagtgattatccacattccatagaagaagaagcggagctcagaatggtctcatctccaggcagctgtccctcttctggatctctggcaactccagttcacagcaccctttctcctcctagcctaggatccagtgcctttagcagcccagtcatgcgaa

SEQ ID NO: 6541 - DNA, 948 bp, Homo sapiens
  SIMILAR (86)..(6): 621254mologous to Homo sapiens Fragment of human secreted protein encoded by gene 14,accession number Y14479,Smith-Waterman Score=83.
tcaatcttcagagaactgaagagagttagggtcttgctttcgattaggctttggcttaagggaatgttgtggctggtttgaacttctatcgacatggcgagtgaccatggcccgtgacacagacctcaggaagtcctcagaacatgtgcccaaggtggttggggtgcagctggctggcgtgtactgagtcaaccacattttctctcgcaggatacagaaattgttgttagtctctggtgggtgcttaaaatgaaagttgttctctggctcccacagggcatctgaattccttcttggaatgatgtgagttgataaaatgcctacacgatgagatgaagtgagatgaatgacataggcattgtgatgtaacatgaggctgctgtcatctgctttgggtgatcctgggtcatcaagccatgatgatgttgatggttggatgtcagaagcagatgttgatgtacgatcacaaggtgaagtcccacaacaggctgcctgcaagttgaggggacaggaagccagtccgagtcccaaaacctcaaaagtagggaagctgatagtgcagccttcagtctgtggctgaaggcccaagagcccttggcaaatcactggtgtaagtccaagagtccaaaagcagactctgaatttacttgtaccttgatcttgaacttcccagtctgcagaattgagagaaataagtttctgttgtttatatgccatgcagtttataagattttgttgtagtaacctgaacaggctcccatagataatcatttctctgatggatctgggcaaagtagtttgaaaagcttctggaaaggattcagcattgtagatgccattaagaacatatgacacagatgttttgaattgggggctgtctgtaggccttcttggactctcaagtgggtccggtgtcagaagctgccagttgtcttccccaacatccat

SEQ ID NO: 6542 - DNA, 243 bp, Homo sapiens
  SIMILAR (1)..(75): 1001254mologous to Homo sapiens Human secreted protein, SEQ ID NO: 5062,accession number G00981,Smith-Waterman Score=127.
atgccgctctacgagggcctggggagcggcggggagaagacggcggtcgtgatcgacctgggagaggcctttaccaacgcccttgcaaataacagctcttattatttcctccctgggcgatgcgaatccgaggatcggggtctgactcccagagaggcccagaaagcttctgttgaattgccctcgtcgccgccccttgtcatcaccccaaacccaacaaaccctttgggatcatctgtgtag

SEQ ID NO: 6543 - DNA, 495 bp, Homo sapiens
  SIMILAR (84)..(407): 731254mologous to Homo sapiens uncharacterized hypothalamus protein HARP11,accession number AF220190,Smith-Waterman Score=381.
tttcgtgagacttgttggccgcggagactgcgaccctcttctctcagtctgccttactaccatgccgctctacgagggcctggggagcggcggttgagaaaacggcggtcgtgatcgacctgggagaggcctttaccaagtgtggatttgctggagaaactggtccaagatgtataattcctagtgggataaaaagagctgggatgcctaagcctgtcagagttgttcagtataatatcaatacagaagaattatattcctacctaaaggaattcatccacatactatatttcaggcatcttattggtgaatcccagagaccgccgagtttgtgattatcgaatccggtattatgtccttcttcacttcagagaggacactcactcgtgtttctttttcaaatattttgagggttccatctgtcttgcttgcctccaagtccatctaatggctcttctgacgcttggaattaattcttggcatgggcctagattg

SEQ ID NO: 6544 - DNA, 582 bp, Homo sapiens
  SIMILAR (1)..(549): 1001254mologous to Homo sapiens putative transport protein LAB300,accession number AF216648,Smith-Waterman Score=938.
atggctagcgaagacaatcgtgtcccttccccgccaccaacaggtgatgacgggggaggtggagggagagaagaaacccctactgaagggggtgcattgtctctgaaaccagggctccccatcaggggcatcagaatgaaatttgccgtgttgaccggtttggttgaagttggagaagtatccaatagggatattgtagaaactgtctttaacctgttggtaggaggacagtttgatctggaaatgaatttcattatccaagaaggtgagagtattaactgcatggtggacctactggaaaaatgtgacattacgtgccaagcagaagtctggagcatgtttacagccattctgaagaaaagcatacggaatcttcaagtctgcactgaagtaggccttgttgaaaaagtgcttgggaaaattgaaaaagttgacaatatgatagcagatcttttggttgacatgttgggagtgctggctagctataatttgacagttcgcgagctaaagcttttcttcagtaaacttcaaggagataaaggacgatgggtaaaaaaacttaagtactctttggtattttaa

SEQ ID NO: 6545 - DNA, 624 bp, Homo sapiens
  SIMILAR (244)..(597): 951254mologous to Homo sapiens putative transport protein LAB300,accession number AF216648,Smith-Waterman Score=568.
atgatctcctttgacttcatgtctcacatccaggtcacactgatgcaagagtggacgctgtcagtggatctaccattctggggtctggaagattgtggccctcttctcacagctccactaggcagtgccccagtggaaactctgtggaggcgcttgtaccccacatttcccttccacagtgtcttagcagaggttctctgtgagggctccacccctgcagcacacctctgcctggacatccagttggtaggaggacagtttgatctggaaatgaatttcattatccaagaaggtgagagtattaactgcatggtggacctactggaaaaatgtgacattacgtgccaagcagaagtctggagcatgtttacagccattctgaagaaaagcatacggaatcttcaagtctgcactgaagtaggccttgttgaaaaagtgcttgggaaaattgaaaaagttgacaatatgatagcagatcttttggttgacatgttgggagtgctggctagctataatttgacagttcgcgagctaaagcttttcttcagtaaacttcaaggagataaaggacgatggatactgccaggctacacagggcctaatataagattttatgagaactaa

SEQ ID NO: 6546 - DNA, 354 bp, Homo sapiens
  SIMILAR (43)..(279): 431254mologous to Arabidopsis thaliana Contains similarity to HARP gene from Homo sapiens gb|AF210842. It contains SNF2 N- terminal PF|00176 and helicase C-terminal PF|00271 domains,accession number AC007932,Smith-Waterman Score=164.
atgaactggagaatgtcgaccagtaaagtgacagttctgggttatggtctcttaaccgcagatgcaaagactttgatagatgcactgaataatcagaacttcaaagtagttatagtggatgaatcacactacatgaaatccagaaatgcaactcgcagcaggattttattgccaatagtacagaaagccagacgagccattcttcttacaggaacaccagctttaggaaggcctgaagagatgcttcctgccctggaacattggactcccaagttcttcagttgtggaactagaactggcttccttgttcctcagcctgctgatggcccattgtgggaccttgtgatcatgtga

SEQ ID NO: 6547 - DNA, 450 bp, Homo sapiens
  SIMILAR (301)..(426): 881254mologous to Rattus norvegicus p105 coactivator,accession number U83883,Smith-Waterman Score=185.
gataagaacaagaaactgcgtcccctgtatgacattccttacatgtttgaggcccgggaatttcttcgaaaaaagcttattgggaagaagggcaaagagcctctcttgtcttttcatcagctcacagttcctaagactgtgcttgacattgacaatgacgtcgagatcctcaatagatctttacagaagggatcagcagcagcattagattctcatagaagtgcaaagcctagtgtgaactacacgtgcgagggatctaggtctcatgctctttatgagaatctaatgcttgatgatctgaaggtcaatgtgacggtggactacattagaccagccagcccagccacagagacagtgcctgccttttcagagcgtacctgtgccactgtcaccattggaggaatattgatgacttacgctttaatcatagtcaatgaaaagaactgctga

SEQ ID NO: 6548 - DNA, 881 bp, Homo sapiens
  SIMILAR (141)..(395): 841254mologous to Homo sapiens 100 kDa coactivator,accession number U22055,Smith-Waterman Score=361.
tttcgtgctgctggggcctaaaatttacagctctaagaattcattgctgccgttgctgctaacatattacaaggggtgcctaattccagtaacttgttacaggacatccttagatcttcatgttctgtaatcagcaggtaaaggtgatgcaggttctgaatgctgatgccattgttgtgaagctgaactcaggcgattacaagacgattcacctgtccagcatccgaccaccgaggctggagggggagaacacccaggataagaacaagaaactgcgtcccctgtatgacattccttacatgtttgaggcccgggaatttcttcgaaaaaagcttattgggaagaagagagtaagcatggaaagttccagccccaaggacgacatttcagaaacccagctgaaaagatcaggagtgggtggcttaagacaagccgaccacaaatcatgttataaatatgggaacattcaccagaaaaatatgagcaacttgggagtccaacctgggccacaagagcaaaactccatttcaagaaaacaacaacaacaacaacaacaaataacacacttcaccaaagaaatgtgtgctcagctcaacaccctgatagtcctcaaagaacagaggtttgccaaagagcgcaggctgagaatatggagagactatgtggctcccacagctaatttggaccgggaggacaaaaaatttgttgccatgcatgtgactggtcataatgcaactattcagcatggaagcatcaaacagctgtcactgtgtagcatcttttccaggcaccaggatgacatctggactcagtattttcgtgtaagagaaatggttcttgctaatcgtgttgtcacaggatcatacatcaaacagagctag

SEQ ID NO: 6549 - DNA, 2628 bp, Homo sapiens
  SIMILAR (123)..(281): 301254mologous to Homo sapiens skin-specific protein,accession number AF005081,Smith-Waterman Score=67.
atggtgttagggagtggcagagaggatgttaatgggcagaaagaccagtatgtgcagcgacatatagcagctaaagaaagggttttaagtaacttgcggaagcatgaggctccccagcctccccttgctctgcacccgacgaagcctcctgtgccagttatttcctctgctgtgctattgagtcagaaggacgccacccagctggtgtgcacagacctgaatctgttgcaacagcaggccagaaccgcagctcttcgggaatctcagcaggttgctctggatggtgagctgttagacacaatgccaaagcagtatgtgaatcgtgaagaacagaccacactacatttggagtgcagaggcagcagcggtaagaaatgccaaggagccgcagttgtcacggttcagtttgaaggcatgcataagaatgaagccataagccaacagcttcatgttttacggaaggaagtgaagcagttgcaagcagaagctgctaaaccaccatcacttaatattgtggaagctgctgtacatgcagaaaacttgatcacggccttagtgaatgcctacaagttgcagcctacacctgggattcagaaagttggcattagccttttctttactattgtggattacgtcagcgatgagacgcagcgtcatcccccaacaaggcagttctttacttcatgtattgagatcttgggacaggtatttatcagtggcattaaatcagagtgcagaaaagtacttgaaaccattctgaagaacagcaggctctgctccctgctgtctcctttcttcactcccaatgctgcacctgcagagttcatacagctgtatgagcaagtggtgaagtttctaagtgaggacaacagtgatatgattttcatgctgctaaccaagaaagtctccaggtggtttttctgccactacagtgtggggatcactggcagaatgtatgatgatggcaaagtcagacttggcatttggctgtttatgtccgagatgccctttgggactctgtctgtgcaaatgctgtggaagctcttctacctcatgcaccaggtggagagcgagaacctgcagcagctctcctcctccctgcagcccgcccagtgcaagcagcagctccaagacccagaacattttaccaactttgagaagtgtctttcttctatgaatagctcagaagagatttgccttctgactacctttgctcagatggctcaggccagaagaaccaatgtggacgaagacttcataaaaattattgttctggagatatatgaggtatcttatgtcaccttgtctaccagagagactttttcaaaggttggccgagagcttttagggactatcacagctgttcaccctgagataatttccgtccttctggatagagttcaagagaccattgaccaggttggaatggtttctctatacttgtttaaagaactgcctttgtatctttggcaaccttctgcatctgagatagcggtgattcgggattggttattgaattacaacctgacagtggtgaagaataaactggcctgtgttattcttgaaggactgaattggggatttgctaaacaggctacccttcatctggatcaagcagtccatgctgaagtggctttaatggttcttgaagcttatcagaagtaccttgcacagaagccatatgctgggattctctctgaaagtatgaagcaggctgtgaaagcgggcatgcccattggctgttatctagccttatctatgacagctgtgggccacagcattgagaagttctgtgcagaaggcatcccactattgggaattctggtccagtcaagacatttgagaacagtggttcatgtcctggataagattctgcctttattttacccttgccagtattaccttctgaagaatgagcaaatcagcaccctgggtatgaggcaagtttggaaactgaatggtttggaaacatctctgcctttattcatggagttggggagtttttatcgcatctcctcatgttcctacacttggacagcggtgtccctcagggtgtcacacaacaggtcacccacaaggtggcacagcacctgcacaggagccagccatggggacaacgtgaagcttctcaacagcatgatccaggcacacatatctgtaagcactcagcccaatgaagtgggccccgttgctgtgttggagttctgggttcaggctctcataagccagcatctctggtaccgagaacaacctatcctcttcctcatggaccacttgtgtaaagcagcttttcagctgatgcaggaagactgcatacagaaattactctaccaacaacataagaatgccttgggttaccactgtgaccggagtctgctctcatctttggtaagctggattgtggcaggcaacatcactccttcctttgtggagggcttggccacgcccactcaggtctggtttgcctggacagtgctcaacatggaatccatctttgaagaggactcccagctccggagagttattgaaggggaattggtgataaactctgctttcacccctgaccaagctctgaaggtacaaatagcagttctgcatttgagtggtagaaggtggcttacactttga

SEQ ID NO: 6550 - DNA, 1677 bp, Homo sapiens
  SIMILAR (97)..(732): 401254mologous to Homo sapiens hABC3 protein,accession number W25671,Smith-Waterman Score=463.
atggtaaagctagactcccaaacaaaagggcttgacttttgtgaagaacagggatacctgccatatggcagaggcataaggcaaagtgaaccggagcaaggggtgcagatgtatgttctagataacacggtgcagaaggttttactagatttagacatgcagactatcaaagataaccaagctaaaaaattaagtggtggtcaaaaaagaaagctgtcattaggaattgctgttcttgggaacccaaagatactgctgctagatgaaccaacagctggaatggacccctgttctcgacatattgtatggaatcttttaaaatacagaaaagccaatcgggtgacagtgttcagtactcatttcatggatgaagctgacattcttgcagataggaaagctgtgatatcacaaggaatgctgaaatgtgttggttcttcaatgttcctcaaaagtaaatgggggatcggctaccgcctgagcatgtacatagacaaatattgtgccacagaatctctttcttcactggttaaacaacatatacctggagctactttattacaacagaatgaccaacaacttgtgtatagcttgcctttcaaggacatggacaaattttcaggtttgttttctgccctagacagtcattcaaatttgggtgtcatttcttatggtgtttccatgacgactttggaagacgtatttttaaagctagaagttgaagcagaaattgaccaagcaggggaatttggcttacggagatcatctttatattttctgaagccttcatattggtcaaagagcaaaagaaattatgaggagttatcagagggcaatgttaatggaaatattagttttagtgaaattattgagccagtttcttcagaatttgtaggaaaagaagccataagaattagtggtattcagaagacatacagaaagaagggtgaaaatgtggaggctttgagaactgagacaggtgaggaagctgaagaagaaaactctgaagctttaagaggttggtccataaggtttaaggaaagcagtcatctccataacacaaaactgcaagatgaaacagcaaaggctgatacagaagctgctgtaagttatccagaccatctagctaagaccattgatgaagatggctacaccaaacaacagattttttgtatagatgaaacagccttctcttggaagaagatgccatctaagactttcacggcaagaaagaatacactttgtacggctacaggtgctatagacagtgattcttctgataaatctggacaaaagttgcttcctctggaggagcaaagaaagtgtcttcttgagatgcaaactattgttagtgaagatgctgtgaacattgttgaaatgacaacaaaggatttagaatattacatccacttagttaataaagcagcaacagggcttgagggcattgacttcaatttcgaaagaagtttcactttgggtaaaatgctgtcaaacagcatcgcatgctacagagaaatctttcatcaaaagaagcctattgagtcacacatttcattgttgtcttcttttaagaaattgccacagccacctcaaccttcagcaaccactactttgatcagtaagcagccatcaacgtcaaggcaagactgtccagcagcaaaaaagattatgacttgctaa

SEQ ID NO: 6551 - DNA, 2238 bp, Homo sapiens; identical to SEQ ID NO: 3843
  SIMILAR (829)..(2232): 941254mologous to Homo sapiens putative p150,accession number U93572,Smith-Waterman Score=2306.

SEQ ID NO: 6552 - DNA, 2238 bp, Homo sapiens
  SIMILAR (1784)..(1807): 1001254mologous to Homo sapiens unknown,accession number AF148856,Smith-Waterman Score=40.
cttatccaccatgatcaagtgggcttcatccctgggatgcaaggctggttcaatatatgcaaatcaataaatgtaatccagcatataaacagagccaaagacaaaaaccacatgattatctcaatagatgcagaaaaagcctttgacaaaattcaacaacccttcatgctaaaaactctcaataaattaggtattcatgggacgtacttcaaaataataagagctatctatgacaaatccacagccaatatcatactgaatgggaaaaaactggaagcattccctttgaaaactggcacaagacagggatgccctctctcaccactcctattcaacatagtgttggaagttctggccagggcaattaggcaggagaaggaaataaagggtattcaattaggaaaagaggaagtcaaattgtccctgtttgcagaagacatgattgtatatctagaaaaccccactgtctcagcccaaaatctccttaagctgataagcaacttcagcaaagtctcaggatacaaaatcaatgtacaaaaatcacaaacattcttatacaccaacaacagacaaacagagagccaaatcatgagtgaactcccattcacaattgcttcaaagaaaataaaatacctaggaatccaacatacaagggatgtgaaggacctcttcaaggagaactacaaaccactgctcaaggaaataaaagaggatacaaacaaatggaagaacattccatgctcatgggtaggaagaatcaatatcgtgaaaatggccatactgcccaaggtaatttacagattcaatgccatccccatcaagctaccaatgactttcttcacagaattggaaaaaactacttcaaagttcatatggaaccaaaaaagagcccgcatcaccaagtcaatcctaagccaaaagaacaaagctggaggcatcacactacctgacttcaaactatactacaaggctacagtaaccaaaacagcatggtacttgtaccaaaacagagatatagatcaatggaacagaacagagccctcagaaatgacgccgcatacctacaactatctgatctttgacaaacctgagaaaaacaagcaatggggaaaggattccctatttaataaatggtgctgggaaaactggctagccatatgtagaaagctgaaactggatcctttccttacaccttatacaaaaatcaattcaagatggattaaagatttaaacgttagacctaaaaccataaaaaccctagaagaaaacctaggcattaccattcaggacataggcatgggcaaggacttcatgtccaaaacaccaaaagcaatggcaacaaaagacaaaattgacaaatgggatctaattaaactcaagagcttctgcacagcaaaagaaactaccatcagagtgaacaggcaacctaaaaaatgggagaaaattttcgcaacctactcatctgacaaagggctaatatccagaatctacaatgaactcaaacaaatttacaagaaaaaaacaaacaaccccatcaaaaagtgggcgaaggacatgaacagacacttctcaaaagaagacatttatgcagccaaaaaacacatgaaaaaatgttcatcatcactggccatcagagaaatgcaaatcaaaaccactatgagataccatctcacaccagttagaatggcaatcattcaaaagtcaggaaacaacaggtgctggagaggatgtggagaaataggaacactcttacactgttggtgggactgtaaactagttcaacatattctcactcataggtgggaattgaacaatgagatcacatggacacaggaaggggaatatcacactctggggactgtggtggggtggggggaggggggagggatagcattgggagatatacctaatgcaagatgacgggttagtgcctggttggaatggatcaaatattccatccacacgttaaaaaaaagcaattgttatgcttgtgcacatggcaagccagaggcccagattgtcccctttccactaaggtggtcctccagtcaaccaggtgtgggctgcatggtaacccttttccaggattctacagcctggagtaataagtcatgccaagctctctctgctgtatcccggaagctgactggtccacgcacagccgaagcatgagaaaactcattgcggggactcattttccttaaaattcagacttgtacagtaaggacttattaactg

SEQ ID NO: 6553 - DNA, 2784 bp, Homo sapiens
  SIMILAR (1267)..(2781): 871254mologous to Homo sapiens putative p150,accession number U93563,Smith-Waterman Score=2247.
atggggaaaaaacagaacagaaaaactggaaactctaaaaagcagagcgcctctcctcctccaaaggaacgcagttcctcaccagcaacggaacaaagctggatggagaatgactttgacgagatgagagaagaaggcttcagacgatcaaattactctgagctacgggaggacattcaaaccaaaggcaaagaagttgaaaactttgaaaaaaatttagaagaatgtataactagaataaccaatacagagaagtgcttaaaggagctgatggagctgaaaaccaaggctcgagaactacgtgaagaatgcagaagcctcaggagccgatgcgatcaactggaagaaagggtatcagtgatggaagatgaaatgaatgaaatgaatgatggggagaatggaaccaagttggaaaacactctgcaggatattatccaggagaacttccccaatctagcaaggcaggccaacgttcagattcaggaaatacagagaacgccacaaagatactcctcgagaagagcaactccaagacacataattgtcagattcaccaaagtggaaatgaaggaaaaaatgttaagggcagccagagagaaagactttaaaccaacaaagatcaaaagagaaaaagaaggccattacataatggtaaagggatcaattcaacaagaagagctaactatcctaaaaatatatgcacccaatacaggagcaccaagattcacaaagcaagtcctgagtgacctacaaagagacttagactcccacacattaataatgggagactttaacaccccactgtcaacattagacacatcaacgagacagaaagtcaagaaggatacccaggaattgaactcagctctgcaccaagcggacctaatagacatctacagagctctccaccccaaatcaacagaatatacatttttttcagcaccacaccacacctattccaaaattgaccacatagttggaagtaaagctctcctcagcaaatgtaaaagaacagaaattataacaaactatctctcagaccacagtgcaatcaaactagaactcaggattaagaatctcactcaaaaccactcaactacatggaaactgaacaacctgctcctgaatgactactgggtacataacgaagtgaaggcagaaataaaggtgttctttgaaacgaaggagaacaaagacacaacataccagaatctctgggacgcattcaaagcagtgtgtagagggaaatttatagcactaaatgcccacaagagaaagcaggaaagatccaaaattgacaccctaacatcacaattaaaagaactagaaaagcaagagcaaacacattcaaaagctagcagaaggcaagaaataactaatatcagagcagaactgaaggaaatagagacaaaaaaacccttcaaaaaattaatgaatccaggagctgaaatacaaactaccatcagggaatactacaaacacctctatgcaaataaactagaaaatctagaagaaatggataaattcctggacacatacactctcccaagactaaaccaggaagaagttgaatccctgaatagaccaataacaggctctgaaattgtggcaataatcaatagcttaccaaccaaaaagattccaggaccagatggattcacagccgaattctaccagaggtacaaggaggaactggtaccattccttctgaaactattccaatcaatagaaaaagagggaatcctccctaactcattttatgaggccagcatcattctgataccaaagccaggcagagacacaacaaaaaaagagaattttagaccaatatccttgatgaacattgatgcaaaaatcctcaataaaatactagcaaaacgaatccagcagcacatcaaaaagcttatcccccatgatcaagtgggcttcatccctgggatgcaaggctggttcaatatacgcaaatcaataaatgtaatccagcatataaacagagcaaaagacaaaaaccacatgattatctcaatagatgcagaaaaagcctttgacaaaattcaacaacccttcatgctaaaaactctcaataaattaggtattgatgggacgtatttcaaaataataagagctatctatgacaaacccacagccaatatcatactgaatgggcaaaaactggaagcattccctttgaaaactggcacaagacagggatgccctctctcaccactcctattcaacatagtgttggaagttctggccagggcaattaggcaggagaaggaaataaagggtattcaattaggaaaagaggaagtcaaattgtccctgtttgcagatgacatgattatatatctagaaaaccccattgtctcagcccaaaatctccttaagctgataagcaacttcagcaaagtctcaggatacaaaatcaatgtacaaaaatcacaagcattcttatacaccaataacagacaaacagagagccaaatcatgagtgaactcccattcccaattgcttcaaagagaataaaatacctaggaatccaacttacaagggatgtgaaggacctcttcaaggagaactacaaaccactgctccaggaaataaaagaggatacaaacaaatggaagaacattccatgctcatgggtaggaagaatcaatattgtgaaaatggccatactgcccaagggaatttacagattcaatgccatccccatcaagctaccaatgactttcttcacagaattggaaaaaactactttaaagttcatatggaactaa

SEQ ID NO: 6554 - DNA, 2406 bp, Homo sapiens
  SIMILAR (841)..(1782): 971254mologous to Homo sapiens putative p150,accession number U93563,Smith-Waterman Score=1639.
atggggaaaaaacagagcagaaaaactggaaactctaaaaagcagagcccctctcctcctccaaaggaacgcagttcctcaccagcaacggaacaaagctggacagagaatgactttgacgagctgagagaagaaggcttcagacgatcaaattaccccgagctacgggaggacattcaaaccaaaggcaaagaagaaatacaaactaccatcagagaatactacaaacacctctatgcaaataaactagaaaatctagaagaaatggataaattcctcaacacatacactctcccaagactaaaccaggaagaagttgaatctctgaatagaccaataacaggatctgaaattgtggcagtaatcaatagcttaccaaccaaaaagagtccaggaccagatggattcacagccgaattccaccagaggtacaaggtggaactggtaccattccttctgaaactattccaatcaatagaaaaagagggaatcctccctaactcattttatgaggccagcatcatcctgataccaaagccgggcagagacacaatcaaaaaagagaattttagaccaatatccttgacgaacattgatgcaaaaatcctcaataaaatactggcaaaccgaatccagcagcacatcaaaaagcttatccactatgatcaagtgggcttcatccctgggatgcaagactggttcaatatacgcaaatcaataaatgtaatccagcatataaacagaaccaaagtcaaaaaccacatgattatctcaatagatgcagaaaaagcctttgacaaaattcaacaacgcttcatgctaaaaactctcaataaattagcccaaaatctccttaagctgataagcaacttcagcaaagtctcaggatacaaaatcaatgtacaaaaatcacaagcattcttatacaccaacaacagacaaacagagagccaaatcatgagtgaactcccattcacaattgcttcaaagagaataaaatacctaggaatccaacttacaagggatgtgaaggacctcttcaaggagaactacaaaccactgctcaaggaaataaaagaggatacaaacaaatggaagaacattccatgctcatgggtaggaagactcaatatcgtgaaaatggccatactgcccaaggtaatttacagattcaatgccatccccatcaagctaccaatgactttcttcacagaattggaaaaaactactgtaaagttcatatggaaccaaaaaagagcctgcatcaccaagtcaatcctaagccaaaagaacaaagctggaggcatcacactacctgacttcaaactatactacaagtctacagtaaccaaaacagcatggtactggtaccaaaacagagatatagatcaatggaacagaacagagccctcagaaataatgccacatatctacaactatctgatctttgacaaacctgagaaaaacaagcaatggggaaaggattccctatttaataaatggtgctgggaaaactggctagccatatgtagaaagctgaaactggatcccttccttacaccttatacaaaaatcaattcaagatggattaaagacttaaacgttagacctaaaaccataaaaactctagaagaaaacctaggcattaccattcaggacataggcgtggacaaggacttcatgactaaaacaccaaaagcaatggcaacaaaacccaaaattgacaaatgggatctaattaaactaaagagcttctgcacagcaaaagaaactaccatcagagccttcgatgaattggacgatgtccacccacatgaggaaattgaggcttgcagagtatggcagaactatggtactcaccctcctgttccttcacagttaccaactggtgatggccaatgggctgtgagtgcaagatttatcattcatcttcaggccaagatgaagtgtgttaagtctgaatgcaaaggacaaaataacttgaatctgaacaattgtggaagagaactgatagcaattaaattggcaactgcccatggacttgacctgaatacaataactaaagaagggcatcattctgaaacgaatgctggaattcctggtccatacttcccgagacccaaaccacagggtgtccaaaggacagctgttgtgggggtgaactggggtcctctctttcatgcaaatcttcatggcatgggacagctggatggaaacagaagagtggctctcaagggccaattaccccccatgccaccaccttccaggacacaaagccaagagtctgagaattctaaatccaaacttgacctttcagattgttacaacattatatttgtcaaagtcttattaggagccagagctcctgaggcccaggcctggcagcagcatggagctgtcatgtag

SEQ ID NO: 6555 - DNA, 2853 bp, Homo sapiens
  SIMILAR (1566)..(22): 961254mologous to Homo sapiens putative p150,accession number U93572,Smith-Waterman Score=2511.
ttaaagtagttttttccaattcttgggcagtatggccattttcatgatattgattcttcctacccatgagcatggaatgttcttccatttgtttgtatcctcttttatttccttgagcagtggtttgtagttctccttgaagaggtccttcacatcccttgtaagttggattcctaggtattttattctctttgaagcaattgtgaatgggagttcactcatgatttggctctctgtttgtctgttgttggtgtataagaatgcttgtgacttttgtacattgattttgtaacctgagactttgctgaagttgcttatcagcttaaggagattttgggctgagacgatggggttttctagatatacaatcatgtcgtctgcaaacagggacaatttgactccctcttttcctaattgaataccctttatttccttctcctgcctaattgccctggccagaacttccaacactatgttgaataggagtggtgagagaggacatccctgtcttgtgccagttttcaaagggaatgcttccagtttttgcccattcagtatgatattggctgtgagtttgtcatagatagctcttattattttgaaatacgtcccatcaatacctaatttattgagagtttttagcatgaagggttgttgaattttgtcaaaggctttttctgcatctattgagataatcatgtggtttttgtctttggctctgtttataggctggattacatttattgatttgcgtatattgaaccagccttgtatcccagggatgaagcccacttgatcgtggtggataagctttttgatgtgctgctggattcgttttgccagtattttattgagggtttttgcatcaatgttcatcaaggatattggtctaaaattctcttttttggttgtgtctctgcctggctttggtatcagaatgatgctggcctcataaaatgagttagggaggagtccctctttttctattgattggaatactttcagaaggaatggtaccagttcctccttgtacctctggtagaattcagctgtgaatccatctggtcctggactctttttggttggtaagctattgattattgccacaatttcagatcctgttattggtctattcagagattcaacttcttcctggtttagtcttgggagagtgtatgtgtcgaggaatttatccacttcttctagattttctagtttatttgcgtagaggtgtttgtagtattctctgatggtagtttgtatttctgtgggatcggtggtgatatgccctttatcattttttattgcgtctattagattcttctctctttttttctttattagtcttgctagtggtctatcaattttgttgaccctttcaaaaaaccagctcctggattcattaattttttgaagggttttttgtgtctctatttccttcaattctgctctgattttagttatttcttgccttctgctagcttttgaatgtgtttgctcttgcttttctagttcttttaattgtgatgttagggtgccaattttggatctttcctgctttctctccatcaggtcatttaaggacttttctaccttggttattctagttagccattcatctaatcttttttcaaggtttttagcttctttgcaatggattcgaacttcctcctttagcttggagaagtttgattgtctgaagacttcttctctcaacttgtcaaaatcattctccatccagctttgttccattgctggtgaggatctgcattcctttggagggggagaggtgctctgatttttagaattttcagtttttctgctctgttttttccccatctttgtggttttatctacctttgggctttgatgctggtgacgtacagatggggttttggtgtggatgtcctttctgtttgttagttttccttcttttgctggatagcctggagtgagtgggtcaccagcaccattcaaatttaacacatttcctctctgggctgcagttccaggaagattccatcctttgggatatggctgtacctcaggagcaaagtagtcagctggatctgagtacaagatgattcctatggctcctgctaacatggcatttttaactttatttcctctgaagatttttccatatcttgcaataacaatcttcccagtacagttgatgcccatctctctttctagtttgaaaaagtcttcagtgcgagcatagttcacatatacaagatctccctctggcatgccttgggctgagaaagcattatatggtggcacaatatttgtaacattctcatagccatctggtggtggttcaaggtatgatgttttgaaaatctcagtttcatgttcatccacaatcgatatatagttggcatttgtctcattggggtaagataagaggacatcataatgaaccaacttggctgaatctagtccaaatttcttccactgggtttggattttcttggcaagcaagaaattttgttctgttcctgccagatgaggaagctttgtaaaagaactctctatattggtgagttctgcatccatgtattcaaccaactcagcccattctgtggaacccagaagtccaaattcttctgcatcccagctggcaaaaatgatagttcttctaggtctccagcctttactcatcagttttccaaaactccgggcaatttcttgcaaaacagcaaccccactggttgggtcaatagctccaaatacccaggagtcccggtgacctcccagaataacatacctgtcaggttccacagatcctctgatagttccaactacattgtaaatccttgtaattttattgatgttataaacatgcat

SEQ ID NO: 6556 - DNA, 2205 bp, Homo sapiens
  SIMILAR (2181)..(2201): 1001254mologous to Homo sapiens putative p150,accession number U93574,Smith-Waterman Score=44.
atgattatctcaatagatgcagaaaaagcctttgacaaaattcaacaacccttcatgctaaaaactctcaataaattaggtatcgatgggacttatctcaaaataataagagctatctatgacaaacccacagccaatatcatactgaatggacaaaaattggaagcattccctttgaaacctggcacaagacagggatgccctctctcaccactcctattcaacatagtgttggaagttctggccagggcaattaggcaggagaaggaaataaagggtattcaattaggaaaagaggaagtcaaattgtccctgtttgcagatgacatgattgtatatctagaaaaccccatcgtctcagcccaaaatctccttaagctgataagcaacttcagcaaagtctcaggatacaaaatcaatgtgcaaaaatcacaagcattcttatacaccaataacagacaaacagagagccaaatcatgagtgaactcccattcacaattgcttcaaagagaataaaatacctaggaatccaacttacaagggatgtgaaggacctcttcaagaactacaaaccactgctcaatgaaataaaagaggatacaaacaaatggaagaacattccatgctcatgggtaggaagaatcagtatcgtgaaaatggccatactgcccaagcctctgctgctgatacccaggaaaacagggtccggagtggacctccagcaaactccaacagacctgcagttgagggtcctgactgttagaaggaaaactaacaaacagaaaggacatccacaccaaaaccccatctgtatgtcaccatcatcaaagaccaaagaactagagaagcaagagcaaacacattcaaaagccagcaggaggcaagaaataactaagatcagagcagaactgaaggagatagagacacaaaaaacccttcaaaaaatcaatgactccaggagctggttttctgaaaagatcgacaaaattcatagactgcgagcaagactaataaagaagaaaagagggaagaatcaaatagatgcaataaaagatgataaaggtgatatcaccactgatcccacagaaatacaaactaccatcagagaatactataaacacctctatgcaaataaactagaaaatctagaagaaatggataaattcctggacacatacaccctcccaagactaaaccaggaagaagttgaatctcttaatagaccaataacaggctctgaaattgaggcaataattaatagcttaccaaccaaaaaaggtccaggaccagacagattcacagctgaattctatcagaggtacaaggaggagctgagaataaaatacctaggaatccaacttacaagggatgtgaaggacctcttcaaggagaacaacaaaccactgctcaacaaaataaaaagaggatacaaacaaaaggaagaacattccatgcttatgggtaggaagaatcaatatcgtgaaaatggccatactgcccaagaattggaaaaaactactttaaagttcatatggaaccaaaaaagagcctgcattgccaagtcaaccctaagccaaaagaacaaagctgaaggcatcatgctacctgacttcaaactatactacaatgctacagtaaccaaaacagcatggtactggtaccaaaacagagatatagaccaatggaacagaacagagccctcagaaataatgccgcatatctacaaccatctgatctttgacaaagctgacaaaaacaagaaatggggaaatgattccctctttactaaatggtgctgggaaaactggctagccatatgtagaaagctgaaactggatcccttccttataccttatacaaaaattaattcaagatggattaaagacatacatgttagacctaaaaccataaaaaccctagaagaaaacctaggcaataccattcaggatacaggcatgggcaaggacttcatgtccaaaacacaaaaagcaatggcaacaaaagccaaaattgacaaatgggatctaattcaactaaagagcttctgcacagcaaaagaaactaccatcagagtgaacaggcaacctacagtatgggagaaaatttttgcaatctactcatctgacaaagggctaatatccagaatctacaatgaactcaaacaaatttatgagaaaaaaacaaccccatcaaaaagtgggtga

SEQ ID NO: 6557 - DNA, 2325 bp, Homo sapiens
  SIMILAR (352)..(2322): 931254mologous to Homo sapiens putative p150,accession number U93563,Smith-Waterman Score=3145.
atggaagatgaaatgaatgaaatgaaacaagaagggaagtttagagaaaaaagaataaaaggaaacgaacaaagcctccaagaaatatgggactatgtgaaaagaccaaatctacgtctgattggtgtacctgaaagtgacagggagaatggaaccaagttggaaaacactctgcaggatattttccaggagagcttccccaatctagcaaggcaggccaacattcagattccagaaatacacagaatgccacaaagatactcctcgagaagagcaactccaagacacataattgtcagattcaccaaagttgaaatgaaggaaaacatgttaagggcagccagagagaaagcaccacaccacacctattccaaaattgaccacatactgggaagtaaagctctcctcagcaaatgtaaaagaacagaaattataacaaactgtctctcagaccacagtgcaatcaaactagacctcaggattaagaaactcactcaaaaccgctcaactacatggaaactgaacaacctgctcctgaatgactactgggtacataacgaaatgaaggcagaaataaagatgttctttgaaaccaacgagaacaaagacacaacataccagaatctctgggacacattcaaagcagtgtgtagagggaaatttatagcactaaatgcccacaagagaaagcaggaaagatccaaaattgataccctaacatcacaattaaaagaactagaaaagcaagagcaaacacattcaaaagctagcagaaggcaagaaataactaagatcagagcacaactgaagaaaatggagacacagaaaacccttcaaaaaattaatgaatccaggagctggttttttgaaacgatcaacaaaattgatagaccgctagcaagactaataaagaagaaaagagagaagaatcaaatagatgcaataaaaaatgataaaggggatatcaccaccgatcccacagaaatacaaactaccatcagagaatactacaaacacctctatgcaaataaactagaaaatctacaagaaatggataaattcctcgacacatacactcttccaagactaaaccaggaagaagttgaatctctgaatagaccaaaaacaggctctgaaattgtggcaataatcaatagcttaccaaccaaaaagagtccaggactagatggattcacagccgaattctaccagatgtacaaggaggaactggtactattccttctgaaactattccaatcaacagaaaaagagggaatcctccctaactcattttatgaggccagcatcatcctgacaccaaagcctggcagagacacaacaaaaaaagagaattttagaccaatatccttgatgaacattgatacaaaaatcctcaataaaatactggcaaaccgaatccagcagcacatcaaaaaccttatccaccatgatcaagtgggcttcacccccgggatgcaagtctggttcaatatatgcaaatcaataaatgtaatccagcatataaacagaaccaaagacaaaaaccacatgattatctcaatagatgcagaaaaggcctttgacaaaattcaacaacgcttcatgctaaaaactctcaataaattaggtattgatgggacttatctcaaaataataagagctatctatgaaaaacccacagccaatatcatactgaatgggcaaaaactggaagcattccctttgaaaactggcacaagacagggatgccctctctcaccactcctattcgacatagtgttggaagttctggccagggcaattaggcaggagaaggaaataaaggatattcaattaggaaaagaggaagtcaaattgttcctgtttgcagatgacatgattgtgtatctagaaaaccccattgtctcagcccaaaatctccttaagctgataagcaacttcagcaaagtctcaggatacaaaatcaacgtacaaaaatcacaagcattcttctacagcaataatagacaaacagagagccaaatcatgagtgaactcccattcacaattgcttcaaagagaataaaatacctaggaatccaacttacaagggatgcaaaggacctcttcaaggagaactacaaaccactgctcaataaaataaaagaggatacaaagaaatggaagaacattccatgctcatgggtaggaagaatcagtatcatgaaaatggccatactgcccaagataatttatagattcaatgccatccccatcaagctaccaatgcctttcttcacagaattggaaaaaactactttaaagttcatatggaaccaaagatga

SEQ ID NO: 6558 - DNA, 2880 bp, Homo sapiens; identical to SEQ ID NO: 2290
  SIMILAR (517)..(2844): 941254mologous to Homo sapiens unknown,accession number AF148856,Smith-Waterman Score=3821.

SEQ ID NO: 6559 - DNA, 2229 bp, Homo sapiens
  SIMILAR (490)..(2226): 861254mologous to Homo sapiens putative p150,accession number U93565,Smith-Waterman Score=2720.
atggataaattcctcaacacatacactctcccaagactaaaccaggaagaagttgaatctctgaatagaccaataacaggatctgaaattgtggcaataatcaatagcttacaaaccaaaaagagtccaggaccagatggattcacagccgaattctaccagaggtacaaggaggaactggtaccattccttctgaaactattccaatcaatagaaaaagagggaatcctccctaactcattttatgaggccagcatcattctgataccaaagccaggcagagacacaacaaaaaaagagaattttagaccaatatccttgatgaacattgatgcaaaaatcctcaataaaatactaggaaaacgaatccagcagcacatcaaaaagcttatccaccatgatcaagtgggcttcatccctgggatgcaaggctggttcaatatacgcaaatcaatgaatgtaatccagcatataaacagagccaaagacaaaaaccacatgattatctcaatagatgcagaaaaagcctttgacaaaattcaacaacccttcatgctaaaaactctcaataaattaggaattgatgggacgtatttaaaaataataagagctatctatgacaaacccacagccaatatcatactgaatgggcaaaaactggaagtattccctttgaaaactggcacaagacagagaataaaacacctaggaatccaacttacaagggatgtgaaggacctcttcaaggagaactacaaaccactgctcaatgaaataaaagaggatacaaacaaatggaagaacattccatgctcatgggtaggaagaatcaatatcgtgaaaatggccatactgcccaaggtaatttacagattcaatgccatccccatcaagctaccaatgactttcttcacagaattggaaaaaactactataaagttcatatggaaccaaaaaagagcccgcattgccaagtcaatcctaagccaaaagaacaaagctggaggcatcacactacctgacttcaaactatactacaaggctacagtaaccaaaacagcatggtactggtaccaaaacagagatatagatcaatggaatagaacagagccttcagaaataatgccacatatctacaactatctgatctttgacaaacctgagaaaaacaagcaatggggaaaggattccctatttaataaatggtgctgggaaaactggctagccatatgtagaaagctgaaactggatcccttccttacaccttatacaaaaatcaattcaagatggattaaagatttaaacgttagacctaaaaccataaaaaccctagaagaaaacctaggcattaccattcaggacataggcatgggcaaggacttcatgtctaaaacaccaaaagcaatggcaacaaaagacaaaattgacaaatgggatctaattaaaataaagagcttctgcacagcaaaagaaactaccatcagagtgaacaggcaacctacaaaatgggagaaaatttttgcaacctactcatctgacaaagggctgatatccagaatctatgatgaactcaaacaaatttacaagaaaaaaacaaacaaccccatcaaaaagtgggcgaaggacatgaacagacacttctcaaaagaagacatttatgcagccaaaaaacacatgaaaaaatgctcatcatcactggccatcagagaaatgcaaatcaaaaccactatgagataccatctcacaccagttagaatggcaatcattaaaaagtcaggaaacaacaggtgctggagaggatgtggacaaataggaacacttttacactgttggtgggactgtaaactagttcaaccattgtggaagtcagtgtggcaattcctcagggatctagaactggaaataccatttgacccagccatcccattactgggtatttacccaaaggactataaatcatgctgctataaagacacatgcacacgtatgtttattgcggcattattcacaatagcacagacttggaaccaacccaaatgtccaccaatgatagactggattaagaaaatgtggcacatatactccatggaatactatgcagccataaaaaatgatgagttcacgtcctttgtaggcacatggatgaaattggaaatcatcattctcagtaaactatcacaagaacaaaaaaccaaacaccgcatattctcactcataggtgggaactga

SEQ ID NO: 6560 - DNA, 2232 bp, Homo sapiens; identical to SEQ ID NO: 2163
  SIMILAR (1964)..(2035): 881254mologous to Homo sapiens putative p150,accession number U93572,Smith-Waterman Score=105.

SEQ ID NO: 6561 - DNA, 5175 bp, Homo sapiens; identical to SEQ ID NO: 3982
  SIMILAR (1)..(3096): 971254mologous to Homo sapiens unknown,accession number AF149422,Smith-Waterman Score=5241.

SEQ ID NO: 6562 - DNA, 2872 bp, Homo sapiens
  SIMILAR (1565)..(2869): 961254mologous to Homo sapiens putative p150,accession number U93563,Smith-Waterman Score=2325.
atgaaggcagaaataaaggtgttctttgaaaccaacgagaacaaagacacaacataccagaatctctgggacacattcaaagcagtgtgtagagggaaatttatagcactaaatgcccacaagagaaagcaggaaagatccaaaattgacaccctaacatcacaattaaaagaactagaaaagcaagagcaaacacattcaaaagctagcagaaggcaagaaataactaaaatcagagcagaactgaaggaaatacagacacaaaaaacccttcaaaaaatcaatgaatccaggagctggttttttgaaaggatcaacaaaattgatagatcgctagcaagactaataaagaaaaaaagagagaagaatcaaatagacacaataaaaaatgataaaggggatatcaccaccgatcccacagaaatacaaactaccatcagagaatactacaaacacctctatgcaaataaactagaaaatctagaagaaatggataaattcctcgacacatacactctcccaagactaaaccaggaagaagttgaatctctgaatagaccaataacaggagctgaaattgtggcaataatcaatagtttaccaaccaaaaagagtccaggaccagatggattcacagccgaattctaccagagctgggcagagacacaaccaaaaaaagagaattttagaccaatatccttgatgaacattgatgcaaaaatcctcaataaaatactggcaaaacgaatccagcagcacatcaaaaagcttatccaccatgatcaagtgggcttcatccctgggatgcaaggctggttcaatatacgcaaatcaataaatgtaacacagcatataaacagagccaaagacaaaaaccacatgattatctcaatagatgcagaaaaagcctttgacaaaattcaacaacccttcatgctaaaaactctcaataaattaggtattgatgggacgtatttcaaaataataagagctatctatgacaaccccacagccaatatcatactgaatgggcaaaaactggaagcattccctttgaaaactggcacaagacagggatgccctctctcaccactcctattcaacatagtgttggaagttctggccagggcaattaggcaggagaaggaaataaagggtattcaattaggaaaagaggaagtcaaattgtccctgtttgcagacaacatgattgtatatctagaaaaccccattgtctcagcccaaaatctccttaagctgataagcaacttcagcaaagtctcaggatacaaaatcaatgtacaaaaatcacaagcattcttatacaccaacaacagacaaacagagagccaaatcatgagtcaactcccattcacaattgcttcaaagagaataaaatacctaggaatccaacttacaagggatgtgaaggacctcttcaaggagaactacaaaccactgctcaaggaaataaaagaggatacaaacaaatggaaaaacattccatgctcagggggaaggaagaatcaatatcgtgaaaatggccatactgcccaagaattggaaaaaaactactttaaagttcatatggaatcaaaaaagagcctgcatcaccaagtcaatcctaagccaaaagaacaaagctggaggcatcacactacctgacttcaaactatactacaaggctacagtaaccaaaacagcatggtactggtaccaaaacagagatatagatcaatggaacagaacagagccctcagaaataacgccacatatctacaactatctgatctttgacaaacctgagaaaaacaagcaatggggaaaggattccctatttaataaatggtgctgggaaaactggctagccatatgtagaaagctgaaactggatcccttccttacaccttatacaaaaatcaattcaagatggattaaagacttaaacattagacctaaaaccataaaaaccctagaagaaaacctaggcattatcattcaggacataggcatgggcaaggacttcatgtctaaaacaccaaaagcaatggcaacaaaagccaaaatagacaaatgggatctaattaaactaaagagcttctgcacagcaaaagaaactaccatcagagtgaacaggcaacctacaaaatgggagaaaattttcgcaacctgctcatctgacaaagggctaatatccagaatctacaatgaactcaaacaaatttacaagaaaaaaacaaacaaccccatcaaaaagtgggcaaaggacatgaacagacacttctcaaaagaagacatttatgcagccaaaaaacacatgaaaaaatgctcatcatcactggccagcagagaaatgcaaatcaaaaccacaatgagataccatctcacaccagttagaatggcaatcattaaaaagtcaggaaacaacaggtgctggagaggatgtggagaaataggaacacttttacactgttggtgggactgtaaactagttcaaccattgtggaagtcagtgtggcgattcctcagggatctagaactggaaataccatttgacccagccatcccattactgggtatatacccaaatgactataaatcatgctgctataaagacacatgcacacgtatgtttattgcggcattattcacaatagcaaagacttggaaccaacccaaatgtccaacaattatagactggattaagaaaatgtggcacatatacaccatggaatactatgcagccataaaaaatgatgagttcgtgtcctttgtagggacatggatgaaattggaaatcatcattctcagtaaactatcacaagaacaaaaaaccacacaccgcatattctcactcataggtgggaattga

SEQ ID NO: 6563 - DNA, 2241 bp, Homo sapiens; identical to SEQ ID NO: 2293
  SIMILAR (865)..(2085): 961254mologous to Homo sapiens unknown protein,accession number M22333,Smith-Waterman Score=2000.

SEQ ID NO: 6564 - DNA, 3104 bp, Homo sapiens
  SIMILAR (275)..(1183): 941254mologous to Homo sapiens putative p150,accession number U93569,Smith-Waterman Score=1491.
atggtaaaggaatcaattcaacaagaggagctaactatcctaaatatttatgcacccaatacaggagcacccagattcataaagcaagtcctgagtgacctacaaagagacttagactcccacacattaataatgggagactttaacaccccactgtcaacattagacagagcaacgagacagaaagtcaacaaggatacccaggaattgaactcagctctgcaccaagcggacctaatagacctaatagacctaatctacagaactctccaccccaaatcaacagcaatatacatttttttcagcaccacaccacacctattccaaaattgacaacatacttggaagtaaagctctcctcagcaaatgtaaaagaacagaaattataacaaactatctctcagaccacagtgcaatcaaactagaactcaggattaagaatctcactcaaaaccgctcaactacatggaaactgaacaacctgctcctgaatgactactgggtacataacaaaatgaaggcagaaataaagatgttctttgaaaccaacgagaacaaagacacaacataccagaatctctgggatgcattcaaagcagtgtgtagagggaaatttatagcactaaatgcccacaggagaaagcaggaaagatccaaaattgacaccctaacatcacaattaaaagaactagaaaagcaagagcaaacacattcaaaagctagcaggaggcaagaaataactaaaatcagagcagaactgaaggaaatagagacacaaaaaacccttcaaaaaattaatgaatccaggagctggttttttgaaaggatcaacaaaatagatagaccgctagcaagactaataaagaaaaaaagagagaagaatcaaatagacacaataaaaaatgataaaggggatatcaccaccgatcccacagaaatacaaactaccatcagagaatactacaaacacctctatgcaaataaactagaaaatctagaagaaatggataaattcctcgacacatactctattccaagactaaaccaggaagaagttgaatctctatatagaccaataacaggagctgaaattgtggcaataatcaatagcttaccaaccaaaaagggtccaggaccagatgaattcacagccgaattctaccagaggtacaaggaggaactgccgggcagagacacaacaaaaaaaagagaattttagaccaatatccttgatgaacattgatgcaaaaatcctcaataaaatactggcaaaccgaatccagcagcacatcaaaaagcttatccaccatgatcaagtgggcttcatccctgggatgcaaggctggttgaatatatgcaaatcaataaatgtaatccagcatataaacagagccaaagacaaaaaccacatgattatctcaatagatgcagaaaaagcctttgacaaaattcaacaacccttcatgctaaaaactctcaataaattaggtattgatgggatgtatttcaaaataataagagctatctatgacaaacccacagccaatatcatactgaatgggcaaaaactggaagcattccctttggaaactggcacaagacagggatgccctctctcaccactcctattcaacatagtgttggaagttctggccagggcaattaggcaggagaaggaaataaagggtattcaattaggaaaagaggaagtcaaattgtccctgtttgcagatgacatgattgtatatctagaaaaccccattgtctcagcccaaaatctccttaagctgataagcaacttcagcaaagtctcaggatacaaaatcaatgtgcaaaaatcacaagcattcttatacaccaacaacagacaaacagagagacaaatcatgagtgaactcccattcacaattgcttcaaagagaataaaatacctaggaatccaacttacaagggatgtgaaggacctcttcaaggagaactacaaaccgctgctccaggaaataaaagaggatacaagcaaatggaagaacgttccatgctcatgggtaggaagaatcaatatcgtgaaaatggccatactgcccaaggtaatttacagattcaatgccatcccgatcaagctaccaatgcctttcttcacagaattggaaaaaactattttaaagttcatatgggaccaaaaaagagcccgcatcgccaagtcaatcctaaggcaaaagaacaaagctggaggcatcacactacctgacttcaaactatactacaaggctacagtaaccaaaacagcatggtactggtaccaaaacagagatatagatcaatgcaacagaacagagccctcagaaataacgccgcatatctacaactatctgatctttgacaaacctgagaaaaacaagcaatggggaaaggattccctatttaataaatggtgctgggaaaactggctagccatatgtagaaagctgaaactggatccctttcttacaccttatacaaaaatcaattcaagatggattaaagacttaaatattagacctaaaaccataaaaaccctagaagaaaacctaggcattaccattcaggacataggcatgggcaaggacttcatgtccaaaacaccaaaagcaatggcaacaaacgccaaaattgacaaatgggatctaattaaactaaagagcttccgcacagcaaaagaaactaccatcagagtgaacaggcaacctacaaaatggcagaaaattttcgcaacctactcatctgacaaagggctaatgtccagaatctacaatgaactcaaacaaatttacaagaaaaaaacaaacaaccccatcaaaaagtgggcggaggacatgaacagacacttctcaaaagaagacatttatgcagccaaaaaacacatgaaaaaatgctcatcatcactggccatcagagaaatgcaaatcaaaaccacaatgagataccatctcacaccagttagaatggcaatcattaaaaagtcaggaaacaacagactaaccctcttgaataaccataataatcctcaacctttgataagcatcaaggaaccaagggagaaagaagaattaaacctacaagtataa

SEQ ID NO: 6565 - DNA, 3288 bp, Homo sapiens
  SIMILAR (642)..(4): 661254mologous to Homo sapiens putative p150,accession number U93572,Smith-Waterman Score=794.
ttattttgatgtgcagaaggctttcagtttaattaagtcccatctatttatctttgttgtgtttgcttttgggttcttgattgtgaagtctttgcctaagccaatgtctagaagtgtttttccaatcttatcttctagaatttttatggtttcaggtcttagatttaagtctgtgaaccatcttgagttgatttgtttataaggtgagagatgaggatccagttgcattcttctacatgtggcttgccaattataccagcaccatttgttgaatagggtgtcctttccccactttatgtttttgcttgctttgtcaaagatcagttggctgaaagtatttggctttatttctgggttctctattctattccattggtctatatgcctatttttataccagtaccatgctgttttggtgactatggccttatagtatagtttgaagtcgagtaatgtgatgcctctagatttattctttttgcttagtcttgctttggctgtgtgggctcttttttggttccatgtgaattttagccttgttttttctagttctgtgaagaatgatggtggtattttgatgggaattgcattgaatttgtaggttgcttttggcagtatggtcgttttcacactgttgactctatcattcatggtgaacagcagggggtgtgggtaggacccatgggagacagacttgtttcttctttgtggtcgactgcagcttgttggaggtgtggataaagcactggggtctttgctccattttgtattctcaccaacaatgcataagagtgcctctctcggtgttttagacatgaagtccttgcccatgcctgtgtcctgaatggtaaagcctaggttttcttccagggtttttatggttttaggtctaacgtttaagtctttaatccatcttgaattgatttttgtataaggtgtaaggaagggatccagtttcagctttctacatatggctagccagttttcccagcaccatttattaaatagggaatcctttccccattgcttgtttttctcaggtttgtcaaagatcagatagttgtagatatgcggcattatttctgagggctctgttctgttccattgatctatatctctgttttggtaccagtaccatgctgttttggttactgtagccttgtcgtatagtttgaagtcaggtagcgtgatgcctccagctttgttcttttggcttaggattgacttggcgatgcaggctcttttttggttccatatgaactttaaagtagttttttccaattctgtgaagaaagtcattggtagcttgatggggatggcattgaatctgtaaattaccttgggcagtatggccattttcacaatattgattcttcctacccatgagcatggaatgttcttccatttatttgtatcctcttttatttccttgagcagtgatttgtagttctccttgaagaggtccttcacatcccttgtaagttggattcctaggtattttattctctttgaagcaattgtgaatgggagttcactcatgatttggctctctgtttgtctgttgttggtgtataagaatgcttgtgatttttgtacatttattttgtatcctgagactttgctgaagttgcttatcagcttaagaagattttgggctgagacaatggggttttctagatatacaatcatgtcgtctgcaaacagggacaatttgacttcctcttttcctaattgaataccctttatttccttctcctgcctagttgccctgggcagaacttccaacactatgttgaataggagtggtgagagagggcatccctgtcttgtgccagttttcaaagggaatgcttccagtttttgcccattcagtatgatattggctgtgggcttgtcatagacaggtcttattattttgaaatacgtcccatcaatacctaatttattgagagtttttagcatgaagcgttgttgaattttgtcaaaggctttttctgcatctattgagataatcatgtggtttttgtctttggctctgtttatatgctggattacatttattgatttgcatatattgaaccagccttgcatcccagggatgaagcccacttgatcttggtggataagctttttgatgtgctgctggattcgttttgccagtattttattgaggatttttgcatcaatgttcatcaaggatattggtctaaaattctctttttttgttgtgtctctgcctggctttggtatcagaatgatgctggcctcataaaatgagttagggaggattccctctttttgtattgattggaatagtttcagaaggaatggtaccagttcctccttgtacctctggtagaattcggctgtgaatccatctggtcctggactctttttggttggtaagctattgattattgccacaatttcagcttctgttattggtctattcagagattcaacttcttcctggtttagtcttgggagagtgtatgtgtccaggaatttatccatttcttctagattttctagtttatttgcatagaggtgtttgtagtattctctgatggtagtttgtatttcactgttagcaatgaccataatatctagcctgtaggtatctgtacaggcaagtttgattaccctaggaaggtcacaataaaaactatcgacctcattgggaccacagaagggtaagtgcacggcaaaggccaactggctcaccgaatggagaaagccaattccccatgcgacagccataatgccgacacatgcgttgccacacataattgtagtgtagtgtaggggtttgcatattgctatatatctgtcaaagcccatggctatgaggatcaccatctcactcccaccaaagaagtgaaggagaaatatctgaacaaggcagcccttgaaagagatgactttgcgctggctgaaaaagtcagtaatcatcttgggggctgtgactgaagacagagacagatcaatgagtgagaggttggctagcaggaagtacatgggagagtgaaggtgggagtcagataccactgttatgacaataagaaggtttccaaacacgattcctccatagaatacaaaaaacaacataaataggaaggtctggagttcctgagaatcagagagacccagaaaaatgaattcagtcaccatagagttattcgtttcactcgttgattcattccaggaaatagcctctgcagttaccagagagtcatttacttggtccactgaatcagatagaagggaagactgtgaagcaaccttcat

SEQ ID NO: 6566 - DNA, 3266 bp, Homo sapiens
  SIMILAR (2597)..(3130): 471254mologous to Mus musculus reverse transcriptase,accession number U15647,Smith-Waterman Score=474.
atgaataattcaatcaaggaaaaagtgaaactcagtttaactaaatgggaaatgcaaacaaaacctaacaataatactgttgatcttaaagatgcccaagaggtcaatctcacaagcacggattacagaaagcaacatgtcatgctgcctaccgaaatcaattcagacgactctcttttaaaaattggggttattagactggcaaattggataaagagtcaagacccatcagtgtgctgtaatcaggaaacccatctcacgtgcagagacacacataggctcaaaataaaaggatggaggaagatctaccaagcaaatggaaaacaaaaaaaggcaggggttgcaatcctagtctccgataaaacagacttcaaaccaacaaagatcaaaagagacaaagaaggccattacataatggtaaagggatcaattcaacaagaagagctaactatcctaaatacatatgcacccaatacaggagcacccagattcataaagcaagtcctgagtgacctacaaagagacttagactcctacacattaataatgggagactttaacaccccactgtcaacattagacagatcaacgagacagaaagtcaacaaggatacccaggaattgaactcagctctgcaccaagtggacctaatagacatctacagaactctccaccccaagtcaacagaatatacatttttttcagcaccacaccacacctattccaaaattgaccacatacttggaagtaaagctctcctcagcaaatgtaaaagaacagaaattataacaaactatctctcagaccacagtgcaatcaaactagaactcaggattaagaatctcattcaaaaacgctcaactacatggaaactgaacaaactgctcctgaacgactactgggtacataacgaactgaaggcagaaataaagatgttctttgaaaccaacgagaacaaagacacaacataccagaatctctgggacgcattcaaagcagtgtgtagagggaaatttatagcactaaacgcccacaagagaaagcaggaaagatccaaaattgacaccctaacattacaattaaaagcactagaaaagcaagagcaaacacattcaaaagctagcagaaggcaagaaataactaaaatcagagcagaactgaaggaaatagagacacaaaaaacccttcaaaaaattaatgaatccaggagctggttttttgaaaggatcaacaaaattgataaaccgctagcaagactaataaagaaaaaaagagagaagaatcaaatagacacaataaaaaatgatagaggggatatcaccaccgatcccacagaaatacagactaccatcagagaatactacaaacacctctatgcaaataaactagaaaatctagaagaaatggataaattcctcgacacatacactctcccaagactaaaccaggaagaagttgaatctctgaatagaccaataacaggatctgaaattgtggcaataatcaatagcttaccaacgaaaaagagtccaggaccagatggattcacagccgaattctaccagaggtacaagcaggaactgcatataaacagaaccaaagacaaaaaccacatgattatctcaatagatgcagaaaaggcctttgacaaaattcaacaacgcttcatgctaaaaactctcaataaattaggtattgatggggcgtatttcaaaataataagacctatctatgacaaacccacagccaatatcatactgaatgggcaaaaactggaagcattccctttgaaaactggcacaagacagggatgccctctctcaccactcctattcaacatagtgctggaagttctggccaaggcaattaggcaggagaaggaaataaagggtattcaattaggaaaagaggaagtcaaattgtccctgtttgcagacgacatgattgtatatctagaaaaccccattgtctcagcccaaaatctccttaagctgataagcaacttcagcaaagtctcaggatacaaaatcaatgtacaaaactcacaggcattcttatacaccaataacagacaaacagagagccaaatcatgagtgaactaccattcacagttgcttcaaagagaataaaatacctaggaatccaacttacaagggatgtgaaggacctcttcaaggagaactacaaaccactgctcaatgaaataaaagaggatacaaacaaatggaagaacgttccatgctcatgggtaggaagaatcaatatcgtgaaaatggccatactgcccaaggtaatttatagattcaatgccatccccatcaagctaccaatgactttcttcacagaattgggaaaaactactttaaagttcatatggaaccgaaaaagagcccacatcgccaagtcaatcctaagacaaaagaacaaagctggaggcatcacgctacctgacttcaaactatactacaaggctacagtaaccaaaacagcatggtactggtaccaaaacacagatatagatcaatggaacagaacagagccctcagaaataacgctgcatatctacaactatctgatctttgacaaacctgagaaaaacaagcaatggggaaaaggattccctatttaataaatggtgctgggaaaactggctagccatatgtagaaagctgaaactggatcccttccttacaccttatacaaaagttaattcaagatggattaaagacttacatattagacctaaaaccataaaaaccctagaagaaaacctaggcattaccattcaggacataggcatgggcaaggacttcatgtctaaaacaccaaaagcaatggcaaccaaagccaaaattgacaaatgggatctaattaaactaaagagcttctgcacagcaaaagaaaccaccatcagagtgaacaggcaacctacagaatgggaggaaatttttacaatctacccatctgacaaagggctaatatccagaatctacaaagagctcaaacaaatttacaagaaaaaaaacaaacaatcccatcagaaagtgggcgaaggacatgaacagacacttctcaaaagaagacatttatgcagccaacagacacgtgaaaaaaagctcaccatcactggtcatcagagaaatgcaaatcaaaatcacaatgagataccatctcacaccagttagaatggcaatcattaaaaagtcaggaaacaacaggtgctggagaggatgtggagaaataggaacacttttacactgttga

SEQ ID NO: 6567 - DNA, 8181 bp, Homo sapiens
  SIMILAR (3014)..(5245): 931254mologous to Homo sapiens putative p150,accession number U93572,Smith-Waterman Score=3604.
cctccggtctacagctcccagcgtgagcgacgcagaagacgggtgatttctgcatttccatctgaggtaccgggttcatctcactagggagtgccagacagtgggcgcaggccagtgggtgcgcgcaccgtgcggagccgaagcagggcgaggcattgcctcacctgggaagcgcaaggggtcagggagttccctttccgagtcaaagaaaggggtgacggacgcacctggaaaatcgggtcactcccacccgaatattgcgcttttcagaccggcttaaaaaacggcgcaccacgagactatatcccacacctggccttcggagggtcctacgcccacggaatctcgctgattgctagcacagcggtctgagatcaaactgcaaggccgcagcaaggctgggggaggggcgcccgccattgcccaggcttgcttaggtaaacaaagcagccggggaagctcgaactgggtgcagcccaccacagctcaaggaggcctgcctgcctctgtaggctccacctctgggggcagggcacagacaaacaaaaagacagcagtaacctctgcagacttaaatgtccctgtctgacagctttgaagagagcagtggttctcccagcacgcagctggagatctgagaacgggcagactgcctcctcaagtgggtccctgacccctgacccccgagcagcctaactgggaggcaccccccagcaggggcacactgacacctcacacggcagggtattccaacagacctgcagctgagggtcctgtctgttagaaggaaaactaacaaacagaaaggacatccacaccgaaaacgcatctgtacatcaccatcatcaaagaccaaaagtagataaaaccacaaagatggggaaaaaacagaacagaaaaactggaaactctaaaacgcagagcacctctcctcctccaaaggaacgcagttcctcaccagcaacggaccaaagctggatggagaatgattttgacgagctgagagaagaaggcttcagacgctcaaattactctgagctacgggaggacattcaaaccaaaggcaaagaagttgaaaactttgaaaaaaatttagaagaatgtataactagaataaccaatacagagaagtgcttaaaggagctgatggagctgaaaaccaaggctcgagaactacgtgaagaatgcagaagcctcaggagccaatgcgatcaactggaagaaagggtatcagcaatggaagatgaaatgaatgaaatgaagcaagaagggaagtttagagaaaaaagaataaaaagaaacgagcaaagcctccaagaaatatgggactatgtgaaaagaccaaatctacgtctgattggtgtacctgaaagtgatgcggagaatggaaccaagttggaaaacactctgcaggatattatccaggagactttccccaatctagcaaggcaggccaacgttcagattcaggaaatacagagaacgccacaaagatactcctcgagaagagcaactccaagacacataattgtcagattcaccaaagttgaaatgaaggaaaaaatgttaagggcagccagagagaaaggtcgagttaccctcaaagggaagcccatcagactaacagcggatctctcggcagaaaccctacaagccagaagagagtgggggccaatattgaacattcttaaagaaaagaattttcaacccagaatttcatatccagccaaactaagcttcataagtgaaggagaaataaaatactttacagacaagcaaatgctgaccgattttgtcaccagcaggcctgccctaaaagagctcctgaaggaagcgctaaacatggaaaggaacaaccggtaccagccactgcaaaatcatgccaaaatgtaaagaccatcgagactaggaagaaactgcatcaactaacgagcaaaatcaccagctaacatcataatgacaggatcaaattcacacataacaatattaactttaaatgtaaatggactaaattctccaattaaaagacacagactggcaagttggataaagagtcaagacccatcagtgtgctgtattcaggaaacccatctcatgtgcagagacacacataggctcaaaataaaaggatggaggaagatctaccaagcaaatggaaaacaaaaaaaggcaggggttgcaatcctagtctctgataaaacagactttaaaccaacaaagatcaaaagagacaaagaaggccattacatgatggtaaagggatcaattcaacaagaggagctaactatcctaaatatgtatgcacccaatacaggagcacccagattcataaagcaagtcctgagtgacctacaaagagacttagactcccacacattaataatgggagactttaacaccccactgtcaacattagacagatcaacgagacagaaagtcaacaaggatacccaggaattgaactcagctctgcaccaagcagacctaatagacatctacagaactctccaccccaaatcaacagaatatacatttttttcagcaccacaccacagctattccaaaattgaccacatacttggaagtgaagctctcctcagcaaatgtaaaagaacagaaattataacaaactatctctcagaccacagtgcaatcaaactagaactcaggattaagaatctcactcaaagccgctcaactacatggaaactgaacaacctgctcctgaatgactactgggtacataacgaaatgaaggcagaaataaagatgttctttgaaaccaacgagaacaaagacacaacataccagaatctctaggacgcattcaaagcagtgtgtagagggaaatttatagcactaaatgcccacaagagaaagcaggaaagatccaaaattgacaccctaacatcacaattaaaagaactagaaaagcaagagcaaacacattcaaaagctagcagaaggcaagaaataactaaaatcagagcagaactgaaggaaatagagacacaaaaaaacctttcaaaaaattaatgaatccaggagctggttttttgaaaggatcaacaaaattgatagaacgctagcaagactaataaagaaaaaaagagagaagaatcaaatagacacaataaaaaatgataaaggggatatcaccaccgatcccacagaaatacaaactaccatcagagaatactacaaacacctctacgcaaataaagtagaaaatctagaagaaatggatacattcctcgacacatacactctcccaagactaaaccaggaagaagttgaatctctgaatagaccaataacaggctctgaaattgtggcaataatcaatagtttaccaaccaaaaagagtccaggaccagatggattcacagccgaattctaccagaggtatgaggaggaactggtaccattccttctgaaactattccaatcaatagaaaaagagggaatcctccctaactcattttatgaggccagcatcattctgataccaaagccgggcagagacacaaccaaaaaagagaattttagaccaatatccttgatgaacattgatgcaaaaatcctcaataaaatactggcaaaccgaatccagcagcacatcaaaaagcttatccaccatgatcaagtgggcttcatccctgggatgcaaggctggttcaatatacacaaatcaataaatgtaatccagcatataaacagagccaaagacaaaaaccacatgattatctcaatagatgcagaaaaagcctttgacaaaattcaacaacccttcatgctaaaaactctcaataaattaggtattgatgggacgtatttcaaaataataagagctatctgtgacaaacccacagccaatatcatactgaatgggcaaaaactggaagcattccctttgaaaactggcacaagacagggatgccctctctcaccgctcctgttcaacatagtgttggaagttctggccagggcaatcaggcaggagaaggaaataaagggtattcaattaggaaaagaggaagtcaaattgtccctgtttgcagacgacatgattgtttatctagaaaaccccatcgtctcagcccaaaatctccttaagctgataagcaacttcagcaaagtctcaggatacaaaatcaatgtacaaaaatcacaagcattcttatacaccaacaacagacaaacagagagccaaatcatgagtgaactcccattcacaattgcttcaaagagaataaaatacctaggaatccaacttacaagggatgtgaaggacctcttcaaggagaactacaaaccactgctcaaggaaataaaagaggacacaaacaaatggaagaacattccatgctcatgggtaggaagaatcaatatcgtgaaaatggccatactgcccaaggtaatttacagattcaatgccatccccatcaagctaccaatgactttcttcacagaattggaaaaaactactttaaagttcatgtggaaccaaaaaagagcccgcatcaccaagtcaatcctaagccaaaagaacaaagctggaggcatcacactacctgacttcaaactatactacaaggctacagtaaccaaaacagcatggtaccggtaccaaaacagagatacagatcaacggaacagaacagagccctcagaaataacgccgcatacctacaactatctgatctttgacaaacctttgcttgagaaaaacaagcaatggggaaaggattccctatttaataaatggtgctgggaaaactggctagccatatgtagaaagctgaaactggatcccttccttacaccttatacaaaaatcaattcaagatggattaaagatttaaacattagacctaaaaccataaaaaccctagaagataacctaggcattaccattcaggacataggcatgggcaaggactttatgtccaaaacagcaaaagcaatggcaacaaaagccaaaattgacaaatgggatctaattaaactaaagagcttctgcacagcaaaagaaactaccatcagagtgaacaggcaacctacaacatgggagaaaattttcgcaacctactcatctgacaaagggctaatatccagaatctacaatgaactcaaacaaatttacaagaaaaaaaacaaacaaccccatcaaaaagtgggcgaaggacatgaacagacacttctcaaaagaagacatttatgcagtcaaaaaacacatgaaaaaaatgctcatcatcactggccatcagagaaatgcaaatcaaaaccacagtgagataccatctcacaccagttagaatggcaatcattaaaaagtcaggaaacaacaggagctggtattttgaaaagatcaacaaaattgatagactgctagcaagactaataaagaaaaaaagagagaagaatcaaatagacgcaataaaaaatgataaaggggatatcaccactgatcccacagaaatacaaactaccaccagagaatactataaacacctctatgcaaataaactagaaaatctagaagaaatggataaattcctcgacacatacaacctcccaagactaaagcaggaagaagttgaatctctgaatagaccaataagaggctctgaaattgtggcaataatcaatagcttaccaaccaaaaaaagtccaggaccagatggattcacagccgaattctaccacaggtacaaagaggagctggtaccattgcttctgaaactattccaatcaatagaaaaagaggtaatcctccctaactcattttatgaggccagcatcatcctgataccaaagcctgacagagacacagcaaaaaaagagaattttagaccaatatccttgatgaacatcgatgcaaaaatcctcaataaaatactggcaaaccgaatccagcagcacatcaaaaagcttatccaccatgatcaagtgggcttcatccctgggatgcaaggctggttcaacatacgcaaatcagtaaatgtaatccagcatataaacagaaccaaagacaaaaaccacatgatcatctcaatagatgcagaaaagtcctttgataaaattcaacaacacttcatgctaaaaactctcaataaattaggtattgatgggtcatatctcaaaataataagagctacctatgacaaacccacagccaatatcatactgaatgggcaaaaactggaagcattccctttgaaaactggcacaagacacggatgccccctctcaccactcctattcaacatagtgttggaagttctggccagagcaatcaggcaggagaaggaaataaagggtattcaattaggaaaagaggaagtcaaattgtccctgttcatagatgacatgattgtatatctagaaaaccccatcatctcagcccaaaatctccttaagctgatagacaatttcagcaaagtctcaggatacaaaatcaatgtgcaaaaatcacaagcattcttatacaccaataacagacaaacagagagccaaatcatgagtgaactcccattcacaattgcttcagagagaataaaatacctaggaatacaacttacaagggacgtgaaggacctcttcaaggagaactacaaaccactgctcaatgacataaaagaggatacaaacaaatggaagaacactccacgctcatgggtaggaagaatcaatatcatgaaaatggccatactgcccaaggtaatttatagattcaatgccatccccatcaagctaccaatgactttcttcacagaattggaaaaaactactttaaagttcatatggaaccaaaaaggagcccgcattgccaagtcaatcctaatttatagattcaatgcccaagaattggaaaaaactactttaaagttcatatggaaccaaaaaggagcccgcattgccaagtcaatcctaagccaaaagaacaaagctggaggcatcacgctacctgacttcaaactatactacaaggctacagtaatcaaaacagcatggtactggtaccaaaacagagatatagaccaatggaacagaacagagccctcagaaataatgccacatatctacaaccatctgatctttgacaaacctgacaaaaacaagaaatggggaaatgattccctatttaataaatggtgctgggaaaactggctagccatatgtagaaagctgaaactggatcccttccttataccttatacaaaaattaattcaagatggattaaagacttaaatgttagacctaaaaccataaaaaccctagaagaaaacctaggcaataccattcaggacatagccatgggcaaggactttatgtctaaaacaccaaaagcaatggcaacaaaagccaaaattgacaaatgggatctaattaatctaaagagcttctgcacagcaaaagaaaccaccatcagagtgaacaggcaacctatagaatgggagaaaatttttgcaatctactcatctgacaaagggcgaatatccagaatctacaatgaactcaaacaaatttacaagaaaaaaacaaacaaccccatcaaaaagtgggcaaaggatatgaacagacacttctcaaaagaagacatttatgcagccaaaagacacatgaaaaaatgctcatcatcactggccattagagaaatgcatatcaaaaccacaatgagacaccatctcacatcagttagaatggcgatcattaaaaagttaggaaacgactggtgctggaggggatgtggagaaataggaagacttttacactgttggtgggactgtaaactagttcaaccattgtggaagtcagtgtggcgattcctcagggatctagaactagaaacaccatttgacccagccagcccattactgggtatacacccaaaggattatagatcatgctgctataaagacacatgcacacgtatgtttactgcagcactattcacaatagcaaagacttggaaccaacccaaatgtccatcaatgatagactggattaagaaaatgtggcacatatacaccatggaatactatgcagccataaaaaaggatgagttcatgtcctttgcagggacatggataaagctggaaaccatcattctcagcaaactatcgcaaggacaaaaaaccaaacaccacatgttctcactcatagatgggaattga

SEQ ID NO: 6568 - DNA, 3442 bp, Homo sapiens
  SIMILAR (53)..(1588): 1001254mologous to Homo sapiens aldehyde dehydrogenase 6,accession number U07919,Smith-Waterman Score=2683.
agccggtgcgccgcagactagggcgcctcgggccagggagcgcggaggagccatggccaccgctaacggggccgtggaaaacgggcagccggacgggaagccgccggccctgccgcgccccatccgcaacctggaggtcaagttcaccaagatatttatcaacaatgaatggcacgaatccaagagtgggaaaaagtttgctacatgtaacccttcaactcgggagcaaatatgtgaagtggaagaaggagataagcccgacgtggacaaggctgtggaggctgcacaggttgccttccagaggggctcgccatggcgccggctggatgccctgagtcgtgggcggctgctgcaccagctggctgacctggtggagagggaccgcgccaccttggccgccctggagacgatggatacagggaagccatttcttcatgcttttttcatcgacctggagggctgtattagaaccctcagatactttgcagggtgggcagacaaaatccagggcaagaccatccccacagatgacaacgtcgtatgcttcaccaggcatgagcccattggtgtctgtggggccatcactccatggaacttccccctgctgatgctggtgtggaagctggcacccgccctctgctgtgggaacaccatggtcctgaagcctgcggagcagacacctctcaccgccctttatctcggctctctgatcaaagaggccgggttccctccaggagtggtgaacattgtgccaggattcgggcccacagtgggagcagcaatttcttctcaccctcagatcaacaagatcgccttcaccggctccacagaggttggaaaactggttaaagaagctgcgtcccggagcaatctgaagcgggtgacgctggagctgggggggaagaacccctgcatcgtgtgtgcggacgctgacttggacttggcagtggagtgtgcccatcagggagtgttcttcaaccaaggccagtgttgcacggcagcctccagggtgttcgtggaggagcaggtctactctgagtttgtcaggcggagcgtggagtatgccaagaaacggcccgtgggagaccccttcgatgtcaaaacagaacaggggcctcagattgatcaaaagcagttcgacaaaatcttagagctgatcgagagtgggaagaaggaaggggccaagctggaatgcgggggctcagccatggaagacaaggggctcttcatcaaacccactgtcttctcagaagtcacagacaacatgcggattgccaaagaggagattttcgggccagtgcaaccaatactgaagttcaaaagtatcgaagaagtgataaaaagagcgaatagcaccgactatggactcacagcagccgtgttcacaaaaaatctcgacaaagccctgaagttggcttctgccttagagtctggaacggtctggatcaactgctacaacgccctctatgcacaggctccatttggtggctttaaaatgtcaggaaatggcagagaactaggtgaatacgctttggccgaatacacagaagtgaaaactgtcaccatcaaacttggcgacaagaacccctgaaggaaaggcggggctccttcctcaaacatcggacggcggaatgtggcagatgaaatgtgctggaggaaaaaaatgacatttctgaccttcccgggacacattcttctggaggctttacatctactggagttgaatgattgctgttttcctctcactctcctgtttattcaccagactggggatgcctataggttgtctgtgaaatcgcagtcctgcctggggagggagctgttggccatttctgtgtttccctttaaaccagatcctggagacagtgagatactcagggcgttgttaacagggagtggtatttgaagtgtccagcagttgcttgaaatgctttgccgaatctgactccagtaagaatgtgggaaaaccccctgtgtgttctgcaagcagggctcttgcaccagcggtctcctcagggtggacctgcttacagagcaagccacgcctctttccgaggtgaaggtgggaccattccttgggaaaggattcacagtaaggttttttggtttttgttttttgttttcttgtttttaaaaaaaggatttcacagtgagaaagttttggttagtgcataccgtggaagggcgccagggtctttgtggattgcatgttgacattgaccgtgagattcggcttcaaaccaatactgcctttggaatatgacagaatcaatagcccagagagcttagtcaaagacgatatcacggtctaccttaaccaaggcactttcttaagcagaaaatattgttgaggttacctttgctgctaaagatccaatcttctaacgccacaacagcatagcaaatcctaggataattcacctcctcatttgacaaatcagagctgtaattcactttaacaaattacgcatttctatcacgttcactaacagcttatgataagtctgtgtagtcttccttttctccagttctgttacccaatttagattagtaaagcgtacacaactggaaagactgctgtaataacacagccttgttatttttaagtcctattttgatattaatttctgattagttagtaaataacacctggattctatggaggacctcggtcttcatccaagtggcctgagtatttcactggcaggttgtgaatttttcttttcctctttgggaatccaaatgatgatgtgcaatttcatgttttaacttgggaaactgaaagtgttcccatatagcttcaaaaacaaaaacaaatgtgttatccgacggatacttttatggttactaactagtactttcctaattgggaaagtagtgcttaagtttgcaaattaagttggggagggcaataataaaatgagggcccgtaacagaaccagtgtgtgtataacgaaaaccatgtataaaatgggcctatcacccttgtcagagatataaattaccacatttggcttcccttcatcagctaacacttatcacttatactaccaataacttgttaaatcaggatttggcttcatacactgaattttcagtattttatctcaagtagatatagacactaaccttgatagtgatacgttagagggttcctattcttccattgtacgataatgtctttaatatgaaatgctacattatttataattggtagagttattgtatctttttatagttgtaagtacacagaggtggtatatttaaacttctgtaatatactgtatttagaaatggaaatatatatagtgttaggtttcacttcttttaaggtttacccctgtggtgtggtttaaaaatctataggcctgggaattccgatcctagctgcagatcgcatcccacaatgcgagaatgataaaataaaattggatatttgaga

SEQ ID NO: 6569 - DNA, 243 bp, Homo sapiens
  SIMILAR (1)..(105): 941254mologous to Homo sapiens aldehyde dehydrogenase 6,accession number U07919,Smith-Waterman Score=171.
atggccaccgctaacggggccgtggaaaacgggcagccggacaggaagccgccggccctgccgcgccccatccgcaacctggaggtcaagttcaccaaggcatttccctacagaaatgacacggtgcacactaaaagactactcccgagccaggacttctgcagaggtccctgccacagccgagattcctcgtctgtagaagatgatggttcctccttcatggggatgagaaatgcaacttga

SEQ ID NO: 6570 - DNA, 486 bp, Homo sapiens
  SIMILAR (119)..(478): 331254mologous to Drosophila melanogaster multiple asters,accession number AF250842,Smith-Waterman Score=171.
ccgtgactgccctatagcttttgctggatctggatataaattccactatggagcctcgcatggaagtccctcccctgccgcaagtgttgcaagaaggaatgtggggaaaacgattgccaggttggcccaagaactgatagactatttcctcaagacaaacagaagtctgctgaccttgagcatgaccagaccatgttagataaacttgtggatggacttgcctacctcttgggtgaactctagcaattacaaggtggttctgctgggcatggacatcctgtccgccctggtgacccggctgcaggatcggttcaaggcgcagatcggcacagtgctgccaagtctaatagacagactaggagatgctaaagactctgtgagggagcaggaccaaactctgctgctaaagatcatggatcaagctgctaatccccagtacgtatgggacagaatgcttggaggcttcaaacacaagaatttccgtac

SEQ ID NO: 6571 - DNA, 561 bp, Homo sapiens
  SIMILAR (253)..(555): 371254mologous to Drosophila melanogaster multiple asters,accession number AF250842,Smith-Waterman Score=160.
atggggcaagaagcactgggacactgggataagcaggagaatgcaggtggacaaggggactgccactgtcagagaaaagaagttgtatacacagctgtacatagctctttttgtggaagatcatccttcttcgtgctaatctctttggtcctccagtcggcatgcgtctggactctcggactgcgtctgggccggaaatgtctaggcctccccggagcgggtgggcgggagcgctgccccgcaggccggctgctaacaggctcccggtgtttcccgctgcaggtggttctgctgggcatggacatcctgtccgccctggtgacccggctgcaggatcggttcaaggcgcagatcggcacagtgctgccaagtctaatagacagactaggagatgctaaagactctgtgagggagcaggaccaaactctgctgctaaagatcatggatcaagctgctaatccccagtacgtatgggacagaatgcttggaggcttcaaacacaagaatttccgtactcgagaaggcatctgtctctgccttatagcaacactcaatgcgtaa

SEQ ID NO: 6572 - DNA, 3888 bp, Homo sapiens
  SIMILAR (1528)..(2439): 961254mologous to Rattus norvegicus synaptotagmin VIIL,accession number AF336855,Smith-Waterman Score=1536.
atggagaagagagagactgagagccagaatctggatgaagaggttacagggcaggaatttaaaaactacccaagattcccaatgccccagagccgcagtttgcacaactatatctcatggcgtttctcttgtgtgtctgaggagctgtccagctctgacatcctggaacaaggaccgtctaatgccctccgtctgccccggaccgccgcggtgttgagtccggagctgacgccctcgagccgccagcaagcggaaaacccggagtggatctccacgccttttggatcggagccaaagggcacctcggaggaggtggccggctctgcggccctgcccggtgccaggccgcggccatcgggggagcacgggctgggggtgcagcccgctcggcccccgccctcggacccgcccccgggggtcgcccggccccatgcccagcggcggcggcggagcagcgcgcggccgcgggcggctctgaggagcccggagggaaccggcgacgaggggaccatgtaccgggacccggaggcggccagcccaggacagcggcagcgccggacgccgtctcggagccccagcctggggctgttgtccgcccggagccgcacgggctcccccaggggtcatcccagccccgggggcgcgggatcgagcggcagcggctcggaccccggtcccccgcagtctggacactgccaggctggatgtctgggaccggcttcgcagtgtccccacaaggacctctcccccacccctcaacagcccaaggacaacgtgagggctgaaggggcattgcctgtggagagccctcccctcatctgtctggacctaggtcacctaccctggcatcttcgtcgaagaggccgccggcttccagcccatggcccgtggcaggagtattctcttgctctgctcaccttcttagaagccagtagcttagttcagaagccagctctggggtatgaggatggaagacttcacggcctcttcctgccctcagccttcaccctctggttcatcctgaagtccctgtttctctcggactgcttgtccccaggccaggcaggccccagcaggcctgcaggggccctaagaggagggctgcctatcatctctgtagtgaccctgatagtgacaaaccctaatagtgacaaaaccaaagatgctggttggctggcatctttgggccgtgggagccaggctgtgcctgagtctgcttccttcctggagaagttctgtggagctctttgctcctccatcagcatcccctgccctgacagaaccctgacccaggcagtttctgtggctggagctgctacccagtacctccacaacccccctgccctctgtgggttgagaaaagggaaggacctgcttcctgccttctgctccctgcagaagctccctgtcaccaacagggctgcccatgggctttgtgcatccctggggcctgacttcatgactttcaaggtcccttctagctggagacacagtgactccatatgcagggaatggttcactctggctggggcgccctcgcgcgacgtcctgctggtctctgccatcatcaccgtcagccttagcgtcactgtcgtcctctgcggcctctgccactggtgtcagcgcaaactgggcaaacgctacaagaattccttggagacggtgggcacgccagactcagggcgtgggcgcagtgagaagaaggctatcaatgatctagacagagacttttggaataacaatgagagcacagtgcagcagaaatggagctcctaccctcccaaggagtttattctaaacatttcaccctacgccccttatggcgacccacgactgtccctcaatggcaccctcctgtcgggcgccaaagtggccgccgcggcggggctggcggtggagcgggaaggccggctgggggagaagccggcaccggtgccgccacccggagaggacgccttgagaagcggcggggctgcccccagcgagccgggcagcggtggcaaggcggggagaggccgctggcggacggtgcagagccacctggccgcagggaagctcaacttgtccaatttcgaggactccaccctgtccacggccactacccttgagtctatccccagctccacgggagagccgaaatgccagcgaccccgcaccctgatgcggcagcagagcctgcaacagccgctgagccagcaccagcggggccggcagcccagccagcccaccaccagccagagcctgggccagctgcaggcccacatggcctcggcaccaggccccaacccccgggcctatggccggggccaggctcggcagggcacctcggccggctccaagtaccgggcggcagggggccgcagccgctccaacccaggcagctgggaccacgtggtggggcagattcgaaaccgaggcttggacatgaaatccttcctcacaactagctcccgagcagccaaatggaattttaccaactctgaaacagtaccggcccttgacctggactcagcggtggtgctcattccctggatctccagcaaggaggacacaggagacagccactatggccgagttgccatataccacaaaggactttcattctcctctgatgggcttgtatatccaggagccaaggggagggaaggccggatggtggtgctatccttggtcttagggctttcggaacaggatgactttgccaatatccctgacctgcaaaacccaggaacccagcagaaccagaacgctcagggggacaagaggttgcctgcaggagggaaggcggtgaacacagcccccgtgccaggccagacaccccacgatgagtccgaccgccggaccgagccacgttcctccgtctcagacctcgtcaactccctcaccagcgagatgctcatgccacagttggaacaccgggaaactgttccagctgtgttccacgtgttccagcgggagtgcttgcctcattgggatgttgtaagaggattcagtaaggagacggcgatgcgagagtcgctggtcatgctctccccaggctccgaggaggatgaggcccacgagggttgcagccgagagaacctgggccggatccagttcagtgtcggctacaacttccaggagtccacgctcaccgtgaagatcatgaaggcccaggagctgccggccaaggacttcagcggcaccagcgaccccttcgtcaagatctacctgctgcccgacaagaagcacaagctggagaccaaggtgaagcggaagaacctgaacccccactggaacgagaccttcctctttgaaggttttccctatgagaaggtggtgcagaggatcctctacctccaagtcctggactatgaccgcttcagccgcaacgaccccattggggaggtgtccatcccccttaacaaggtggacctgacccagatgcagaccttctggaaggatctgaagccatgcagcgatgggagtgggagccgaggggagctgctcttgtctctctgctacaacccctctgccaactccatcatcgtgaacatcatcaaagcccggaacctcaaagccatggacatcgggggcacatcagacccctacgtgaaggtatggctgatgtacaaggacaagcgggtggagaagaagaagacggtgacgatgaagaggaacctgaaccccatcttcaatgagtccttcgccttcgatatccccacggagaagctgagggagacgaccatcatcatcactgtcatggacaaggacaagctcagccgcaatgacgtcatcggcaagatctacctgtcctggaagagcgggccaggggaggtgaagcactggaaggacatgattgcccgtccccggcagcccgtggcccagtggcaccagctgaaggcctga

SEQ ID NO: 6573 - DNA, 2302 bp, Homo sapiens
  SIMILAR (364)..(1134): 921254mologous to Rattus norvegicus synaptotagmin VIIL,accession number AF336855,Smith-Waterman Score=1229.
aagctccctgtcaccaacagggctgcccatgggctttgtgcatccctggggcctgacttcatgactttcaaggtcccttctagctggagacacagtgactccatatgcagggaatggttcactctggctggggcgccctcgcgcgacgtcctgctggtctctgccatcatcaccgtcagccttagcgtcactgtcgtcctctgcggcctctgccactggtgtcagcgcaaactgggcaaacgctacaagaattccttggagacggtgggcacgccagactcagggcgtgggcgcagtgagaagaaggctatcaaggtttccaggccatgccctccaccggccaaggcttctgccacccaccccacctgcaagtccccacgttctcaggagaaggtggagagtccaggtgatctagacagagacttttggaataacaatgagagcacagtgcagcagaaatggagctcctaccctcccaaggagtttattctaaacatttcaccctacgccccttatggcgacccacgactgtccctcaatggcaccctcctgtcgggcgccaaagtggccgccgcggcggggctggcggtggagcgggaaggccggctgggggagaagccggcaccggtgccgccacccggagaggacgccttgagaagcggcggggctgcccccagcgagccgggcagcggtggcaaggcggggagaggccgctggcggacggtgcagagccacctggccgcagggaagctcaacttgtccaatttcgaggactccaccctgtccacggccactacccttgagtctatccccagctccacgggagagccgaaatgccagcgaccccgcaccctgatgcggcagcagagcctgcaacagccgctgagccagcaccagcggggccggcagcccagccagcccaccaccagccagagcctgggccagctgcaggcccacatggcctcggcaccaggccccaacccccgggcctatggccggggccaggctcggcagggcacctcggccggctccaagtaccgggcggcagggggccgcagccgctccaacccaggcagctgggaccacgtggtggggcagattcgaaaccgaggcttggacatgaaatccttcctcacaactagctcccgagcagccaaatggaattttaccaactctgaaacagtaccggcccttgacctggactcagcggtggtgctcattccctggatctccagcaaggaggacacaggagacagccactatggccgagttgccatataccacaaaggactttcattctcctctgatgggcttgtatatccaggagccaaggggagggaaggccggatggtggtgctatccttggtcttagggctttcggaacaggatgactttgccaatatccctgacctgcaaaacccaggaacccagcagaaccagaacgctcagggggacaagaggttgcctgcaggagggaaggcggtgaacacagcccccgtgccaggccagacaccccacgatgagtccgaccgccggaccgagccacgttcctccgtctcagacctcgtcaactccctcaccagcgagatgctcatggaagactggcccccagctgtcttctcttctggatgggccattgccacagcccaccctgcctccctgcacagccccttaattggttacagcttcctggcagccaggggtggcttgctgcttttcgaggctgacttctgctggtgcaagcgctcaggaagcaccttccctgactgtgatggggtggccaacctggctgccacagagatggctctgtcccagctgagattcagtaaggagacggcgatgcgagagtcgctggtcatgctctccccaggctccgaggaggatgaggcccacgagggttgcagccgagagaacctgggccggatccagttcagtgtcggctacaacttccaggagtccacgctcaccctgaagatcatgaaggcccaggagctgccggccaaggacttcagcggcaccagcgaccccttcgtcaagatctacctgctgcccgacaagaagcacaagctgaagaccaaggtgaagcggaagaacctgaacccccactggaaacgagaccttcctctttgaaggttttccctatgagaaggtggtgcagaggatcctctacctccaagtcctggactatgaccgcttcagccgcaacgaccccattggggaggtgtccatcccccttaacaaggtggacctgacccagatgcagaccttctggaaggatctgaagccatgcagcgatgggagt

SEQ ID NO: 6574 - DNA, 579 bp, Homo sapiens
  SIMILAR (265)..(381): 871254mologous to Rattus norvegicus synaptotagmin VIIb,accession number AF336857,Smith-Waterman Score=183.
atggatgtctatccagtgctcagcgctgttatgaatgacagctcgatcgccaagctcatcttagtactacacgcagaagctgacctaggctactctgaagcaggtggcttagccctggccctggctggatgcaggacaggttggcagggaggcagcagagccaaattttgtacaaaggagctggtgctagcaagctcaggaagaagccacagccggaagttcaccttgccaggacctggctcagctgcaggttccaccgggccaccaggctccgaggaggatgaggcccacgagggttgcagccgagagaacctgggccggatccagttcagtgtcggctacaacttccaggagtccacgctcaccctccctgcgcagcgcacagccagctcggaccgcttcgtcaactgctctaagtgccacgccggtctccgagtggcagccccgcaggctgcccgcggaaatattttgagtaccgcactcaatcggcgccccagcctctacgactctatccttccggctcgtatctttcgacgaatcgtgcgcgaataccaacttcgcaccatgagcagcgtctag

SEQ ID NO: 6575 - DNA, 440 bp, Homo sapiens
  SIMILAR (1)..(96): 1001254mologous to Homo sapiens bA416N2.1 (neuralized (Drosophila)-like),accession number AL121929,Smith-Waterman Score= 167.
gcggccgccggcatgcagctgtgcgtggacgcctcgcagccgctttggatgctcttcggcctgcacgggaccatcacgcagatccgcatcctcggtgagtgcccgcagctgcgcctgggcgtatgcctttcctggaggcggggacgatccgggtaggagacaaagggcgagctccccttcctccaggctcatgatggtgttgctaaggaatcacagacacctaaggtgagttctgggcgggacttggtcatcttgtcagtggcccttatatgtcacctgggagactcacctggggggtgaggcgacgggaaagcgcggattattgagtttgatgcccagaatcagatcaacccatagtctcacagatacataaacagtccagaagcacacaacccactggaccacttcaaaaatgagaggaaaaggccaggtgcggtggc

SEQ ID NO: 6576 - DNA, 5504 bp, Homo sapiens
  SIMILAR (3166)..(2876): 341254mologous to Homo sapiens bA416N2.2 (similar to murine FISH (an SH3 and PX domain-containing protein, and Src substrate)),accession number AL121929,Smith-Waterman Score=153.
ctacttttaaattttattttaaatagtcataaattactttttttctcttaataaatatgtgctgtttaaaaatgagaaaagtatatactgcatctttaagtaatgcactttgctctctgggttttttccattctaccttatttaaagtgcattaattaaaaaataatgaaccacttctttatcattattgttcaaataagtacaaataatattaacatgaagacactaaaccactaccattagtactgcaatctagcagattaactcaacatcctgctctatttaatactgtccagcagaagaaaataactaatttcaattttaaacaaactcacaaaacaaaaggaaacaaaacaatctcaccacaggccttcgacaaagaacacgagccatttgctctagctgccaggcatcagtgtatggcgagggacaggggcttagggttgcccaggcaaggcctctgggatggggtgtggtggggtagggtaggggtgggggtgggttttgaaggcactgagacactgggtcccatgctgccctgcctgggtggggagcagggtgagggagggcctttcctcctctatagaaaacaccaacccccagtccagggaccctggcagctgaatcggtggctgtgaggcccaatctgtccgaaatcaaaggcacgtgtggaaatccactcccagcgaagggggagtccttgggggaagccggctgggcttctggagggtcccctctgaaatgtcaacaattgaaaaacacaacccaaaggtgacagaggacctacagggaactttattctctcgcttctgtcttcactggggcactgaccctcgggaagaccaggttggctcctggcacagggatcctccatcttcttgggcacctgtggcattgccagcaggccagagggggtggctggcggtgttggctccagtctgacccaaggggccagccgggtcccccctctgcccatagtggggacaatggctgcttctccatgcttcatacgtaaggcttccagccctgcccagctggggaacacacgcagaatggcggtcacccagcaggctgggagctgccttctctccaaaagtctggctcctgaacaccctcctccttcctggggagggtttttgcccctctgaggttgtgcaggaaccagaagaacagtttctctgcttcaccatgtctgcaacctggggcttgcctagccccaaatttttctggcaggcgccaagctccagcacagtccacacagtggaaaccaaatgaaacgactttggcttgtggagggggaagaatgtgaaacaaaaacaaaagcaaaatcacccgcccacaagatacaacagaaaccccatccactacccatctccttcccatgtgaggccgaccacccaggcccccaaacaacccctaaaataagacgcaaaccaaaggcctgacatataagccccaaatcaacaaacctctcccgaaacatgcaaaggaactgcccgcccagaaatacccaaaatagtctgtgcagattaggaagagaccggtggcttcgcccaccctctctgtaaactctggtactgtgtcctccatggggtgccccacggagagcgggctctcttctcaaggccaagacagtgacagttatgaaagatggtctttgctggcacctgggaactgctttttcttcaactaacagtgacaatggcctggcccagaagcaggcttgagctcagaagacacccccaagcctgaaagccagtggtggcttctaatgtacccacctgtggtaggcgtggcaatgcccaggaaaccagcacaattcacaaatacagcttaggacaataccagggatacctggggtggcaagatgccagcaatcaaaactgggccaagcaggggcaggacactggaggcccccatgaccttgtcttttccagatctgtagcaaaggcacaactggggtctcccacatggcctgtcccagatggcatgtaatccattggtgaagtccctatggtgcacaggatatctcagctttcttggctctgggtcccaggcctgggactccctggtccattcccttcctcactcagtgtgggcacccccatcccctaccttccagctgtgggatggcttggacagggggcatctttgaggtcacccattctgcagtgttgaatgttgtccaccccccaccccccacccccattttttcctttcccttttgttcgtctcaccgctcatccagtgggcggccagagaggcacactgaggctggaagagcccaggccctctgctagttctttttctcaaggtagttggaaggcacccagcctttgaagggcttcacaccatccaggatctggcagtaccaccagccattagggttcctctccagaacctccatggacaccccctcctggaagcctgctgtctcctcatccccctcgtagtctgcgatagagacgtacacatctttgaggttattgtggatgaactgagacttctcgatgggcttggggcgcacaggggacacggggatgctgttgcgctgggcgggcagtaggggtgagtctgaaccctggctggcagcccgttcggccaggcggcccttggcctcggcggcagcggagcgagcagtgctaaaggaggagttccgtcggacgcctcggaggccatcagtggccgtgagtgactcattcctccgcagggcgcaggacaggttgttgtccttgggtggcggggacacaaacaccgactggggcctgaccgccacctgccgcactccgttcctcatcttcaccgctggagtgcctgaggtcttgccaaagcccccgggaggtttggaggggatggggggcgtggccttcttgctctggttgacggtgttcagtgcttggacgcgcctctcgatcttctccaggctgtctgacttgccttcgttctgcctgcccttggcgggcactgtgtccagctctttgccagaggggtcaggttgctcgttctcatccagcaccaaatagtgggaaggggcccagccctccagctccccaaacctcacataccaccacccgctctcctgcttctccagcacctgcacctccacgcccgcggggaagctgatctccgagtcctggaccttctggtaggcgctgcatgtcatgtacgaggtggctggcccttcccattccttcttggtgggacatgggggagtggtggctgggagggtgatgaggtcggatgagcttctcctagacccctcactgggagcctcggaggccgtctgcgggggcagctccgaatcctcactcttggagcccttgagccctccacggagctggcctgtgggtctcagctggcgccgtaaagtgctgatgtccatcttctcttggctctgcgactctgctcggtttaggaatggcttgggccggaccgatggcttggcccggggacaggaggtcagcccagcgttcgcatcagcatccttctttgccctgaccttgggagtgccgcggatgcctgcgtccgaagcagagcggggcttcaggtcgccactggttttggacaaggaagaggaggaggaggaagaggaggagcagcaagtggtgttgatggtgatggatgaggaaaaggaggctgaggagtggttcttccccatttctgcctgggcattcttctctgccttgagctttaggagtgatgatgacttgggggagcctgatttgggggagtttttcctggtcagggacagcgaggagctgcctggggagtcgctgtccccggaggagcctctggctgacagggtgtcctctgcatatggccggaagccctcattctcatagatggtctcctcttccagggccacatcctctgaagactcacccaccttgaagcgggcccgctgcagagaagaggccggcgagggccggtggggctgggcaggccgcctctcccctgaggctctgtcctccacgggctcctcgctcagctcaggctctgagtcaaagccgaatgcagggatgtcatactcaggctcctcatacttgagcttccgcggggagtcctggctctcactggcccccgtagggccctcctcggcctccttgggcttgctggggggtgctggcgggggcaccttgggccgggtcagcgtgcttgtgcggcggctcaggttgggcttcttgcgcttatcgatgtatgatgcgggggcccagccctccttctcaccgatctgcacgtaccaccagccacctgagttcttatcaatgacctctgccttctgtccaccccgaaagctgatgccatcggaaatgcacgactggaattcggcaatggtgtagtactccacctcaacagaagggggctctggtggctttggcagttggaaccccaggctggattctctgcgtggtggaggtcttgtccgtaggttcggggagctgatctgggcccgctgaggggcaatcctggccacagctggagagccctgggccagcctggagacagtcctgtcaggaacgcccacggcactgccattggaggcattgcagaggatgggcaggctgatctccttcttggcaatgggggcctcatggccctcgccttcggctggtggagtttccttgtccccagacgccttcttgttcagcaggttgctgatctccatgatgttcccaatgatctccactgggccggccaggttcttcttccgggttggcaggtcatccttggccttcttcaggtaggatgctggcgcccagccctctttgcccaggtatctgatataccaccagccttccagattcttccggatcacctccactgtgacgcccttctcaaagccaatctcgtccttgctttggctggtgtaaggctgcacggtgacatacttctcctcttctccagtcttagaggtgttgatgtcggagtcatcccgagtaccattctgggcctccaggtaggtggcagggacccagccctgctcctcagaagtgctcacgaaccaccagccgctctcgttcttctcgatgacatccaccacctccccggcctggaggctcagctccgagttctcctgcttcttatagttggacaccaccacgtactgttccaggatcatgggctcggcggtggcgtcggcacctgtcacgtccttcttgggcgactcagcccagctggacagccacactgtggtcccagccactctggaggctgaagtgggaggattgcttgagcccagggaggtcgaggctgcagtgaggcatgatcacgccactgcaatccagcctgagcaacagagcgagaccctgatttcctcttggaactgccatagtcccttccctaagccttggcggggaagggcgaggcaggttctcctcacttcccaaactgggaaactgacgctccgggatggcgctcgccggaacccggcccctacccagcgctgggagcccgctctccccgccaccggagcggttcacccgccaggtaatcacagatttgtg

SEQ ID NO: 6577 - DNA, 591 bp, Homo sapiens
  SIMILAR (214)..(369): 981254mologous to Homo sapiens bA416N2.1 (neuralized (Drosophila)-like),accession number AL121929,Smith-Waterman Score= 264.
gtccgtgtgcgcgggagccggtgcctgcaggccctgcgcatgcttccctgtgatgtgcagaagctgtttgccagcatggcagggggcaagagggagccgtggaaggcgttggagcatgggactgacttggcaaaagcccagttgagaagtttaagttggcagccagggttccatccaggtggtagtgaaaggaatgcagatgtgaggcaaggcggggccatcttgggcttggtggtcaacgccgacggcgagttgcacctcagccacaatggcgcggccgccggcatgcaactgtgcgtggacgcctcgcagccgctttggatgctcttcggcctgcacgggaccatcacgcagatccgcatcctcggctggtggttcgtgagcacttctgaggagcagggctgggtccctgccacctacctggaggcccagaatggtactcgggatgactccgacatcaacacctttaagactggagaaggaaagatgcatggcaagcactcagagaatgccaggactcgggctggtgggcacaacacagctctctatgcacctcccattggttctgtttctctggagaacactgactaa

SEQ ID NO: 6578 - DNA, 1059 bp, Homo sapiens
  SIMILAR (526)..(834): 831254mologous to Homo sapiens Trio,accession number U42390,Smith-Waterman Score=423.
atgaagccacggaccttcgcagtgactgttacagtttttaaagatggagtgaggctacagaccttcccagtaactgttacaactcataaaagcagtgtggacctaaagagtgaacaacaagatttactgcaaaaagcaaaagaacaacacttccacactgctgaacacgacccaagcagcttaccactacagcttgggcagcctgcttttattcccttatcggactccacccacatcctgctgattggcccattttacagagagctgattggtccattttatagagcactgattggtccgttttacagagagctgattgtgtgtttgacaggtgctaatgatgcattgagttgctcctctcccacatgtggtaagtttctcaagactgtgagcaaagtcccggtgtgccgccgtggcctggccgtgaacaggaaagaggctgagggccgctcctccgagagccccaccagctctgccactttccagtcgccggctttgtcctggatgctggtctcccagaggctgctgctgccccacatgatcggggcccagagctcgccgggccccaagcggccgggcaacaccctgcgcaagtggctcaccagccccgtgcggcggctcagcagcggcaaggccgacgggcacgtgaagaagctggcgcacaagcacaagaagagccgcgaggtccgcaagagcgccgacgccggctcgcagaaggactccgacgacagtgcggccaccccgcaggacgagacggtcgaggaggataccgtcgcgcagcccaggggccggcgagagggggccggacgccagagtggcagcagagcggcggggcccggcggacgccgagcgtcggccatccgcggcgggcacgcgcggacagatgtcgggaagcgaaacggaaccaggacgagaaaggagctcatgccgctccacgggaagcgcaaggacgcagcggaacatgacgaaccaacatcagccagtcgccccgcgggcgagcgcccggaattgacattagcagctgttcaaacagaatacaactgctcttttccaagctaa

SEQ ID NO: 6579 - DNA, 1264 bp, Homo sapiens
  SIMILAR (263)..(649): 811254mologous to Homo sapiens Trio,accession number U42390,Smith-Waterman Score=504.
  misc_feature (1)...(1264): n = a,t,c or g
tttcgtgtccctgtcgcgtcccagtctgtgtctgagtgtctgtttagctggtcgctgcttttgctgccaagcgggtggctctagctgctgtggagggagaggtaggataggggttctgcacctttagcctccagtcggctccagtcaccatgcccaacggattgaagccagtggacacgctggactcgctgtccttctgtcagttcagcctactgcagcggcgggcagccgggcacctgcaagtacttggatcctcgacctagactcgctctccgtctccagcaatgacgccagtccacccgcatccgtggcttccctccagccccacatgatcggggcccagagctcgccaggccccaagcggccgggcaacaccctgcgcaagtggctcaccagccccgtgcggcggctcagcagcggcaaggccgacgggcacgtgaagaagctggcgcacaagcacaagaagagccgcgaggtccgcaagagcgccgacgccggctcgcagaaggactccgacgacagtgcggccaccccgcaggacgagacggtcgaggagctaaaatcctttgggggagacagcgtggagaatttgcaatgcaagacagatgttcaccggaactctcctgctgttgagcagggcatccgtgggtggccctgtctcatcggaaacgccctggctgtcaatcggcagcagacccacatgtgtgcatgtttggctgacgttatgtggcatgagggctgccagtcacagcagaggcttggtgaccttgtgggttttgtgaccctggctgtccaaggaggcccgcacttcacagccccagctcttcttcccactctgggcctggggcgcttgtccttagattcgtcgtctcgccgctctgcttcatcctgctttcttcctcagccttctgcagctttttcctacacatcagtcacatgtggtaagtttctcaagactgtgagcaaagtcccggtgtgccgccgtggcctggccgtgaacaggaaagaggctgagggccgctcctccgagagccccaccagctctgccactttccagtcgccggctttgtcctggatgctggtctcccagaggctgctgctgnggggtaggttgtgtgccgcggcaaatatgacgcacagtgttgcgctccatgagttcgccaattgtctaacgcccccggaaattgtcacggtgacaacgatcccgaaagccccgcgggtggagcacgatgtcatcacctccaaagctctggcctctctctga

SEQ ID NO: 6580 - DNA, 602 bp, Homo sapiens
  SIMILAR (67)..(600): 671254mologous to Homo sapiens Eab1,accession number U71207,Smith-Waterman Score=566.
ggcacgaggcagctcttctccagatcttgcccacgtgtcctcccccgccagccttccacagccatggcagcctacggccagacgcagtacagtgcggggatccagcaggctaccccctatacagcttacccacctccagcacaagcctatggaatcccttcctacagcatcaagacagaagacagcttgaaccattcccctggccagagtggattcctcagctatggctccagcttcagcacctcacccactggacagagcccatacacctaccagatgcacggtgaatacaacacacacaatggaccttccacaccagcgaaagagggagacacagacaggccgcaccgggcctccgacgggaagctccgaggccggtctaagaggagcagtgacccgtccccggcaggggacaatgagattgagcgtgtgttcgtgtgggacttggatgagacaataattatttttcactccttactcacggggacatttgcatccagatacgggaaggacaccacgacgtccgtgcgcattggccttatgatggaagagatgatcttcaaccttgcagatacacatctgttcttcaatgacctggagga

SEQ ID NO: 6581 - DNA, 2327 bp, Homo sapiens
  SIMILAR (3)..(1616): 1001254mologous to Homo sapiens Eab1,accession number U71207,Smith-Waterman Score=2854.
aaatggtagaactagtgatctcacccagcctcactgtaaacagcgattgtctggataaactgaagtttaaccgtgctgacgctgctgtgtggactctgagtgacagacaaggcatcaccaaatcggcccccctgagagtgtcccagctcttctccagatcttgcccacgtgtcctcccccgccagccttccacagccatggcagcctacggccagacgcagtacagtgcggggatccagcaggctaccccctatacagcttacccacctccagcacaagcctatggaatcccttcctacagcatcaagacagaagacagcttgaaccattcccctggccagagtggattcctcagctatggctccagcttcagcacctcacccactggacagagcccatacacctaccagatgcacggcacaacagggttctatcaaggaggaaatggactgggcaacgcagccggtttcgggagtgtgcaccaggactatccttcctaccccggcttcccccagagccagtacccccagtattacggctcatcctacaaccctccctacgtcccggccagcagcatctgcccttcacccctctccacgtccacctacgtcctccaggaggcatctcacaacgtccccaaccagagttccgagtcacttgctggtgaatacaacacacacaatggaccttccacaccagcgaaagagggagacacagacaggccgcaccgggcctccgatgggaagctccgaggccggtctaagaggagcagtgacccgtccccggcaggggacaatgagattgagcgtgtgttcgtgtgggacttggatgagacaataattatttttcactccttactcacggggacatttgcatccagatacgggaaggacaccacgacgtccgtgcgcattggccttatgatggaagagatgatcttcaaccttgcagatacacatctgttcttcaatgacctggaggattgtgaccagatccacgttgatgacgtctcatcagatgacaatggccaagatttaagcacatacaacttctccgctgacggcttccacagttcggccccaggagccaacctgtgcctgggctctggcgtgcacggcggcgtggactggatgaggaagctggccttccgctaccggcgggtgaaggagatgtacaatacctacaagaacaacgttggtgggttgataggcactcccaaaagggagacctggctacagctccgagctgagctggaagctctcacagacctctggctgacccactccctgaaggcactaaacctcatcaactcccggcccaactgtgtcaatgtgctggtcaccaccactcaactaattcctgccctggccaaagtcctgctatatggcctggggtctgtgtttcctattgagaacatctacagtgcaaccaagacagggaaggagagctgcttcgagaggataatgcagagattcggcagaaaagctgtctacgtggtgatcggtgatggtgtggaagaggagcaaggagcgaaaaagcacaacatgcctttctggcggatatcctgccacgcgaacctggaggcactgaggcacgccctggagctggagtatttatagcaggatcagcagcatctccacctgccatctcaccctcagaccccctcgccttccccacctccccaccgagaactccagagacccagatgttggacaccaggaaggggccccacagccgagacgactgtccagtgaccatctcagaagccgtccatcagtccaaatgggggttctgagaaggaaagtacccaacattggcttcggagtatttgactttggggaaaagggctggctcggagtctagactcttctgtaagactcacagaacaaaagcaaggaattgctgatttggggggtgcctggtgatgaggaggggatgggtttgtcttgtcttctttttaatttatggactagtctcattactccggaattatgctcttgtacctgtgtggctgggtttcttagtcgttggtttggtttggttttttgaactggtatgtggggtggttcacagttctaatgtaagcactctattctccaagttgtgctttgtggggacaatcattctttgaacattagagaggaaggcagttcaagctgttgaaaagactattgcttatttttgtttttaaagacctacctgacgtcatgtggacagtgcacgtgccttacgctacatcttgttttctaggaagagggggatgctgggaaggaatgggtgctttgtgatggataaaaggcattaaataaaaccacgtttacattttg

SEQ ID NO: 6582 - DNA, 602 bp, Homo sapiens; identical to SEQ ID NO: 6580
  SIMILAR (67)..(600): 671254mologous to Homo sapiens Eab1,accession number U71207,Smith-Waterman Score=566.

SEQ ID NO: 6583 - DNA, 2327 bp, Homo sapiens; identical to SEQ ID NO: 6581
  SIMILAR (3)..(1616): 1001254mologous to Homo sapiens Eab1,accession number U71207,Smith-Waterman Score=2854.

SEQ ID NO: 6584 - DNA, 915 bp, Homo sapiens
  SIMILAR (1)..(858): 971254mologous to Homo sapiens Human neuregulin related ligand NRG3,accession number W97618,Smith-Waterman Score=1413.
atgagtgaaggggcggccgctgcctcgccacctggtgccgcttcggcagccgccgcctcggccgaggagggcaccgcggcggctgcggcggcggcagcggcgggcgggggcccggacggcggcggcgaaggggcggccgagcccccccgggagttacgctgtagcgactgcatcgtgtggaaccggcagcagacgtggctgtgcgtggtacctctgttcatcggcttcatcggcctggggctcagcctcatgcttctcaaatggatcgtggtgggctccgtcaaggagtacgtgcccaccgacctagtggactccaaggggatgggccaggaccccttcttcctctccaagcccagctctttccccaaggccatggagaccaccaccactaccacttccaccacgtcccccgccaccccctccgccgggggtgccgcctcctccaggacgcccaaccggattagcactcgcctgaccaccatcacgcgggcgcccactcgcttccccgggcaccgggtgcccatccgggccagcccgcgctccaccacagcacggaacactgcggcccctgcgacggtcccgtccaccacggccccgttcttcagtagcagcacgctgggctcccgacccccggtgccaggaactccaagtacccaggcaatgccctcctggcctactgcggcatacgctacctcctcctaccttcacgattctactccctcctggaccctgtctccctttcaggatgctgcctcctcttcttcctcttcttcctcctccgctaccaccaccacaccagaaactagcaccagccccaaatttcgtgtagacatagattctgtgaccgccgagagtgagttaactaggaggaaatatgaagggagccctgcagagctgccacctctagggtcctga

SEQ ID NO: 6585 - DNA, 638 bp, Homo sapiens
  SIMILAR (603)..(106): 911254mologous to Homo sapiens 2,4-dienoyl-CoA reductase,accession number L26050,Smith-Waterman Score=819.
gttaattaagaatttattagacttgaaatagtcaaaagatgagagataatttgtttcatttctattcccttttctgtaaccaagatgaaggccaaagtggtcttaggaaccttttgtcttcctgatgagttcttctatggtgtcccactgctccttggtgacctttctcaggtcgttgaattcccctgaaataagtacttcctctccaccgtcaaatttaatgactgctccattaatccaagaagcataatcactacaaaggaaagcagcaagatttgcgagttcttctacagtccccaggcgaccacagggaattctgccaatcatttctttctcaaatgttccagttgggtccagacggctaaaggcacctttggtttttataggccctggttgaatcacattgaatcgcattccatatttaccccattcagctgcaagagacttgctcatggcttccacacctgctttggcagaagcacttggtactacaaaacctgaaccagtctcagcatagatagtagtaatagaaagaaatgtcacgaaagctgtgccatttagaactatgtcagttatggttttccaagcattaggagaaagtcttcagtaggagaaataaaattccctgctgcattttt

SEQ ID NO: 6586 - DNA, 1983 bp, Homo sapiens
  SIMILAR (1380)..(1469): 731254mologous to Homo sapiens putative p150,accession number U93572,Smith-Waterman Score=107.
ctttaacaccccactgtcaacattagacagatcatcgagacagaaagttaacaaggatatccaggacgttatctcagctctgcatgaagcaggcctaatagacatctacagaactctccaccccaaatcaacagaatatacattcttctcagcaccacatcacacttattacaaaattgaccacatagttggaagtaaagcactccttagcaaatgtaaaagaacagaaatcacaacaaactgtctctcagacgacagagcaatcaaattagaactcaggattaagaaactcactcaaaactacacaactacatggaaactgaacaacctgctcctaagtgactactgggtaaacaacgaaatgaaggcagaaataaagatgttctttgaaaccaatgagaacaaagacacaatgtaccagaatctctgggacacattcaaagcagtgtgtagagggaaatttatagcagtaaatgcctacaagagaaagcaggaaagatctaaaatccacaccctaacatcacaactaaaagaaccagagaagcaagagcaaacacattcaaaagctagcagaaggcaagaaataactaagattagagcagaactgaaggagatagacacacaaaaaacccttcaaaaaatcagtgtatccaggagctggttttctgaaaggatcaacaaaattgatagactgatagcaagactaatgaagaagaaaagagagaagaatcaaatagatgcaataaaaaatgataaaggggatatcactattgatcccacagaaatgcaaactaccatcagagaatactataaaaacctctacgcaaataaacttgaaaatctagaagaaatggataaattcttggacacatatatcctcccaagactaaaccaggaagaagttgaattgccaaatagaccaataacaggctctgaaaatgaggcaataattaatagcctaccaacaaaaaaagtccaggaccagatgagttcacagccaaattctaccagaggtacaaaggttctggccagggcaatcaggcaagagaaagaaagagaggacactcaattaggaaaagaggaagtcaaattgttactgtttgcagaagacatgattgtgtatttagaaaaccccatcgtctcagcccaaaatctccttaagctgataaacaacttcagcaaagtctcaggatacaaaatcaatgtgcaaaaatcacaagcattcttacacaccaataacagacaaacagagagccaaatcatgagtgaatgcccactaacaattgcttcaaagagaataaaatacctaggaatccaacttacaagggatgtgaaggacctcttcaaggagaactacaaaccactgcttaacaaaataaaagaggacacaaaacaaatggaagaacattccacgctcatgtttaggaagaaacaatattgtgaaaatgaccatactgcccaaggtaatttaaaaaaaactactttaaacttcatatggaaccaagaaagagcccgcattgccaagacaatcctaagcaaaaagaacaaagctggaggtatcacgctacctgacttcaaactatactacaaggctacagtaaccaaaacagcacggtactggactctcaccattaagaaaggaagcgtgtggcccatctccttgaaatctgagaagaggggtcatagaactagaccgctgtggaagttatgccataatgacgtccaaggagagctcctaaagacaatacaatttttgtttggctctcccttaggacactcatccttggatcccagtgccctggtgtgtaagtaaaacttgccagcccacagccagaaccaacttgccagcagtgtgagagccattttaggagtggatcttccagccccagtgacactccagctgataacccatgagcgagtaagtctcaaatcagtgaataaactagttcagagtcacacggccagtaagaaatagggtcaaga

SEQ ID NO: 6587 - DNA, 2991 bp, Homo sapiens
  SIMILAR (1135)..(2151): 821254mologous to Homo sapiens putative p150,accession number U93569,Smith-Waterman Score=1398.
atgcctccccactcagagcagcctcacagtccaagcacaagacagaaacgaaaagttcctttgtttgtaaggcaatgcccatcttttgtcattcaggcccccaaagctaagatggacacatttgatggaaggaagaagcagtttaccaggttcttattcttattctcaatggaccagctgggccagggccggttttcaatgcagactctctcttttgctcttgctgtgtatcggaaggattcccccctggttgcttgtcaggtgcaggctcttggcaacctggagccaagctcagtggaagcgcatgtttccagccacggcatcgccattgacaggaagggctggcatgtatcacttttcagcatccaaccaggtgattgcttccccaaagctctcgtggaggatagccccagggacagagcacggaggcaacagtcaagcaaagaggaaggttggtgtagagacaggagaaggcttaagttccacagcaagaaaggggcggcagcaatagtggtgaaaagcaagaagtatgagtctcctagctttggcgtgtgctttgaatccttgctgaatccaccaaggctgaccagcagaagagaaaagacgatttccagcagtaaacgatgcaggcagtgtcatgcagaggaaaccactgttgttttctgggctaaagagagccagaccggagaacagacaggaaggggagcaggacagaggagaatgggcatgattatatgtaaagcttgttccatgctccctgcagaaaggcaggatctcagacccacttctcttgttatctctcatggggtcagtgtcaaggacagacgtgaacactgtcaatgccccaactactacccaccactgagaaatatgtcccctctggaacattcaattaaaatctgtggggggaaaaagcctcaaaatgacagccagagaataacaacaataacaaaagttattgtaaaccaagacttcaagcagccagatgacactgagttgagtcaaggcagtagaaaagaaacgagtgaagcgtccctggtcacattactttgggagttggtaacagcaggccaaacacctccactggtgacacccaggcaaacagggtctggagtggacctccagcaaactccaacagacctgcagttgagggtcctgactattagaaggaaaactaacaaacagaaaggacatccaccaaaaccccatctgtatgtcaccatcatcaaagaccaaagaactctccaccccaaatcaacagaatatacattcttctcagcaccacatcccacttattctaaaattgaccacatagttggaagtaaagcactcctcagcaaatgtaaaagaacagaaattataacaaactgtctctcagaccatagtgcaatcaaattagaactcaggattaagaaactcactcaaaaccgctcaactacatggaaacttaacaatctgctcctgaatgactactgggtatataaagaaatgaaggcagaaataaagatgttctttgaaaccaatgagaacaaagacacaacataccagaatctctgggacacatttaaagcaatgtatagtgggaaatttatggcactaaatgcccacaagagaaagcagcaaagatctaaaattgacaccctaatatcacaattaacagaactagagaagcaagagcaaacacattcaaaagctagcagaaggcaagaaacaactaagatcagagcagaactgaaggagatagagacacaaaaaacccttcaaaaaatcaatgaatccaggagctggttttttgaaaagatcaacaaaattgatagaacactagcaagactaataaagaagaaaagagagaagaatcaaatagacacaataaaaaatgataaaggtgatatcaccaccgatcccacagaaatacaaactactgtttatattatttggtactggtacgcaaataaactagaaaatctagaagaaatggataaattcctggacacatataccctcccaatactaaaccaggaagaagttgaatccctgaatagaccaataacaggctctgaatttgaggcaataattaatagcctaccaaccaaaaaaagtccaggaccagatggattcacagctgaattctaccagagaaccaaagacaaaaaccacatgattatctcaatagatgcagaaaaggccttcaacaaaattcaacagcccttcatgctaaaaactctcaataaactaggtattgatgggacatatctcacccacagccaatatcatactgactgggcaaaaactggaagcattccctttgaaaattggcacaagacagtgttggaagttctggccagggcaatcaggcaggagaaagaaataaagggtattccattaggaaaagaggaagtcaaattgtccctgtttgcagatgacatgattgtatatttagaaacccccatcatctcagcccaaaatctccttaagttgataagcaacttcagcaaagtctcaggatacaaagtcagtgtgcaaaaatcacaagcattcctatacaccaataacagacaaacagagagccaaatcatgagtgaactcccattcacaattgcttcaaagagaataaaatacctaggaatccaacttacaagggatgtgaaggacctcttcaaggagaactacaaaccactgatcaatgaaataaaagaggacacaaacaaatggaagaacattccatgctcatgggtaggaagaatcaatgttgtgaaaatggccatattgcccaaggtaatttatagattcaatgccatccccatcaagctaccaatgactttcttcacagaattggaaaaaactactttaaagttcatatggaaccaaaaaagagccagcattgccaagacaatcctaagccaaaagaacaaagctggaggcatcacgctacctgacttcaaactatactacaaggctacagtaaccaaaacagcatggtactggtactaa

SEQ ID NO: 6588 - DNA, 1471 bp, Homo sapiens
  SIMILAR (958)..(1020): 851254mologous to Homo sapiens putative p150,accession number U93572,Smith-Waterman Score=92.
ctttaacaccccactgtcaacattagacagatcatcgagacagaaagttaacaaggatatccaggacgttatctcagctctgcatgaagcaggcctaatagacatctacagaactctccaccccaaatcaacagaatatacattcttctcagcaccacatcacacttattacaaaattgaccacatagttggaagtaaagcactccttagcaaatgtaaaagaacagaaatcacaacaaactgtctctcagacgacagagcaatcaaattagaactcaggattaagaaactcactcaaaactacacaactacatggaaactgaacaacctgctcctaagtgactactgggtaaacaacgaaatgaaggcagaaataaagatgttctttgaaaccaatgagaacaaagacacaatgtaccagaatctctgggacacattcaaagcagtgtgtagagggaaatttatagcagtaaatgcctacaagagaaagcaggaaagatctaaaatccacaccctaacatcacaactaaaagaaccagagaagcaagagcaaacacattcaaaagctagcagaaggcaagaaataactaagattagagcagaactgaaggagatagacacacaaaaaacccttcaaaaaatcagtgtatccaggagctggttttctgaaaggatcaacaaaattgatagactgatagcaagactaatgaagaagaaaagagagaagaatcaaatagatgcaataaaaaatgataaaggggatatcactattgatcccacagaaatgcaaactaccatcagagaatactataaaaacctctacgcaaataaacttgaaaatctagaagaaatggataaattcttggacacatatatcctcccaagactaaaccaggaagaagttgaattgccaaatagaccaataacaggctctgaaaatgaggcaataattaatagcctaccaacaaaaaaagtccaggaccagatgagttcacagccaaattctaccagaggtacaaaggttctggccagggcaatcaggcaagagaaagaaagagaggacactcaattaggaaaagaggaagtcaaattgttactgtttgcagaagacatgattgtgtatttagaaaaccccatcgtctcagcccaaaatctccttaagctgataaacaacttcagcaaagtctcaggatacaaaatcaatgtgcaaaaatcacaagcattcttacacaccaataacagacaaacagagagccaaatcatgagtgaatgcccactaacaattgcttcaaagagaataaaatacctaggaatccaacttacaagggatgtgaaggacctcttcaaggagaactacaaaccactgcttaacaaaataaaagaggacacaaaacaaatggaagaacattccacgctcatgtttaggaagaaacaatattgtgaaaatgaccatactgcccaaggtaattta

SEQ ID NO: 6589 - DNA, 1061 bp, Homo sapiens
  SIMILAR (58)..(1059): 821254mologous to Homo sapiens putative p150,accession number U93569,Smith-Waterman Score=1387.
cctccactggtgacacccaggcaaacagggtctggagtggacctccagcaaactccaacagacctgcagttgagggtcctgactattagaaggaaaactaacaaacagaaaggacatccaccaaaaccccatctgtatgtcaccatcatcaaagaccaaagaactctccaccccaaatcaacagaatatacattcttctcagcaccacatcccacttattctaaaattgaccacatagttggaagtaaagcactcctcagcaaatgtaaaagaacagaaattataacaaactgtctctcagaccatagtgcaatcaaattagaactcaggattaagaaactcactcaaaaccgctcaactacatggaaacttaacaatctgctcctgaatgactactgggtatataaagaaatgaaggcagaaataaagatgttctttgaaaccaatgagaacaaagacacaacataccagaatctctgggacacatttaaagcaatgtatagtgggaaatttatggcactaaatgcccacaagagaaagcagcaaagatctaaaattgacaccctaatatcacaattaacagaactagagaagcaagagcaaacacattcaaaagctagcagaaggcaagaaacaactaagatcagagcagaactgaaggagatagagacacaaaaaacccttcaaaaaatcaatgaatccaggagctggttttttgaaaagatcaacaaaattgatagaacactagcaagactaataaagaagaaaagagagaagaatcaaatagacacaataaaaaatgataaaggtgatatcaccaccgatcccacagaaatacaaactactgtttatattatttggtactggtacgcaaataaactagaaaatctagaagaaatggataaattcctggacacatataccctcccaatactaaaccaggaagaagttgaatccctgaatagaccaataacaggctctgaatttgaggcaataattaatagcctaccaaccaaaaaaagtccaggaccagatggattcacagctgaattctaccagag

SEQ ID NO: 6590 - DNA, 1584 bp, Homo sapiens
  SIMILAR (850)..(1575): 781254mologous to Homo sapiens putative p150,accession number U93565,Smith-Waterman Score=934.
atggtggaaggcacctcttcacagggcagcaggaaagagaatgtgttccaagtgaaggggtctcttgcagctgaatggggtaaatatggaatgcgattcaatgtgattcaaccagggcctataaaaaccaaaggtgcctttagccgtctggacccaactggaacatttgagaaagaaatgattggcagaattccctgtggtcgcctggggactgtagaagaactcgcaaatcttgctgctttcctttgtagtgattatgcttcttggattaatggagcacctccactggtgatacccaggcaaacagtgtctgcagtggacgtccagcaaactccaacagacctgcagctcagggtcctgactgttagaaggaaaactaacaaacagaaaggacatccacaccaaaaccccgtttcaccacatctcacttattccaaaattgaccacataggtggaagtaaagcactcctcagcaaatgtaaaagaacagaaattataacaaactgtctctcagaccacagtgcaatcaaacgacaactcaggtttaagaaactcactcaaaaccgctcaactacatggaaactgaacaacctgttcctgaatgactactgggtacataacgaaatgaaggcagaaataaagatgttctttgaagccaatgagaacaaagacacaacataccagaatctctgggacacatttaaagcagtgtgtagagggaaatttatagcactaaatgcccacaagagaaagcagggaagatctaaaatgggcaccctaacatcacaattaaaagaactagagaagcaagagcaaacacattcaaaagctagcagaaggcaagaaaagatacaaactcccatcagagaatactataaacaccactatgcagataaactagaaaatctagaagaaatggatacattcctgtacacatacactctcccaagactaaacctggaagaagttgaatccctgaatacaccaataacacactctgaaattgaggcaataattaaaagcctactaaccaaaaaaagtccaggaccagacagattcacagccaaattccaccagaggtacaaagaggagctggtaccattccttctgaaactattccaatcaatagaaaaagaggtaatcctccctgactcattttatgaggccagcatcatcctgatacgaaagcctggcagagatacaacaacaaaaaaagagaattttagaccaatattcctgatgaacattgatgcaaaaaacttcagtaaaatactggcaaaccaaatccagcagcacatcaaaaaggttatccaccacgatcaagtgggcctcatccctgggatgcaaggctggttcaacatacccaaatcaataaacataatccatcatataaacagaaccaaagacaaaaaccacatgattatctcaatagatgcagaaaaggccttcgacaaaattcaactgcccttcatgctaaaaactctcagtaaactaggagtcagttacaacatgttcactagactgactatccccattgcccaagttgacacaagaggaaaccagcttccatcttacctcatctga

SEQ ID NO: 6591 - DNA, 1284 bp, Homo sapiens
  SIMILAR (719)..(1162): 491254mologous to Homo sapiens 2,4-dienoyl-CoA reductase,accession number L26050,Smith-Waterman Score=271.
acgccgcctgggtcccagtccccgtcccatcccccggcggcctaggcagcgtttccagccccgagaactttgttctttttgtcccgccccctgcgcccaaccgcctgcgccgccttccggcccgagttctggagactcaacatgaagctaccggccagggttttctttactctggggtcccggctgccctgtggcctcgctcctcggaggtttttcagttatgggacaaaaatattatatcaaaacactgaagctttgcaatctaaattcttttcacctcttcaaaaagcgatgctaccacctaatagttttcaaggaaaagtggcattcattactgggggaggtactggccttggtaaaggaatgacaactcttctgtccagcctaggtgctcagtgcgtgatagccagccggaagatggatgttttgaaagctaccgcagaacaaatttcttctcaaactggaaataaggttcatgcaattcagtgtaatgtgaagtatcctgatatggttcaaaacactgtgtcagagctgatcaaagtgcagggacatcctagtactgtgataacaaatgcagcagggaattttatttctcctactgaaagactttctccctaatgctggaaaaaccaaaaacgaacatagtctaaaatggcacagccttcgtgacactagaaattggaaaacaactaattaaagcacagaaaggagcagcatttctttcctattacctactatctatgcctgagactggttcaggttttgtagtacccaagtgcttctgccaaagcaggtgtggaagcccatgagcaagtctcttgcagctgaatggggtaaaatatggaatgcgattcaatgttgatccaaccacgggcctataaaaaaccaagagttccctttagccgtctggacccaactggaacattttgagaaagaaatgattggcagaattccctgtggtcgcatggggactgtagaagaactccgcaaatcttgctgctttcctttgtagtgattatgcttcttgggattaatggagcagtcattaaatttgacggtggagtagaagtacttattttcaggggaattcaacgacctgagaaaggtcaccaaggagcagtgggacaccatagaagaactcatcaggaagacaaaaggttcctaagaccactttggccttcatcttggttacagaaaagggaatagaaatgaaacaaattatctctcatcttttgactatttcaagtctaataaattcttaattaacaaaaaaaaaaaaaaaca

SEQ ID NO: 6592 - DNA, 2902 bp, Homo sapiens
  SIMILAR (1)..(891): 551254mologous to Homo sapiens putative p150,accession number U93568,Smith-Waterman Score=707.
atggtaaagggatcacttcaacaagaagagctaactatcctaaatatatatgcacccaatacagaagcacccagattcataaagcaagtccttagagacctacaaagagacttagactcccacacattaataatgggagactttaacaccccactgtcaacattagacagatcaacgagacagaaaattaacaaggatacccaggaattgaactcagctctgtaccaagcggacctaatagacatctacggaactctccaccccaaatcaacaggaatatacattttttttcagcaccacaccacacctattcccaaaattggaccaccatagttggaagtaaagctctcctcagcgaacataaaagaacagaaattataaccaaactatctctcagacccacagtgccaatcaaactagaactcaggattaagaaactcactcaaaaccagctcagctacatggaaactgaacaacctgctcctgaatgactactgggtacataacgacatgaaggcagaaataaagatgttctttgaaaccaaaagagaacaaaggacacaacataccagaatctctggggacacattcaaagcagtgtgtagagggaaattcatagcaaaaaaatgcccacaacagaaagcaggaaagtatctaaaattgacaccctaacatcacaattaaaagaactagagaagaaagagcaaacatatttgaaagctagcagaaggcaagaaataactaagatcaaagcagaactgaaggagatagagacacaaaaaaacccttcaaaaaaaatcaatgaatccaggagctggtttttttgaaaagatcaataaaatagatagatagaccgctcagactaataaagaaaaaaagagagaagaatcaaatacacgcaataaaaaatgataaaggggatatcaccaccgatcccacagaaatacaaactaccatcagagaatactacaaacacctctacgcaaataaactagaaaatctagaagaaatggataaattcctcgacacatacaccctcccaagactaaaccaggaagaagttgaatctctgaatagaccaataacaggctctgaaattgtggcaataatcaatagcttaccaaccaaaaagagtccagtaccagatggattcacagctgaattctaccagaggtacaaggaggaactggtaccattccttctgaaactattccaatcaatagaaaaagagggaatcctccctaactcattttatgaggccagcatcattctgataccaaagccgggcagagacacaaccaaaaaagagaattttagaccaatatccttgatgaacattgatgcaaaaatcctcaataaaatactggcaaaccgaatccagcagcacatcaaaaagcttatccaccatgatcaagtgggcttcatccctgggatgcaaggctggttcaatatacgcaaatcaataaatgtaatccagcatataaacagagccaaagacaaaaaccacatgattatctcaatagatgcagaaaaagcctttgacaaaattcaacaacccttcatgctaaaaactctcaataaattaggtattgatgggatgtatttcaaaataataagagctatctatgacaaacccacagccaatatcatactgaatgggcaaaaactggaagcattccctttgaaaactggcacaagacagggatgccctctctcaccgctcctattcaacatagtgttggaagttctggccagggcaatcaggcaggagaaggaaataaagggtattcaattaggaaaagaggaagtcaaattgtccctgtttgcagacgacatgattgtttatctagaaaaccccatcgtctcagcccaaaatctccttaagctgataagcaacttcagcaaagtctcaggatacaaaatcaatgtacaaaaatcacaagcattcttatacaccaacaacagacaaacagagagccaaatcatgggtgaactcccattcacaattgcttcaaagagaataaaatacctaggaatccaacttacaagggatgtgaaggacctcttcaaggagaactacaaaccactgctcaaggaaataaaagaggacacaaacaaatggaagaacattccatgctcatgggtaggaagaatcaatatcgtgaaaatggccatactgcccaaggtaatttacagattcaatgccatccccatcaagctaccaatgactttcttcacagaattggaaaaaactactttaaagttcatatggaaccaaaaaagagcccgcattgccaagtcaatcctaagccaaaagaacaaagctggaggcatcacactccttgacttcaaactatactacaaggctacagtaaccaaaacagcatggtactggtaccaaaacagagacatagatcaatggaacagaacagagccctcagaaataatgccgcatatctacaactatctgatctttgacaaacctgagaaaaacaagcaatggggaaaggattccctatttaataaatggtgctgggaaaactggctagccatatgtagaaagctgaaactggatcccttccttacaccttatacaaaaatcaattcaagatggattaaagatttaaacgttaaacctaaaaccataaaaaccctagaagaaaacctaggcattaccattcaggacataggcgtgggcaaggacttcatgtccaaaacaccaaaagcaatggcaacaaaagacaaaattgacaaatgggatctaattaaactaaagagcttctgcacagcaaaagaaactaccatcagagtgaacaggcaacctacaacatgggagaaaattttcgcaacctactcatctgacaaagggctaatatccagaatctacaatgaactcaaaaaa

SEQ ID NO: 6593 - DNA, 5130 bp, Homo sapiens; identical to SEQ ID NO: 2332
  SIMILAR (2614)..(4473): 941254mologous to Homo sapiens putative p150,accession number U93572,Smith-Waterman Score=3044.

SEQ ID NO: 6594 - DNA, 3570 bp, Homo sapiens; identical to SEQ ID NO: 2157
  SIMILAR (790)..(2313): 951254mologous to Homo sapiens putative p150,accession number U93572,Smith-Waterman Score=2493.

SEQ ID NO: 6595 - DNA, 3666 bp, Homo sapiens; identical to SEQ ID NO: 2174
  SIMILAR (736)..(3006): 961254mologous to Homo sapiens putative p150,accession number U93563,Smith-Waterman Score=3773.

SEQ ID NO: 6596 - DNA, 3529 bp, Homo sapiens; identical to SEQ ID NO: 6262
  SIMILAR (305)..(1849): 891254mologous to Homo sapiens putative p150,accession number U93572,Smith-Waterman Score=2317.

SEQ ID NO: 6597 - DNA, 3235 bp, Homo sapiens; identical to SEQ ID NO: 2323
  SIMILAR (442)..(2988): 931254mologous to Homo sapiens putative p150,accession number U93563,Smith-Waterman Score=4078.

SEQ ID NO: 6598 - DNA, 3252 bp, Homo sapiens
  SIMILAR (595)..(2109): 891254mologous to Homo sapiens putative p150,accession number U93563,Smith-Waterman Score=2297.
atgaatctgagcagacacctgaatgaagtgaagggtgagcttctctggtcacttgaatggagagatccagatggtggtagcatcaggatggaggttggactcggaggttggactcaaaggttggaggaggagaaaaagggcaatgtctgttcccatgggaacctagagaaggactttccctatattccccacctctttgggcttcagcaaaagaaaatggacctcaagggagtcttcaagagctgcttcaaaatttactgttcatcaaagcacttgctgaagactggcttcatttcagaggctgtgctgtgttatggagaaggaggtgaaggagatacggtgcttaccatgaaggagaggtggccacatgaatgcatcgttttaatacagtgcaataagggcagactgacacctcacacggccagatactcctctgagacaaaacttccagaggaacgatcaggcagcagcatctgcggttcaccaatatccgctgttctgcagccaccgctgctgattcccaggcaaacagggtctggagtggacctccagcaaactccaacaaacctgcagctgagggtcctgactgttagaaggaaaactaacaaacagaaaggacatccacaccaaaaacccatctgtatgtcaccatcatcaaagaccaaagactttaaaccaacaaagatcaaaagagacaaagaaggccattacatcatggtaaagggatcaattcaacaggaagaactaactatcctaaatatatatgcacccaatacagaagcaccaagattcataaaacaagtccttagtgacctacaaagagacttagactcccacataataataatgggagactttaacaccccaatatcaacattagacagatcaatgagacagaaagttaacaaggatatccaggaattgaagtcagctctgcagcaagcagacctaatagacatctacagaactctccaccccaaatcaacagaatatacattcttttcagcaccacaccacacctattccaaaattgaccacatagttggaagtaaagcactcctcagcaaatgtaaaagaatggaaattataacaaactgtctctcagaccacagtgcaatcaaactagaactcaggattaaaaaactcactcaaaaccgctcaactacatggaaactgaacaacgtgctcctgaatgactactgggtacataacaaaatgaaggcagaaataaagatgttctttgaaaccaatgggaacaaagacacaacataccagaatttgtgggacacattcaaaggagtgtgtagagggaaatttatagcactaaatgcccacaagagaaagcaggaaggatctaaaattgacaccctaacatcacaattaaaagaactagagaagcaagagcaaacacattcaaaagttagcagaaggcaagaaataactaagatcagagcagaactgaaggaaatagagacacaaaaaacccttcaaaaaatcaatgaatccaggagctggttttttgaaaagttcaacaaaattgatagacggctagcaagactaataaagaagaaaagagagaagaatcaaatagacgcaataaaaaatgacaaacgggatatcaccactgatcccacagaaatacaaactaccatcagagaacactataaacacctctacgcaaataaactagaaaatctagaagaaatggataaattcctcgacacatacaccctcccaagactaaaccaggaagaagttgaatctctgaatagaccaataacaggctctgaaattgaggcaataattaatagcttaccaaccaaaaaaagtccaggaccagatggattaacagccaaattctaccagaggtacaaggaggagctggtaccattccttctgaaactattccaatcaatagaaaaagagggaatcctccctaactcattttatgaggtctgcatcatcctgataccaaagcctggcagaggcactacaaaaaaagagaattttagaccaatatccttgatgaacattgatgcaaaaatccttaataaaatactggcaaaccgaatccaacaactcatcaaaaagcttatccaccatgatcaacatataaacagaaccaaatacaaaaaccacatgattatctcaataaatgcagaaaaggcctttgacaaaattcaacagcgcttcatgctaaaaactctcaataaattaggtattgatgggacgtatctcaaaataataagagctatctatgacaaacccacagccaatatcatactgaatggacaaaaactggaagcattccctttggaaactggcacaagacagggatgccctctctcaccacccctattcaacatagtgttggaagttctggccagggcaatcaggcaggagaaggaaataaagggcattcaattaggaaaagaggaagtcaaattgtccttgtttgcagacgacatgattgtagatctagaaaatcccatcgtctccgcccaaaatctccttaagctgataagcaacttcagcaatgtctcaggatacaaaatcaatgtgcaaaaatcacaagcattcttatacaccaataacagacaaacagagagccaaatcatgagtgaactcccattcacaattgcttcaaagagtataaaatacctaggaatccaacttacaagggatgtgaaggacctcttcaaggagaactacaaaccactgctcaatgaaataaaagaggatacaaacaaatggaagaacattctatgctcatgggtaggaagaatcaatatcgtgaaaatggccatactgcccaaggtaatttatagattcaatgccatccccatcaagctgccaatgactttcttcacagaattggaaaaaacgactttcaagtatttagagtacatcaagtggctgtcgccgaagtcaggacaattggagacagtttcaaggggctgtgaatggagcaacaacaagaaaaaacactcattgagcacctgctctggcagagatccctgttcccatggagcttacatcctgaggagtgggggtggagatgggtcgaggacaggaaaagtgtcaatctgcaagtgtcaatctgaaatgcaagtgtcacagcagctccagagactccaaggaaatgactgcagctcagaggttacaaatgggagcttcaaccacaggttgattgcagacctgggacaggatgaaggacattgctgcaacacaagaggatcaaccagaaattga

SEQ ID NO: 6599 - DNA, 3300 bp, Homo sapiens; identical to SEQ ID NO: 3975
  SIMILAR (277)..(2088): 971254mologous to Homo sapiens putative p150,accession number U93563,Smith-Waterman Score=3088.

SEQ ID NO: 6600 - DNA, 4989 bp, Homo sapiens; identical to SEQ ID NO: 6054
  SIMILAR (85)..(2142): 971254mologous to Homo sapiens putative p150,accession number U93563,Smith-Waterman Score=3485.

SEQ ID NO: 6601 - DNA, 3405 bp, Homo sapiens
  SIMILAR (1330)..(3363): 941254mologous to Homo sapiens putative p150,accession number U93572,Smith-Waterman Score=3360.
atggcctcgtgcctagtcagccagtcaacatctgaagataacgggttccacagggtgcccacaagctctccaaagtcccaacgccagtctgccttcacggctgtccgaagtgctttatcactgtgggagctcattgtggttttggtttgtgttttcctgatgactggttgtaatgagaaaaaccgagaatcacatttaaaaccttaccctaaagtgggagttgctgagagaccaaagaatgactgggcggagtccagcttggtgagtagggacacctgctcctcgctgggcaccgtggcctggactcaccgcctggcctttagggttcaggccacagacatccgccctgaagtaacctggcgggaaccgccacgccacagcggtggtgctgggtggctgtgttttatttatccgcacatggagacaccagagcttccaggccttcctactaacaaagagttccaggcccacaagaggactggctatgaggaagagacctggaatctgaaggaatgtgttgggcgttgtgcgcacccacccgtaaatttcctgacaaagtggagcagcttctcggactacgtgcagtgcgtcctggccttcacgggcgtggcgggctacatcacctacctgtccattgactccgccctgtttgtggagaccctgggcttcctggctgtgctgaccgaagccatgctgggtgtgccccagctttaccgcaaccaccgccaccagtccacggagggcatgagagctacagaagcactgtgggtacgggagcaccacgggtacgggagcaccacgggtacgggagcaccacgggtacgggagcactgcggctatgagagcaccacgggtacgggagtgccgcaggtacaagagcgccgcgggtacgggagcaccgtgggtatgggagggtacgggagcactgcgggtacgagagcgccgcgggtacgggagcaccgtgggtatgggagggtacgggagcactgcgggtatgagagcaccgtgggtacgggagcgctgtgggtatgggagcgccatgggtacgggagcaccgtggagcgtccccgcagctggaatgtccccgcagccagcagagcccagcccagtgatggctccgtgcctgcagctgccatgctgcagagcgcacctgtgcgtcagggccccggggacgctaacacttttggctttagcgggtactgcttttggttacggaagaaggtggaatttttaagccccaatggcagcgtctcatctggaagatgtagaaaaggggaatcctatggagatttctcttatgaccaccccattttgggaacaactggtaacagactaaaccaggaagaagttgaatctctgaatagaccaataacaggatctgaaattgtggcaataatcaatagcttaccaaccaaaaagagtccaggaccagatggattcacagccgaattctaccagaggtacaaggaggaactggtaccattccttctgaaactattccaatcaatagaaaaagagggaatcctccctaactcattttatgaggccagcatcatcctgataccaaagctgggcagagacacaaccaaaaaagagaattttagaccaatatccgtgatgaacattgatgtaaaaatcctcaataaaatactggcaaaccgaatccagcagcacatcaaaaagcttatccaccatgatcaagtgggcttcatccctgggatgcaaggctggttcaatatacacaaatcaataaatgtaatccagcatataaacagaaccaaagacaaaaaccacatgattatctcaatacatgcagaaaaggcctttgacaaaattcaacaacacttcatgctaaaaactctcaataaattaggtattgatgggacgtatctcaaaataataagagctatctatgacaaacccacagccaatatcatactgaatgggcaaaaactggaagcattccctttgaaaattggcacaagacagggatgccctctctcaccactcctattcaacatagtgttggaagttctggccagggcaattaggcaggagaaggaaataaagggtattcaattaggaaaagaggtagtcaaattgtccctgtttgcagatgacatgattgtatatctagaaaaccccatcgtctcagcccaaaatctccttaagctgataagcaactttggcaaagtctcaggatacaaaatcaatgtacaaaaatcacaagcattcttatacaccaataacagacaaacagagagccaaatcatgagtgaactcccattcacaattgcttcaaagagaataaaatacctaggaatccaacttacaagggatgtgaaggacctcttcaaggagaactacaaaccactgctcaatgaaataaaagaggatacaaacaaatggaagaacattccatgctcatgggtaggaagaatcaatatcgtgaaaatggccgtactgcccaagctaccaatgactttcttcacagaattggaaaaaactactttaaagttcatatggaaccaaaaaagagcccgcatcgccaagtcaatcctaagccaaaagaacaaagctggaggcatcacgctacctgacttcaaactatactacaaggctacagtaaccaaaacagcatggtactggtaccaaaacagagatatagatcaatggaacagaacagagccctcagaaataacgctgcatatctacaactatctgatctttgacgaacctgagaaaaacaagcaatgtggaaaggattccctatttaataaatggtgctgggaaaactggctagccatatgtagaaagctgaaactggatcccttccttacaccttatacaaaaattaattcaagatggattaaagacttaaaagttagacctaaaaccataaaaaccctagaagaaaacctaggcattaccattcaggacataggcatgggcaaggacttcatgtctaaaacaccaaaagcaatggcaacaaaagccaaaattgacaaatgggatctaattaaactaaagagcttctgcgcagcaaaagaaactaccatcagagtgaacaggcagcctacaaaatgggagaaaattttcgcaacccacttatctgacaaagggctaatatccagaatctacaatgaactcaaacaaatttacaagaaaaaaacaaacaaccccatcaacaagtgggcaaaggatatgaacagacacttctcaaaagaagacatttatgcagccaaaagacacatgaaaaaatgctcatcatcactggccatcagagaaatgcaaatcaaaaccacaatgagataccatctcacaccagttagaatggcaatcattaaaaagtcaggaaacaacagtttcaggtacgtctttatcagcagcatgaaaatgaactaa

SEQ ID NO: 6602 - DNA, 3291 bp, Homo sapiens; identical to SEQ ID NO: 2324
  SIMILAR (1099)..(2649): 961254mologous to Homo sapiens putative p150,accession number U93564,Smith-Waterman Score=2592.

SEQ ID NO: 6603 - DNA, 3171 bp, Homo sapiens
  SIMILAR (712)..(2862): 991254mologous to Homo sapiens unknown,accession number AF148856,Smith-Waterman Score=3720.
atggggaaaaaacagaacagaaaaactggaaactctaaaacgcagagcgcctctcctcctccaaaggaacgcagttcctcaccagcaacagaacaaagctggatggagaatgattttgacgagctgagagaagaaggcttcagacgatcaaattactctgagctatgggaggacattcaaaccaaaggcaaagaagttgaaaactttgaaaaaaatttagaagaatgtataactagaataaccaatacagagaagtgcttaaaggagctgatggagctgaaaaccaaggctcgagaactacgtgaagaatgcagaagcctcaggagccgatgcgatcaactggaagaaagggtatcagcaatggaagatgaaatgaatgaaatgaagcgagaagggaagtttagagaaaaaagaataaaaagaaatgagcaaagcctccaagaaatatgggactatgtgaaaagaccaaatctacgtctgattggtgtacctgaaagtgatgtggagaatggaaccaagctggaaaacactctgcaggatattatccaggagaacttccccaatctagcaaggcaggccaacgttcagattcaggaaatacagagaacgccacaaagatactcctcgagaagagcaactccaagacacataattgtcagattcaccaaagttgaaatgaaggaaaaaatgttaagggcagccagagagaaagaaatacaaactaccatcagagaatactacaaacacctctacgcaaataaactagaaaatctagaagaaatggatacattcctcgacacatacactctcccaagactaaaccaggaagaagttgaatctctgaatagaccaataacaggctctgaaattgtggcaataatcaatagtttaccaaccaaaaagagtccaggaccagatggattcacagccgaattctaccagaggtacaaggaggaactggtaccattccttctgaaactattccaatcaatagaaaaagagggaatcctccctaactcattttatgaggccagcatcattctgataccaaagccgggcagagacacaaccaaaaaagagaattttagaccaatatccttgatgaacattgatgcaaaaatcctcaataaaatactggcaaaccgaatccagcagcacatcaaaaagcttatccaccatgatcaagtgggcttcatccctgggatgcaaggctggttcaatatacgcaaatcaataaatgtaatccagcatataaacagagccaaagacaaaaaccacatgattatctcaatagatgcagaaaaagcctttgacaaaattcaacaacccttcatgctaaaaactctcaataaattaggtattgatggtacatatttcaaaataataagagctatctatgacaaacccacagccaatatcatactgaatgggcaaaaactggaagcattccctttgaaaactggcacaagacagggatgccctctctcaccgctcctattcaacatagtgttggaagttctggccagggcaatcaggcaggagaaggaaataaagggtattcaattaggaaaagaggaagtcaaattgtccctgtttgcagacgacatgattgtttatctagaaaaccccattgtctcagcccaaaatctccttaagctgataagcaacttcagcaaagtctcaggatacaaaatcaatgtacaaaaatcacaagcattcttatacacgaacaacagacaaacagagagccaaatcatgggtgaactcccattcacaattgcttcaaagagaataaaatacctaggaatccaacttacaagggatgtgaaggacctcttcaaggagaactacaaaccactgctcaaggaaataaaagaggacacaaacaaatggaagaacattccatgctcatgggtaggaagaatcaatatcgtgaaaatggccatactgcccaaggtaatttacagattcaatgccatccccatcaagctaccaatgactttcttcacagaattggaaaaaactactttaaagttcatatggaaccaaaaaagagcccgcattgccaagtcaatcctaagccaaaagaacaaagctggaggcatcacactacctgacttcaaactatactacaaggctacagtaaccaaaacagcatggtactggtaccaaaacagagatatagatcaatggaacagaacagagccctcagaaataatgccgcatatctacaactatctgatctttgacaaacctgagaaaaacaagcaatggggaaaggattccctatttaataaatggtgctgggaaaactggctagccatatgtagaaagctgaaactggatcccttccttacaccttatacaaaaatcaattcaagatggattaaagatttaaacgttaaacctaaaaccataaaaaccctagaagaaaacctaggcattaccattcaggacataggcgtgggcaaggacttcatgtccaaaacaccaaaagcaatggcaacaaaagacaaaattgacaaatgggatctaattaaactaaagagcttctgcacagcaaaagaaactaccatcagagtgaacaggcaacctacaacatgggagaaaatttttgcaacctactcatctgacaaagggctaatatccagaatctacaatgaactcaaacaaatttacaagaaaaaaacaaacaaccccatcaaaaagtgggcgaaggacatgaacagacacttctcaaaagaagacatttatgcagccaaaaaacacatgaagaaatgctcatcatcactggccatcagagaaatgcaaatcaaaaccactatgagatatcatctcacaccatatctgaacacagtcattccttacgagaagaaagcctctcctccctcagtggaagacctgcagatgctgacaaacaatcaatctgtgcacttccttataaaatccagtttcagcaagaaccgtgtgaagtttagcaagaaccctctacccccaatatctgatcagggtcctcatcctctaccatcccccagggtttgggatgctctgacagacaattacatcccttcactctcagaagactggagggatccaaacatcgaggctctgaatggcaactgctctgacactgaggtacctctccggggcccctggtttagcagggcttga

SEQ ID NO: 6604 - DNA, 3519 bp, Homo sapiens
  SIMILAR (1345)..(2343): 901254mologous to Homo sapiens putative p150,accession number U93563,Smith-Waterman Score=1562.
atgaccagggccagagcactcagatctcagtcagaggagtctgcttctgcctttagtgctgatgaccttatgagtatagatttagcagaacagatggctaatgactctgatgatagcatctcagcagcaaccaacaaaggaagaggccgaggaagaggtcgaagaggtggaagagggcagaattcagcatcgagaggagggtctcaaagaggaagagcagacactggtctggagacttctacccgtagcaggaactcaaagactgctgtgtcagcatctagaaatatgtctattatagatgacttccctgagccagctgacctcttctggaagtacctggacttggccaccttcatcctgctctacatcctgcccctcctcatcatctctgtggcctacgctcgtgtggccaagaaactgtggctgtgtaatatgattggcgatgtgaccacagagcagtactttgccctgcggcgcaaaaagaagaagaccatcaagatgttgatgctggtggtagtcctctttgccctctgctggttccccctcaactgctacgtcctcctcctgtccagcaagagaacccggaaagagaataagggagaagctaaagaagagagaaagcagacaaaatgtagaggacaggcatggacaaggaggtatcccttggtggagcctgactcaggagaagacacaagtccccaggcagatcccaacgaattcatctcacctgtatttgaaggatccattccagatgaaaggctctatcgaatgtttgtcaataaaaaagtaacaatgttgagaccaaaggaagatgagaactcttggtttaacttatttgtgattcatcagaacaggagtaaacatggaagtactaacttcattccagaacaatttttggatgacttcattgatcttgttatctggggccatgaacatgagtgtaaaatagctccaaccaaaaatgaacaacagctgttttatatctcacaacctggaagctcagtggttacttctctttccccaggagaagctgtaaagaaacatgttggtttgctgcgtattaaagggaggaagatgaatatgcataaaattcctcttcacacagtgcggcagtttttcatggaggatattgttctagctaatcatccagacatttttaacccagataatcctaaagtaacccaagccatacaaagcttctgtttggagaagcctctgctgctgatacccaggcaaacagggtctgaagtggacctccggcaaactccaacagacctgaagctgagggtcccgactgttagaaggaaaactaacaaacagaaaggacatccacaccaaaaccccatctcaccacagtgcacttattccaaaattgaccacatagttggaagtaaagcactcctcagcaaatgtaaaagaacagaaattataacaaactctctcccagaacacagagcaatcaaactagatctcaggattaagaaactcactcaaaaccgctcaactacatggaaattgaacaacctgctcctgaatgactactgggtacataatgaaatgaaggcagaaataaagatgttctctgaaaccaaagagaacaaagacacaacataccacaatctctgggacacatttaaaacagtgtgtagggggaaatttatagcactaaatgcccacaagggaaaccaggaaagatctaaaattgacaccctaacatcacaattaaaagaacaagagaagcaagagcaaacacattcaaaagctagcagaaggcaagaaataactaacatcagagcagaactgaaggagatagagacacagaaaactcttcaaaaaatcaatgaatccaggagctggttttttgaaaagatcaacaaaattgatagaccgctagcaagactaataaagaagaaaagagagaagaatcaaatagatgcaataaaaaatgataaagcagatatcaccactaatcccacagaaatacaaactaccatcagagaatactataaacacctctatgcaaataaactagaaaatctggaagaaatggataatttcctcgacacatacaccctcccaagactaaaccaggaagaagttgaatctctgaatagaccaataacaggctctgaaatggaggcaataattaatagcctaccaaccaaaaaaagtccaggaccagacggattcacagccgatttctaccagaggtacaaggaggagctggtaccattccttctgaaactattccaatcaatagaaaaagagggaatcctccctaactcattttatgaggccagcatcgtcctgataccaaagcctggcagagacacaacaaaaagaattttagaccaatatcccagacgaacatcaatgcaaaaatcctcaatacaatactggcaaaccgaatccagcaacacatcaaaaagcttatccaccatgatcaagtgggcttcatccctgggatgcaaggctgtgttggaagttctggccagggcaatcaggcaggagaaggaaataaagggtattctgttaggaaaagaggaagtcaaattgtccctgtttgcagatgacatgatcgtatatctagaaaaccccatcatctcagcccaaaatctccttaagctgataagcaacttcagcaaagtctcaggatataaaatcaatgtgcaaaaatcacaagcattcttatacaccaataacagacaaacagagagccaaatcatgagtgaactcccattcacaattgcttcaaagacaataaaatacctaggaatccaacttacaagggatgtgaaggacctcttcaaggagaactacaaaccactgctcaaggaaataaaagaggatacaaacaaatggaagaatattccatgctcgtgggtaggaagaatcagtattgtgaaaatggccatactgcccaaggtaatttatagattcaatgccatccccatcaagctaccagtgactttcttcacagaattggagaaaactactttaaagttcatatggaaccaaaaaagagcccacattgccaagtcaatcctaaggcaaaagaacaaagctggaggcatcatgctacctgacttcaaactatactacaaggctacagtaaccaaaacagcatggttccagttaactctgggcttccgcctgggaacctgcagaaacaggagacgaatgcgattcctaaattaccccactgctggactcttcgaagccccacaatcgcgacccaaggctgtcttcttttcgggaagaaagggcaggatccgtgaaaagaaaacaacacggtctgaacttgcctctgagaacccgcagggccgtaaacctgaattccgcgggagagaacggcgtccgtttctctcgcgacacttcatggataacgtagatgcttcaagtccagttcggctctcattggctaccgcacgcagtgagggggcggggaaagtagcggcgaggccccgccctcacgcaggagccaatcctgagcaggctaggagacgaacccggaagtga

SEQ ID NO: 6605 - DNA, 3693 bp, Homo sapiens; identical to SEQ ID NO: 3978
  SIMILAR (836)..(976): 911254mologous to Homo sapiens unknown,accession number AF148856,Smith-Waterman Score=227.

SEQ ID NO: 6606 - DNA, 3357 bp, Homo sapiens; identical to SEQ ID NO: 6062
  SIMILAR (1)..(1755): 911254mologous to Homo sapiens putative p150,accession number U93563,Smith-Waterman Score=2724.

SEQ ID NO: 6607 - DNA, 3543 bp, Homo sapiens; identical to SEQ ID NO: 3976
  SIMILAR (1447)..(3276): 981254mologous to Homo sapiens putative p150,accession number U93574,Smith-Waterman Score=3162.

SEQ ID NO: 6608 - DNA, 3316 bp, Homo sapiens; identical to SEQ ID NO: 6063
  SIMILAR (1458)..(3314): 941254mologous to Homo sapiens putative p150,accession number U93572,Smith-Waterman Score=3039.

SEQ ID NO: 6609 - DNA, 4797 bp, Homo sapiens; identical to SEQ ID NO: 6066
  SIMILAR (1)..(3093): 991254mologous to Homo sapiens unknown,accession number AF148856,Smith-Waterman Score=5349.

SEQ ID NO: 6610 - DNA, 3573 bp, Homo sapiens; identical to SEQ ID NO: 5633
  SIMILAR (1501)..(3390): 961254mologous to Homo sapiens putative p150,accession number U93572,Smith-Waterman Score=3179.

SEQ ID NO: 6611 - DNA, 3384 bp, Homo sapiens; identical to SEQ ID NO: 6067
  SIMILAR (1)..(3129): 981254mologous to Homo sapiens unknown,accession number AF148856,Smith-Waterman Score=5357.

SEQ ID NO: 6612 - DNA, 3432 bp, Homo sapiens; identical to SEQ ID NO: 3990
  SIMILAR (1)..(2961): 961254mologous to Homo sapiens putative p150,accession number U93567,Smith-Waterman Score=4958.

SEQ ID NO: 6613 - DNA, 3783 bp, Homo sapiens; identical to SEQ ID NO: 6069
  SIMILAR (1)..(3156): 951254mologous to Homo sapiens putative p150,accession number U93565,Smith-Waterman Score=5296.

SEQ ID NO: 6614 - DNA, 3897 bp, Homo sapiens; identical to SEQ ID NO: 6071
  SIMILAR (1)..(2748): 971254mologous to Homo sapiens unknown,accession number AF149422,Smith-Waterman Score=4641.

SEQ ID NO: 6615 - DNA, 3726 bp, Homo sapiens; identical to SEQ ID NO: 6072
  SIMILAR (1)..(3249): 981254mologous to Homo sapiens unknown,accession number AF148856,Smith-Waterman Score=5590.

SEQ ID NO: 6616 - DNA, 3174 bp, Homo sapiens
  SIMILAR (394)..(3054): 811254mologous to Homo sapiens putative p150,accession number U93572,Smith-Waterman Score=3730.
atggtaaagggatcaattcaacaagaagagctaactatcctaaatatctatgcacccaatacaggagcacccagattcataaagcaagtcctgagtgacctacaaagagacttagactcccacacattaataatgggagactttaacaacccactgtcaacattagacagatcaatgagacagaaagtcaacaaggatacccaggaattgaactcagctctgcaccaagtggacctaatagacatctacagaactctccaccacaaatcaacagaatatagatttttttcagcaccacaccacacctattccaaaattgaccacatacttggaagtaaagctctcctcagcaaatgtaaaaggacagagattataacaaactatctctcaggccacagtgcaatcaaactagaactcaagattaagaatctcactcaaaaccgctcaactacatggaaactgaacaacctgctcctgaatgactactggatacataacgaaatgaaggcagaaataaagatgttctttgaaaccaatgagaacaaagacacaacataccagaatctctgggatgcattcaaagcagtgtgtagagggaaatttatagcactaaatgcccacaagagaaagcaggaaagatccaaaattgacaccctaacatcacaattaaaagaactagaaaagcaagagcaaacacattcaaaagctggcagaaagaaagaaataactaaaatcagagcacaactgaaggaaatagagacacaaaaaacccttaaaaaattaatgaatccaggagctgaaatacaaactaccatcagagaatactacaaacacctctatgcaaagaaactagaaaatctagaagaaatggataaattcctcgacacatacactctcccaagactaaaccaggaagaagttgaatctctgaatagaccaataacaggagctgaaattgtggcaataatcaatagtttaccaaccaaaaagagtccaggaccagatggattcacagccaaattctaccagaggtacaaggaggaactggtaccattccttctgaaattattccaatcaatagaaaaagagggaatcctccctaactctttttatgaggccagcatcattctgataccaaagccaggcagagacacaacaaaaaaagagaattttagaccaatatccttgatgaacattgatgcaaaaatcctcaataaaatactggcaaaacgaatccagcagcacatcaaaaagcttatccaccatgatcaagtgggcttcatccctgggatgcaaggctggttcaatatacacaaatcaataaatgtaatccagcatataaacagacccaaagacaaaaaccacatgattatctcaatagatgcagaaaaagcctttgacaaaattcaacaacccttcatgctaaaaactctcaataaattaggtattgatgggacgtatttcaaaataataagtgctatctatgacaaacccacagccaatatcatactgaatgggcaaaaagtggaagcattccctttgaaaactggcacaagacagggatgccctctctcaccactcctattcaacatagtgttggaagttctggccagggcaattaggcaggagaaggaaataaagggtattcaattaggaaaagaggaagttaaattgtccctgtttgcagacgacatgattgtatatctagaaaaccccatcgtctcagcccaaaatctccttaagctgataagcaacttcagcaaagtctcaggatacaaaatcaatgtacaaaaatcacaagcattcttatacaccaacaacagacaaacagagagccaaatcatgagtgaactcccattcacaattgcttcaaagagaataaaatacctaggaatccaacttacaagggatgtgaaggacctcttcaaggagaactacaaaccactgctcaaggaaataaaagaggatacaaacaaatggaagaacattccatgctcatgggtaggaagaatcaatatcgtgaaaatggccatactgcccaaggtaatttacagattcaatgccatccccatcaagctaccaatgactttcttcacagaattggaaaaaactactttaaagttcatatggaaccaaaaaagagcccgcatcgccaagtcaattctaagccaaaagaacaaagctggaggcatcacactacctgacttcaaactatactacaaggctacagtaaccaaaacagcatggtactggtaccaaaacagagatctagatcaatggaacagaacagagccctcagaaataacgccgcatatctacagctatctgatctttgacaaacctgagaaaaacaagcaatggggaaaggattccctatttaataaatggtgctgggaaaactggctacccatatgtagaaagctgaaactggatcccttccttacaccttatacaaaaatcaattcaagatggattaaagacttaaatgttagacctaaaaccataaaaaccctaaaagaaaacctaggcattaccattcaggacataggcatgggcaaggacttcatgtctaaaacaccaaaagcaatggcaacaaaagacaaaattgacaaatgggatctaattaaactaaagagcttctgcacagcaaaagaaactaccatcagagtgaacaggcaacctacaaaatgggagaaaattttcgcaacctactcatctgacaaagggctaatatcaagaatctacaatgaactcaaacaaatttacaagaaaaaaacaaacaaccccatcaacaagtgggtgaaggacatgaacagacacttctcaaaagaagacatttatgcagccaaaaaacacatgaaaaaatgctcatcatcactggccatcagagaaatgcaaatcaaaaccacaatgagataccatctcacaccacttagaatggcgatcattaaaaagtcaggaaacaacagaacttgggaatataacatactttgttctcttgtgcctctcctgtgttccctcttgtggctgcacctgactgaccatcacctaaaagaggacagaacaaaacacttgacagctagtgataaccttgaaaaaacagaactcagcagatggaaggagagagccctactgtatgagcatcgtgtgctgagacctgctattgactcccag

SEQ ID NO: 6617 - DNA, 4401 bp, Homo sapiens
  SIMILAR (712)..(3681): 961254mologous to Homo sapiens unknown,accession number AF149422,Smith-Waterman Score=4982.
atggggaaaaaacagaacagaaaaactggaaactctaaaacgcagagcgcctctcctcctccaaaggaacgcagttcctcaccagcaacagaacaaagctggatggagaatgattttgacgagctgagagaagaaggcttcagacgatcaaattactctgagctacgggaggacattcaaaccaaaggcaaagaagttgaaaactttgaaaaaaatttagaagaatgtataactagaataaccaatacagagaagtgcttaaaggagctgatggagctgaaaaccaaggctcgaaaactacgtgaagaatgcagaagcctcaggagccgatgcgatcaactggaagaaagggtatcagcaatggaagatgaaatgaatgaaatgaagcgagaagggaagtttagagaaaaaagaataaaaagaaatgagcaaagcctccaagaaatatgggactatgtgaaaagaccaaatctacgtctgattggtgtacctgaaagtgatgtggagaatggaaccaagttggaaaacactctgcaggatattatccaggagaacttccccaatctagcaaggcaggccaacgttcagattcaggaaatacagagaacaccacaaagatactcctcgagaagagcaactccaagacacataattgtcagattcaccaaagttgaaatgaaggaaaaaatgttaagggcagccagagagaaagacagatcaacgagacagaaagtcaacaaggatacccaggaattgaactcagctctgcaccaagcagacctaatagacatctacagaactctccaccccaaatcaacagaatatacatttttttcagcaccacaccacacctattccaaaattgaccacatagttggaagtaaagctctcctcagcaaatgtaaaagaacagaaattataacaaactatctctcagaccacagtgcaatcaaactagaactcaggattaagaatctcactcaaagccgctcaactacatggaaactgaacaacctgctcctgaatgactactgggtacataacgaaatgaaggcagaaataaagatgttctttgaaaccaatgagaacaaagacacaacataccagaatctctgggacgcactcaaagcagtgtgtagagggaaatttatagcactaaatgcccacaagggaaagcaggaaagatctgaaattgacaccctaacatcacaattaaaagaactagaaaagcaagagcaaacacattcaaaagctagcagaaggcaagaaataactaaaatcagagcagaactgaaggaaatagagacacaaaaaacccttcaaaaaatcaatgaatccaggagctggttttttgaaaggatcaacaaaattgatagaccgctagcaagactaataaagaaaaaaagagagaagaatcaaatagacacaataaaaaatgataaaggggatatcaccaccgatcccacagaaatacaaactaccatcagagaatactacaaacacctctacgcaaataaactagaaaatctagaagaaatggatacattccttgacacatacactctcccaagactaaaccaggaagaagttgaatctctgaatcgaccaataacaggttctgaaattggggcaataatcaatagtttaccaaccaaaaagagtccaggaccagatggattcacagccgaattctaccagaggtacaaggaggaactggtaccattccttctgaaactattccaatcaatagaaaaagagggaatcctccctaactcattttatgaggccagcatcattctgataccaaagccgggcagagacacaacaaaaaaagagaattttagaccaatatccttgatgaacattgatgcaaaaatcctcaataaaatactggcaaaccaaatccagcagcacatcaaaaagcttatccaccatgatcaagtgggcttcatccctgggatgcaaggctggttcaatatacgcaaatcaataaatgtaatccagcatataaacagagccaaagacaaaaaccacatgattatctcaatagatgcagaaaaagcctttgacaaaattcaacaacccttcatgctaaaaactctcaataaattaggtattgatgggacgtatttcaaaataataagagctatctatgacaaacccacagccaatatcatactgaatgggcaaaaactggaagcattccctttgaaaactggcacaagacagggatgccctctctcaccgctcctattcaacatagtgttggaagttctggccagggcaatcaggcaggagaaggaaataaagggtattcaattaggaaaagaggaagtcaaattgtccctgtttgcagacgacatgattgtttatctagaaaaccccatcgtctcagcccaaaatctccttaagctgataagcaacttcagcaaagtctcaggatacaaaatcaatgtacaaaaatcacaagcattcttatacaccaacaacagacaaacagagagccaaatcatgggtgaactcccattcacaattgcttcaaagagaataaaatacctaggaatccaacttacaagggatgtgaaggacctcttcaaggagaactacaaaccactgctcaaggaaataaaagaggacacaaacaaatggaagaacattccatgctcatgggtaggaagaatcaatatcgtgaaaatggccatactgcccaaggtaatttacagattcaatgccatccccatcaagctaccaatgactttcttcactgaattggaaaaaactactttaaagttcatatggaaccaaaaaagagcccgcatcgccaagtcaatcctaagccaaaagaacaaagctggaggcatcacactacctgacttcaaactatactacaaggctacagtaaccaaaacagcatggtactggtaccaaaacagagatatagatcaatggaacagaacagagccctcagaaataatgccgcatatctacaactatctgatctttgacaaacctgagaaaaacaagcaatggggaaaggattccctatttaataaatggtgctgggaaaactggctagccatatgtagaaagctgaaactggatcccttccttacaccttatacaaaaatcaattcaaaatggattaaagatttaaacgtcagacctaaaaccataaaaaccctagaagaaaacctaggcattaccattcaggacataggcgtgggcaaggacttcatgtccaaaacaccaaaagcaatggcaacaaaagccaaaattgacaaatgggatctaattaaactaaagagcttctgcacagcaaaagaaactaccatcagagtgaacaggcaacctaccacatgggagaaaattttcgcaacctactcatctgacaaagggctaatatccagaatctacaatgaactcaaacaaatttacaagaaaaaaacaaacaaccccatcaaaaagtgggcgaaggacatgaacagacacttctcaaaagaagacatttatgcagccaaaaaacacatgaagaaatgctcatcatcactggccatcagagaaatgcaaatcaaaaccactatgagatatcatctcacaccaactgcttgtttggaaacagcggaggaacaacaactaaataacatggagtgcgcaggcaccgaagctataaacagcctcatcagcattgccctcctgcccaagggtggaatgagccgtatcttgattgagactcaaggggacaggaccctgaagtggcacaaagagcgagcagtgtgcggagcccatatgcaggcccgagcggggcagacgacgcacagcgcaggaggatttctgctcccgcctggaattcatttgcagtcattaccttgtgggtgcgaagagttgcccagaaaacagaggatggaaagaaatcagcctccaggagtaagaactggtacaactcccttccccaagatgaaacccgaggacacagtgatagtcacaactgggtcagcccaaaagcttgcatgtggtctgccacacacacactgggagaaagcgaatgctgcctcctttaaggacacctcaggggcatccaaggtcatccacgacagcctgatatgggcctttcagctcatgactttcacctgggattggttctcatttctaagtggcacttcctcccccgtggagctttctggggacacttcatggaagtggcaaaatggtcagtggaagttccaggctttcatcaccccttcagcctccagcacacccagaaaaaccagggtgcccactctttcccccacatccgtgggcatctcccggaaggtctttgatgaaccccagttaggtctgaatcttgtgctggatgagtcacagggacactatccagccacagtggctggtcccagtagttga

SEQ ID NO: 6618 - DNA, 3855 bp, Homo sapiens
  SIMILAR (535)..(3480): 951254mologous to Homo sapiens putative p150,accession number U93563,Smith-Waterman Score=4898.
aaatatgggactatgtgaaaagaccaaatctacgtctgattggtgtacctgaaagtgatgcggagaatggaaccaagttggaaaacactctacaggatattatccaggagaacttccccaatctagcaaggcaggccaacgttcagattcaggaaatacagagaacgccacaaagatactcctcgagaagagcaactccaagacacataattgtcagattcaccaaagttgaaatgaaggaaaaaatgttaagggcagccagagagaaaggtcgggttaccctcaaagggaagcccatcagactaacagcggatctctcggcagaaaccctacaagctagaagagagtgggggccaatattcaacattcttaaagaaaagaattttcaacccagaatttcatatccagccaaactaagcttcataagtgaaggagaaataaaatactttacagacaagcaaatgctgagagattttgtcaccaccaggcctgccctaaaagagctcctgaaggaagcgctaagcatggaaaggaacaaccgacagatcaacgagacagaaagtcaacaaggatacccaggaattgaattcagctctgcaccaagcggacctaatagacatctacagaactctccaccccaaatcaacagaatatacatttttttcagcaccacaccacacctattccaaaattgaccacatacttggaagtaaagctctcctcagcaaatgtaaaagaacagaaattataacaaactatctctcagaccacagtgcaatcaaactagaactcaggattaagaatctcactcaaaactgctcaactacatggaaactgaacaacctgctcctgaatgactactgggtacataacgaaatgaaggcagaaataaagatgttctttgaaaccaatgagaacaaagacacaacataccacaatctctgggatgcattcaaagcagtgtgtagagggaaatttatagcactaaatgcccacaagagaaagcaggaaagatccaaaattgacaccctaacatcacaattaaaagaactagaaaagcaagagcaaacacattcaaaagctagcagaaggcaagaaataactaaaatcagagcagaactgaaggaaatagagacacaaaaaacccttcaaaaaattaacgaatccaggagctgggtttttgaaaggatcaacaaaattgatagaccgctagcaagactaacaaagaaaaaaagcgagaagaatcaaatagatgcaataaaaaatgataaaggggatatcaccaccgatcctacagaaatacaaactaccatcagagaatactacaaacacctctacgcaaataaactagaaaatctagaagaaacggataaattcctcgacacatacactctcccaagacgaaaccaggaagaagttgaatctctgaatagaccaataacaggagctgaaattgtggcaataatcaataacttaccaaccaaaaagagtccaggatcagatggattcacagccgaattctaccagaggtacaaggaggaactggtaccattccttctgaaactattccaatcaatagaaaaagagggaatcctccctaactcattttatgaggccagcatcatcctgataccaaagccgggcagagacacaaccaaaaaagagaattttagaccaatatccttgatgaacattgatgcaaaaatcctcaataaaatactggcaaaccaaatccagcagcacatcaaaaagcttatccaccatgatcaagtgggcttcatccctgggatgcaaggctggttcaatatatgcaaatcaataaatgtaatccagcatataaacagaaccaaagacaaaaaccacatgattatctcaatagatgcagaaaaggcctttgacaaaattcaacaacccttcatgctaaaaactctcaataaattaggtattgatgggacttatctcaaaataataagagctatctatgacgaacccacagccaatatcatactgaatgggcaaaaactggaagcattccctttgaaaactggcacaagacagggatgccctctctcaccactcctattcaacatagtgttggaagttctggccagggcaattaggcaggagagggaaataaagggtattcaattaggaaaagaggaagtcaaattgtccctgtttgcagatgacatgattgtatatctagaaaaccccattgtctcagcccaaaatctccttaagctgataagcaacttcggcaaagtctcaggatacaaaatcaatgtacaaaaatcacaagcattcttaaacaccaacaacagacaaacagagagccaaatcatgagtgaactcccattcacaattgcttcaaagagaataaaatacctaggaatccaacttacaagggatgtgaaggacctcttcaaggagaactacaaaccactgctcaaggaaataaaagaggatacaaacaaatggaagaacattccatgctcatgggtaggaagaatcaatatcatgaaaatggccatactgcccaaggtaatttacagattcaatgccatccccatcaagctaccaatgactttcttcacagaattggaaaaaactactttaaagttcatatggaaccaaaatagagcctgcatcgccaagtcaatcctaagccaaaagaacaaagctggaggcatcacactacctgacctcaaactatactacaaggctacagtaaccaaaacagcatggtactggtaccaaaacagagatatagatcaatggaacagaacagagccctcagaaataacgctgcatatctacaactatctgatctttgacaaacctgagaaaaacaagcaatggggaaaggattccctatttaataaatggtgctgggaaaactggctagccatatgtagaaagctgaaactggatcccttccttacaccttatacaaaaatcaattcaagatggattaaagacttaaacattagacctaaaaccataaaaaccctagaagaaaacctaggcattaccattcaggacataggcatgggcaaggacttcatgtctaaaacaccaaaagcaatggcaaccaaagccaaaattgacaaatgggatctaattaaactaaagagcttctgcacagcaaaagaaactaccatcagagtgaacaggcaacctacaaaatgggggaaaattttcgcaacctactcatctgacaaagggctaatatccagaatctacaatgaactcaaacaaatttacaagaaaaaaacaaacaaccccatcaaaaagtttgcaaaggatatgaacagacacttctcaaaaaaagacatctatgcagccaaaaaacacatgaaaaaatgctcaccatcactggccatcagagaaatgcaaatcaaaaccacaatgagataccatctcacaccagttagaatggcaatcattaaaaagtcaggaaacaacagaactggccgtggtttacatccaggaagggattggtcagtcacctgtgccaggtccccgggggatcctgagcccagcggtataaagggtggctgtgggagtggcacaccctctcccagccccagcaagcaaaccgtcaggcggccgtggactcagatcccggagatgaagcccctgctcctggccgtcagcctcggcctcattgctgccctgcaggcccaccacctcctggcctcagacgaggagattcaggatgtgtcagggacgtggtatctgaaggccatgacggtggacagggagttccctgagatgaatctggaatcggtgacacccatgaccctcacgaccctggaagggggcaacctggaagccaaggtcaccatgctgtga

SEQ ID NO: 6619 - DNA, 5709 bp, Homo sapiens
  SIMILAR (712)..(3513): 981254mologous to Homo sapiens putative p150,accession number U93563,Smith-Waterman Score=4814.
atggggaaaaaacagaacagaaaaactggaaactctaaaacgcagagcgcctctcctcctccaaaggaacgcagttcctcaccagcaacagaacaaagctggatggagaatgattttgacgagctgagagaagaaggcttcagacgatcaaattactctgagctatgggaggacattcaaaccaaaggcaaagaagttgaaaactttgaaaaaaatttagaagaatgtataactagaataaccaatacagagaagtgcttaaaggagctgatggagctgaaaaccaaggctcgagaactacatgaagaatgcagaagcctcaggagccgatgcgatcaactggaagaaagggtatcagcaatggaagatgaaatgaatgaaatgaagcgagaagggaagtttagagaaaaaagaataaaaagaaatgagcaaagcctccaagaaatatgggactatgtgaaaagaccaaatctacgtctgattggtgtacctgaaagtgatgtggagaatggaaccaagttggaaaacactctgcaggatattatccaggagaacttccccaatctagcaaggcaggccaacgttcagattcaggaaatacagagaatgccacaaagatactcctcgagaagagcaactccaagacacataattgtcagattcaccaaagttgaaatgaaggaaaaaatgttaagggcagccagacagaaagcaccacaccacacctattccaaaattgaccacatagttggaagtaaagctctcctcagcaaatgtaaaagaacagaaattataacaaactatctctcagaccacagtgcaatcaaactagaactcaggattaagaatctcactcaaagccgctcaactacatggaaactgaacaacctgctcctgaatgactactgggtacataacgaaatgaaggcagaaataaagatgttctttgaaaccaacgagaacaaagacaccacataccagaatctctgggacacattcaaagcagtgtgtagagggaaatttatagcactaaatgcctacaagagaaagcaggaaacatccaaaattgacaccataacatcacaattaaaagaactagaaaagcaagagcaaacacattcaaaagctagcagaaggcaagaaataactaaaatcagagcagaactgaaggaaatagagacacaaaaaacccttcaaaaaatcaatgaatccaggagctggttttttgaaaggatcaacaaaattgatagaccgctagcaagactaataaagaaaaaaagagagaagaatcaaatagacacaataaaaaatgataaaggggatatcaccaccgatcccacagaaatacaaactaccatcagagaatactacaaacacctctacgcaaataaactagaaaatctagaagaaatggatacattcctcgacacatacactctcccaagactaaaccaggaagaagttgaatctctgaatagaccaataacaggctctgaaattgtggcaataatcaatagtttaccaaccaaaaagagtccaggaccagatggattcacagccgaattctaccagaggtacaaggaggaactggtaccattccttctgcaactattccaatcaatagaaaaagagggaatcctccctaactcattttatgaggccagcatcattctgataccaaagccgggcagagacacaaccaaaaaagagaattttagaccaatatccttgatgaacattgatgcaaaaatcctcaataaaatactggcaaaccgaatccagcagcacatcaaaaagcttatccaccatgatcaagtgggcttcatccctgggacgcaaggctggttcaatatacgcaaatcaataaatgtaatccagcatataaacagagccaaagacaaaaaccacatgattatctcaatagatgcagaaaaagcctttgacaaaattcaacaacccttcatgctaaaaactctcaataaattaggtattgatgggacatatttcaaaataataagagctatctatgacaaacccacagccaatatcatactgaatgggcaaaaactggaagcattccctttgaaaactggcacaagacagggatgccctctctcaccgctcctattcaacatagtgttggaagttctggccagggcaatcaggcaggagaaggaaataaagggtattcaattaggaaaagaggaagtcaaattgtccctgtttgcagacgacatgattgtttatctagaaaaccccatcgtctcagcccaaaatctccttaagctgataagcaacttcagcaaagtctcaggatacaaaatcaatgtacaaaaatcacaagcattcttatacaccaataacagacaaacagagagccaaatcatgagtgaactcccattcacaattgcttcaaagagaataaaatacctaggaatccaacttacaagggatgtgaaggacctcttcaaggagaactacaaaccactgctcaaggaaataaaagaggacacaaacaaatggaagaacattccatgctcatgggtaggaagaatcaatatcgtgaaaatggccatactgcccaaggtaatttacagattcaatgccatccccatcaagctaccaatgactttcttcacagaattggaaaaaactactttaaagttcatatggaaccaaaaaagagcctgcatctccaagtcaatcctaagccaaaagaacaaagctggaggcatcacactacctgacttcaaactatactacaaggctacagtaaccaaaacagcatggtactggtaccaaaacagagatatagatcaatggaacagaacagagccctcagaaataatgccacatatctacaactatctgatctttgacaaacctgagaaaaacaagcaatggggaaaggattccctatttaataaatggtgctgggaaaactggctagccatatgtagaaagctgaaactggatcccttccttacaccttatacaaaaatcaattcaagatggattaaagatttaaacgttagacctaaaaccataaaaaccctagaagaaaacctaggcattaccattcaggacataggcgtgggcaaggacttcatgtccaaaacaccaaaagcaatggcaacaaaagccaaaattgacaaatgggatctaattaaactaaagagcttctgcacagcaaaagaaactaccatcagagtgaacaggcaacctacaacatgggagaaaattttcacaacctactcatctgacaaagggctaatatccagaatctacaatgaactcaaacaaatttacaagaaaaaaacaaacaaccccatcaaaaagtgggcgaaggacatgaacagacacttctcaaaagaagacatttatgcagccaaaaaacacatgaagaaatgctcatcatcactggccatcagagaaatgcaaatcaaaaccactatgagatatcatctcgcaccagttagaatggcaatcattaaaaagtcaggaaacaacagacttcttggaagtgccctagaatcagcaggtccaaatcaaactcagctggccgtgggtcagccattgcagccccacctgccacgggctccaggaagagcagtcatcagtatggagaaggccggactatgctcagaagccactgagcaggtgctccatagactcaccagctggagcggggtcacatctcggaggcaccgtcagcaccaggagggcagccaagcaagggtatggcatttccgagcctctgcggtcaagggtatcgcatttccgagcctctgcggtcaagggtatggcgtttccgagcctctgcggtcaagggtatggcgtttccgagcctctgcagtcaagagcccagagatgggttgtcggggcagctgtgggggcatcccagatgtgggtgccaacatgcttgatgacctgacaccagtgcatcatgacctgacaccagcgcgcaatgacctgacaccagtgcacgatgacctggcaccagtgcgtgatgacctgacaccagtgcgtcatgacctgacaccagtgcgtgatgacctggcaccagtgcgtgatgacctgacaccagtgtgtgatgacctggcaccagtgtgcgatgacgtggccccagtgtgccatgacctggcaccagtgtgtgatgacctgacaccagtgtgtgatgacctggcaccagtgcacaatgaccttgcagcaatccagacctacctgcaagctgcaagcgatgtgcctgtgggacacagcctggaccccgctgcgaactacaactccccgaaattccgctcccggaaccagagatacatgagggccgtcagcaccctgagccaggccagctgcgtgagccaggtgagcgaggcggagatcaatgggcaattcgagtccgtgtgcgagtccgtcttcagtgaagttgaatctcaggccatggatgccctcgacctcccgggatgtttccgaacaaggagtcacagctaccttcgagccattcaagccggctactcccaagatgacgaatgtattcccatgatgacaccctctgacatcacctccaccatcaggtcaacagcagaaggcgagcgtgatgcagataaatcgtgcatctgtatcaggaactgcatatgtaagccagaattgctcgggttttcagatattgtggagatggaagtactgttgaatctgcctcccatacccctcgaacccgccggtcctcacctgtgtcaccctccaacccgccggccctcacctgtgtcaccctcgaccccgccggtcctcacctgtgtcaccctccaacccgccggccctcacctgtgtcaccctcgaccccgccggccctcacctgtgtcaccctcgaccccgccggccctcacctgtgtcaccctcgaccccgccggtcctcacctgtgtcaccctcgaccccgccggtcctcacctgtgtcaccctccaacccgccggccctcacctgtgtcaccctcgaccccgccggtcctcacctgtgtcaccctccaacccgccggccctcacctgtgtcaccctcgaacccgccggccctcacctgtgtcaccctcgaccccgccggtcctcacctgtgtcaccctccaacccgccggtcctcacctgtgtcaccctccaacccgccggccctcacctgtgtcaccctccaacccgccggccctcacctgtgtcaccctccaacccgccggcccccacctgtgtcaccctccaacccgccggccctcacctgtgtcaccctcgaccccgccggtcctcacctgtgtcaccctccaacccgccggtcctcacctgtgtcaccctcgaccccgccggtcctcacctgtgtcaccctcacaaccatccggccctcacatgtgtcacccacgaccccgccggtcctcacctgtgtcaccctcgaccccgccggtcctcacctgtgtcaccctccaacccgccggccctcacctgtgtcaccctcgaccccgccggccctcacctgtgtcaccctccaacccgccggccctcacctgtgtcaccctccaacccgccggccctcacctgtgtcaccctccaacccgccggccctcacatgtgtcaccctcgaccccgccggtcctcacctgtgtcaccctcgaccccgccggtcctcacctgtgtcaccctccaacccgccggtcctcacctgtgtcacccctcggggctga

SEQ ID NO: 6620 - DNA, 5215 bp, Homo sapiens
  SIMILAR (1016)..(3895): 981254mologous to Homo sapiens putative p150,accession number U93565,Smith-Waterman Score=4911.
atggggaaaaaacagaacagaaaaactggaaactctaaaacgcagagtgcctctcctcctccaaaggaacgcagttcctcaccagcaacggaaaaaagctggatggagaatgactttgacgagctgagagaagaaggtttcagacgatcaaattactctgagctacgggaggacattcaaaccaaaggcaaagaagttgaaaactttgaaaaaaatttagaagaatgtataactagaataaccaatacagagaagtgcttaaaggagctgatggagctgaaaaccaaggctcgagaactacgtgaagaatgcagaagcctcaggagccgatgtgatcaactggaagaaagggtatcagcaatggaagatgaaatgaatgaaatgaagcgagaagggaagtttagagaaaaaagaataaaaagaaatgagcaaagcctccaagaaatatgggactatgtgaaaagaccaaatctacgtctgactggtgtacctgaaagtgacggggagaatggaaccaagttggaaaacactctgcaggatattatccaggagaacttccccaatctagcaaggcaggtcaatgttcagattcaggaaatacagagaacgccacaaagatactcctcgagaagagcaactccaagacacataattgtcagattcaccaaagttgaagtgaaggaaaaaatgttaagggcagccagagagaaaggtcgggttaccctcaaagggaagcccatcagactaacagcggatctctcggcagaaaccctacaagccagaagagagtgggggccaatattcaacattcttaaagaaaagaattttcaacccagaatttcatatccagccaaactaagcttcataagtgaaggagaaataaaacactttacagacaagcaaatgctgagagattttgtcaccaccaggcctgccctaaaagagctcctgaaggaagtgctaaacatggaaaggaacaaccagtaccagccgctgcaaaatcatgccaaaatacagatcaacgagacagaaagtcaacaaggatacccaggaattgaactcagctctgcaccaagcggacctaatagacatctacagaactctccacaccaaatcaacagaatatacatttttttcagcaccacaccacacctattccaaaattgaccacatagttggaagtaaagctctcctcagcaaatgtaaaagaacagaaattataacaaactatctctcagaccacagtgcaatcaaactagaaatcaggattaagaatctcactcaaagccactcaactacatggaaactgaacaacctgctcctgaatgactactgggtacataacgaaatgaaggcagaaataaagatgttctttgaaaccaacgagaacaaagacaccacataccagaatctctgggacgcattcaaagcagtgtgtagagggaaatttatagcactaaatgcctacaagagaaagcaggaaagatccaaaattgacagcctaacatcacaattaaaagaactagaaaagcaagagcaaacacattcaaaagctagcagaaggcaagaaataactaaaatcagagcagaactgaaggaaatagagacacaaaaaacccttcaaaaaatcaatgaatccaggagctggttttttgaaaggatcaacaaaattgatagaccactagcaagactaataaagaaaaaaagagagaagaatcaaatagacacaataaaaaatgataaaggggatatcaccaccgatcccacagaaatacaaactaccatcagagaatactacaaacacctctacgcaaataaactagaaaatctagaagaaatggatacattcctcgacacatacactctcccaagactaaaccaggaagaagttgaatctctgaatagaccaataacaggctctgaaattgtggcaataatcaatagtttaccaaccaaaaagagtccaggaccagatggattcacagccgaattctaccagaggtacaaggaggaactggtaccattccttctgaaactattccaatcaataggaaaagagggaatcctccctaactcattttatgaggccagcatcattctgacaccaaagccgggcagagacacaaccaaaaaagagaattttagaccaatatccttgatgaacattgatgcaaaaatcctcaataaaatactggcaaaccgaatccagcagcacatcaaaaagcttatccaccatgatcaagtgggcttcatccctgggatgcaaggctggttcaatatacgcaaatcaataaatgtaatccagcatataaacagagccaaagacaaaaaccacatgattatctcaatagatgcagaaaaagcctttgacaaaattcaacaacccttcatgctaaaaactctcaataaattaggtattgatgggacgtatttcaaaataataagagctatctatgacaaacccacagccaatatcatactgaatgggcaaaaactggaagcattccctttgaaaactggcacaagacagggatgccctctctcaccgctcctattcaacatagtgttggaagttctggccagggcaatcaggcaggagaaggaaataaagggtattcaattaggaaaagaggaagtcaaattgtccctgtttgcagacgacatgattgtttatctagaaaaccccatcgtctcagcccaaaatctccttaagctgataagcaacttcagcaaagtctcaggatacaaaatcaatgtacaaaaatcacaagcattcttatacaccaacaacagacaaacagagagccaaatcatgggtgaactcccattcacaattgcttcaaagagaataaaatacctaggaatccaacttacaagggatgtgaaggacctcttcaaggagaactacaaaccactgctcaaggaaataaaagaggacacaaacaaatggaagaacattccatgctcatgggtaggaagaatcaatatcgtgaaaatggccatactgcccaaggtaatttacagattcaatgccatccccatcaagctaccaatgactttcttcacagaattggaaaaaactactttaaagttcatatggaaccaaaaaagagcccgcatcgccaagtcaatcctaagccaaaagaacaaagctggaggcatcacactacctgacttcaaactatactacaaggctacagtaaccaaaacagcatggtactggtaccaaaacagagatatagatcaatggaacagaacagagccctcagaaataatgccgcatatctacaactatctgatctttgacaaacctgagaaaaacaagcaatggggaaaggattccctatttaataaatggtgctgggaaaactggctagccatatgtagaaagctgaaactggatcccttccttacaccttatacaaaaatcaattcaagatggattaaagatttaaacgttagacctaaaaccataaaaaccctagaagaaaacctaggcattaccattcaggacataggcgtgggcaaggacttcatgtccaaaacaccaaaagcaatggcaacaaaagccaaaattgacaaatgggatctaattaaactaaagagcttctgcacagcaaaagaaactaccatcagagtgaacaggcaacctacaacatgggagaaaattttcgcaacctactcatctgacaaagggctaatatccagaatctacaatgaactcaaacaaatttacaagaaaaaaacaaacaaccccatcaaaaagtgggcgaaggacatgaacagacacttctcaaaagaagacatttatgcagccaaaaaacacatgaagaaatgctcatcatcactggccatcagagaaatgcaaatcaaaaccacataccatgctggaccagatggatttacagccgaattctaccagaggtacaaggaggaactggtaccattccttctgaaactattccaatcaatagaaaaagagggaatcctccctaactcattttatgaggccagcatcatcctgataccaaagcctggtagagacacaaccaaaaaagagaattttagaccaatatccttgatgaacattgatgcaaaaatcctcaataaaatactggcaaaacgaatccagcagcacatcaaaaagcttatccaccatgatcaagtgggtttcatccctgggatgcaaggctggttcaatatatgcaaatcaataaacgtaatccagcatataaacagaaccaaagacaaaaaccacatgattatctcaatagatgcagaaaaggcctttgacaaaattcaacaactcttcatgctaaaaactctcaataaattaggtattgatgggacgtatctcaaaataataagagctatctatgacaaacccacagccaatatcatactgaatgggcaaaaactggaagcattccctttgaaaactggcacaagacagggatgccctctctcaccactcctattcaacatagtgtgggaagttctggccagggcaatgaggcaggagaaggaaataaagggtattcaattaggaaaagaggaagtcaaattgtccctgtttgcagacgacatgattgtgtatctagaaaaccccattgtctcagcccaaaatctccttaagctgataagcaacttcagcaaagtctcaggatacaaaatcaatgtacaaaaatcacaagcattcttatacaccaataacagacaaacagagagccaaatcatgagtgaactcccattcacaactgcttcaaagagaataaaatacctaggaatccaacttacaagggatgagaaggacctcttcaaggagaactacaaaccactgctcaatgaaataagaggatacaaacaaatggaagaacattccatgctcacgggtaggaagaatcaatatcgtgaaaatgctcatactgcccaagctaaggcgaaccacaggccagccacatccaaaaaggtttacctgattacggcaatgaagccactgtccagtcctattcctgaaggtttggggctagaaaacagaacaggaaaggaaatcaagagtagagaatggaccaccatgttaagattggctgtagctgctgaactaacctttagagattggaaggagcggtctcggaggactttggacacacatgaaacaaaggggattcccttaagtaaaagcagagcaggcattctggtgattgacattagatag

SEQ ID NO: 6621 - DNA, 12364 bp, Homo sapiens
atggtaaagggatcaattcaacaagaggagctaactatcctaaatatttatgcacccaatacaggagcacccagattcataaagcaagtcctgagtgacatacaaagagacttagactcccacacattaataatgggagactttaacaccccactgtcaacattagacagatcaacgagacagaaagtcaacaaggatacccaggaattgaactcagctctgcaccaagcggacctaatagacatctacagaactctccaccccaaatcaacagaatatacatttttttcagcaccacaccacacctattccaaaattgaccacatagttggaagtaaagctctcctcagcaaatgtaaaagaacagaaattataacaaactgtctctcagaccacggtgcaatcaaactagaactcaggattaagaatctcactcaaagccgctcaactacatggaaactgaacaacctgctcctgaatgactactgggtacataacgaaatgaaggcagaaataaagatgttctttgaaaccaacgagaacaaagacaccacataccagaatctctgggacgcattcaaagcagtgtgtagagggaaatttatagcactaaatgcctacaagagaaagcaggaaagatccaaaatcgacaccctaacatcacaattaaaagaactagaaaagcaagagcaaacacattcaaatgctagcagaaggcaagaaataactaaaatcagagcagaactgaaggaaatagagacacaaaaaacccttcaaaaaatcaatgaatccaggagctggttttttgaaaggatcaacaaaattgatagaccgctagcaagactaataaagaaaaaaagagagaagaatcaaatagacacaataaaaaatgataaaggggatatcaccaccgatcccacagaaatacaaactaccatcagagaatactacaaacacctctacgcaaataaactagaaaatctagaagaaatggatacattcctcgacacatacactctcccaagactagaccaggaagaagttgaatctctgaatagaccaataacaggctctgaaattgtggcaataatcaatagtttaccaaccaaaaagagtccaggaccagatggattcacagccgaattctaccagaggtacaaggaggaactggtaccattccttctgaaactattccaatcaatagaaaaagagggaatcctccctaactcattttatgaggccagcatcattctgataccaaagccgggcagagacacaaccaaaaaagagaattttagaccaatatccttgatgaacattgatgcaaaaatcctcaataaaatactggcaaaacgaatccagcagcacatcaaaaagcttatccaccatgatcaagtgggcttcatccctgggatgcaaggctggttcaatatatgcaaatcaataaatgtaatccagcatataaacagagccaaagacaaaaaccacatgattatctcaatagatgcagaaaaagcctttgacaaaattcaacaacccttcatgctaaaaactctcaataaattaggtattgatgggacgtatttcaaaataataagagctatctatgacaaacccacagccaatatcatactgaatgggcaaaaactggaagcattccctttgaaaactggcacaagacagggatgccctctctcaccgctcctattcaacatagtgttggaagttctggccagggcaatcaggcaggagaaggaaataaagggtattcaattaggaaaagaggaagtcaaattgtccctgtttgcagacgacatgattgtttatctagaaaaccccatcgtctcagcccaaaatctccttaagctgataagcaacttcagcaaagtctcaggatacaaaatcaatgtacaaaaatcacaagcattcttatacaccaacaacagacaaacagagagccaaatcatgagtgaactcccattcacaattgcttcaaagagaataaaatacctaggaatccaacttacaagggatgtgaaggacctcttcaaggagaactacaaaccactgctcaaggaaataaaagaggacacaaacaaatggaagaacattccatgctcatgggtaggaagaatcaatattgtgaaaatggccatactgcccaaggtaatttacagattcaatgccatccccatcaagctaccaatgactttcttcacagaattggaaaaaactactttaaagttcatatggaaccaaaaaagagcccgcatcgccaagtcaatcctaagccaaaagaacaaagctggaggcatcacactacctgacttcaaactatattacaaggctacagtaaccaaaacagcatggtactggtaccaaaacagagatatagatgaatggaacagaacagagccctcagaaataatgccgcatatctacaactatctgatctttgacaaacctgagaaaaacaagcaatggggaaaggattccctatttaataaatggtgctgggaaaactggctagccatatgtagaaagctgaaactggatccctttcttacaccttatacaaaaatcaattcaagatggattaaagatttaaacgttagacctaaaaccataaaaaccctagaagaaaacctagacattaccattcaggacataggcgtgggcaaggacttcatgtccaaaacaccaaaagcaatggcaacaaaagacaaaattgacaaatgggatctaattaaactaaagagcttctgcacagcaaaagaaactaccatcagagtgaacaggcaacctacaacatgggagaaaattttcgcaacctactcatctgacaaagggctaatatccagaatctacaatgaactcaaacaaatttacaagaaaaaaacaaacaaccccatcaaaaagtgggtgaaggacatgaacagacacttctcaagagaagacatttatgcagccaaaaaacacatgaaaaaatgctcatcatcactggccatcagagaaatgcaaatcaaaaccactatgaggttttactgggatttaataatgcttataatgatggttggaaatctagtcatcataccagttggaatcacattctttacagagcaaacaacaacaccatggattattttcaatgtggcatcagatacagttttcctattggacctgatcatgaattttaggactgggactgtcaatgaagacagttctgaaatcatcctggaccccaaagtgatcaagatgaattatttaaaaagctggtttgtggttgacttcatctcatccatcccagtggattatatctttcttattgtagaaaaaggaatggattctgaagtttacaagacagccagggcacttcgcattgtgaggtttacaaaaattctcagtctcttgcgtttattacgactttcaaggttaattagatacatacatcaatgggaagaggaacgcagctcctcaccagcaacagaacaaagctggacggagaatgactttgacgagctgagagaagaaggtttcagacgatcaaattactctgagctacgggaggacattcaaaccaaaggcaaagaagttgaaaactttgaaaaaaatttagaagaatgtataactagaataaccaatacagagaagtgcttaaaggagctgatggagctgaaaaccaaggctcgagaactacgtgaagaatgcagaagcctcaggagccgatgcgatcaactggaagaaagggtatcagcaatggaagatgaaatgaatgaaatgaagcaagaagggaagatcaaaagagacaaagaaggccattacataatggtaaagggatcaattcaacaagaagagctaactatcctaaatatatatgcacccaatacaggagcacccagattcataaagcaagttctgagtgacctacaaagagacttagactcccacacattaataatgggagactttaacacctcactgttaacattagacagatcaatgagacagaaagtcaacaaggatacccaggaattgaactcatctctgcaccaagcggacctaatagacatctacagaactctccaccccaaatcaatagaatatacatttttttcagcaccacaccacacctattccaaaattgaccacatagttggaagtaaagctctcctcagcaaatgtaaaagaacagaaattataacaaactatctctcagaccacagtgcaatcaaactagaactcaggattaagaatctcactcaaagccgctcaactacatggaaactgaacaacctgctcctgaatgactactgggtacataacgaaatgaaggcagaaataaagatgttctttgaaaccaacgagaacaaagacacaacataccagaatctctgggacgcattcaaagcagtgtgtagagggaaatttatagcactaaatgcccacaagagaaagcaggaaagatccaaaattgacaccctaacatcacaattaaaagaactagaaaagcaagagcaaacacattcaaaagctagcagaaggcaagaaataactaaaatcagagcagaactgaaggaaatagagacacaaaaaacccttcaaaaaatcaatgaatccaggagctggttttttgaaaggatcaacaaaattgatagaccgctagcaagactaataaagaaaaaaagagaggagaatcaaatagacacaataaaaaatgataaaggggatatcaccaccgatcccacagaaatacaaactaccatcagagaatactataaacacctctacgcaaataaaccagaaaatctagaagaaatggataaattcctcgacacatacactctcccaagactaaagcaggaagaagttgaatctctgaatagaccaataacaggagctgaaattgtggcaataatcaatagtttaccaaccaaaaagagtccaggaccagatggattcacagccgaattctaccagaggtacaaggaggaactggtaccattccttctgaaactattccaatcaatagaaaaagagggaatcctccctaactcattttatgaggccagcatcattctgataccaaagccgggcagagacacaaccaaaaaagagaattttagaccaatatccttgatgaacattgatgcaaaaatcctcaataaaatactggcaaaccgaatccagcagcacatcaaaaagcttatccaccatgatcaagtgggcttcatccctgggatgcaaggctggttcaatatacgcaaatcaataaatgtaatccagcatatcaacagagccaaagacaaaaaccacatgattatctcaatagatgcagaaaaagcctttgacaaaattcaacaacccttcatgctaaaaactctcaataaattaggtattgatgggacgtatttcaaaataataagagctatctatgacaaacccacagccaatatcatactgaatgggcaaaaactggaagcattccctttgaaaaatggcacaagacagggatgccctctctcaccactcctattcaacatagtgttggaagttctggccagggcaatcaggcaggagaaggaaataaagggtattcaattaggaaaagaggaagtcaaattgtccctgtttgcagacgacatgattgtttatctagaaaaccccatcgtctcagcccaaaatctccttaagctgataagcaacttcagcaaagtctcaggatacaaaatcaatgtacaaaaatcacaagcattcttatacaccaacaacagacaaacagagaggcaaatcacgagtgaactcccattcacaattgcttcaaagagaataaaatacctaggaatccaacttacaagggatgtgaaggacctcttcaaggagaactacaaaccactgctcaaggaaataaaagaggacacaaacaaatggaagaacattccatgctcatgggtaggaagaatcaatatcgtgaaaatggccatactgcccaaggtaatttacagattcaatgccatccccatcaagctaccaatgactttcttcacagaattggaaaaaactactttaaagttcatatggaaccaaaaaagagcccgcatcgccaagtcaatcctaagccaaaagaacaaagctggaggcatcacactacctgacttcaaactatactacaaggctacagtaaccaaaacagcatggtactggtaccaaaacagagatatacatcaatggaacagaacagagccctcagaaataatgccgcatatctacaactatctgatctttgacaaacctgagaaaaacaagcaatggggaaaggattccctatttaataaatggtgctgggaaaactggctagccatatgtagaaagctgaaactggatcccttccttacaccttatacaaaaatcaattcaagatggattaaagatttaaacgttagacctaaaaccataaaaaccctagaagaaaacctaggcattaccattcaggacataggcgtgggcaaggacttcatgtccaaaacaccaaaagcaatggcaacaaaagccaaaattgacaaatgggatctaattaaactaaagagcttctgcacagcaaaagaaactaccatcagagtgaacaggcaacctacaacatgggagaaaatttttgcaacctactcatctgacaaagggctaatatccagaatctacaatgaactcaaacaaatttacaagaaaaaaacaaacaaccccatcaaaaagtgggcgaaggacatgaacagacgcttctcaaaagaagacatttatgcagccaaaaaacacatgaaaaaatgctcatcatcactggccatcagagaaatgcaaatcaaaaccactatgagatatcatctcacaccagttagaatggcaatcattaaaaagtcaggaaacaacaggcaaacagggtctggagtggacctccagcatactccagcagacctgcagcagaggggcctgactgttagaaggaaaatgaacaaacacaaaggaatagcatcaacatcaacaaaaaggacatccactcaaaagccccatctgaaggtcaccaaaatcaaagaccagaggcctacgttacaagagctcctgaaggaagcactaaatatggaaaggaacaaccagtaccagccactgcaaaatcatgccaaaatgtaaagaccatcgagactaggaagaaactgcatcaactaacgagcaaaatcaccagctaacatcataatgacaggatcaaattcacacataacaatattaactttaaatgtaaatggactaaattctccaattaaaagacacagactggcaagttggataaagagtcaagacccatcagtgtgctgtattcaggaaacccatctcatgtgcagagacacacataggctcaaaataaaaggatggaggaagatctaccaagcaaatggaaaacaaaaaaaggcaggggttgcaatcctagtctctgataaaacagactttaaaccaacaaagatcaaaagagacaaagaaggccattacatgatggtaaagggatcaattcaacaagaggagctaactatcctaaatatgtatgcacccaatacaggagcacccagattcataaagcaagtcctgagtgacctacaaagagacttagactcccacacattaataatgggagactttaacaccccactgtcaacattagacagatcaacgagacagaaagtcaacaaggatacccaggaattgaactcagctctgcaccaagcagacctaatagacatctacagaactctccaccccaaatcaacagaatatacatttttttcagcaccacaccacagctattccaaaattgaccacatacttggaagtgaagctctcctcagcaaatgtaaaagaacagaaattataacaaactatctctcagaccacagtgcaatcaaactagaactcaggattaagaatctcactcaaagccgctcaactacatggaaactgaacaacctgctcctgaatgactactgggtacataacgaaatgaaggcagaaataaagatgttctttgaaaccaacgagaacaaagacacaacataccagaatctctaggacgcattcaaagcagtgtgtagagggaaatttatagcactaaatgcccacaagagaaagcaggaaagatccaaaattgacaccctaacatcacaattaaaagaactagaaaagcaagagcaaacacattcaaaagctagcagaaggcaagaaataactaaaatcagagcagaactgaaggaaatagagacacaaaaaacccttcaaaaaatcaatgaatccaggagctggttttttgaaaggatcaacaaaattgatagaccgctagcaagactaataaagaaaaaaagagagaagaatcaaatagacacaataaaaaatgataaaggggatatcaccaccgatcccacagaaatacaaactaccatcagagaatactacaaacacctctacgcaaataaactagaaaatctagaagaaatggatacattccttgacacatacactctcccaagactaaaccaggaagaagttgaatctctgaatagaccaataacaggagctgaaattgtggcaataatcaatagtttatcaaccaaaaagagtccaggaccagatggattcacagccgaattctaccagaggtacaaggaggaactggtaccattctttctgaaactattccaatcaatagaaaaagagggaatcctccctaactcattttatgaggccagcatcattctgataccaaagccgggcagagacacaaccaaaaaagagaattttagaccaatatccttgatgaacattgatgcaaaaatcctcaataaaatactggcaaaccaaatccagcagcacatcaaaaagcttatccaccatgatcaagtgggcttcatccctgggatgcaaggctggttcaatatacgcaaatcaataaatgtaatccagcatataaacagagccaaagacaaaaaccacatgattgtctcaatagatgcagaaaaagcctttgacaaaattcaacaacccttcatgctaaaaactatcaataaaataggtattgatgggatgtatttcaaaataataagagctatctatgacaaaaccacagccaatatcatactgaatgggcaaaaactggaagcattccctttgaaaaccggcacaagacagggatgccctctctcaccgctcctattcaacatagtgttggaatttctggccagggcaatcaggcaggagaaggaaataaagggtattcaattaggaaaagaggaagtcaaattgtccctgtttgcagatgacatgattgttgatctagaaaaccccatcgtctcagcccaaaatctccttaagctgataagcaacttcagcaaagtctcaggatacaaaatcaatgtacaaaaatcacaagcattcttatacaccaacaacagacaaacagagagccaaatcatgagtgaactcccattcacaattgcttcaaagagaataaaatacctaggaatccaacttacaagggatgtgaaggacctcttcaaggagaactacaaaccactgctcaaggaaataaaagaggatacaaacaaatggaagaacattccatgctcatgggtaggaagaatcaatattgtgaaaatggccatactgcccaaggtaatttacagattcaatggcatccccatcaagctaccaatgactttcttcacagaattggaaaaaactactttaaagttcatatggaaccaaaaaagagcccgcatcggcaagtcaatcctaagccaaaagaacaaagcaagaataaagctggaggcatcactattcaaactatactacaaggctacagtaaccgaaacagcatggtactggtaccaaaacagagatatagatcaatggaacagaacagagccctcagaaataatgccgcatatctacaactatctgatctttgacaaacctgagaaaaacaagcaatggggaaaggattccctatttaataaatggtgctgggaaaactggctagccatatgtagaaagctgaaactggatcccttccttacaccttatacaaaaatcaattcaagatggattaaagacttaaatgttagacctaaagccataaaagtcctagaagaaaacctaggcaataccattcaggacataggcatgggcaaggacttcatgactaaaacaccaaaagcaatggcaacaaaagccaaaattgacaaatgggatataattaacctaaagagcttctgcacagcagaagaaactaccatcagagtgaacaggcaacctacagaatgggagaaaaattttgcaatctacccatctgacaaaggactaatatccagattctacaaagaactcaaacaaatttacaagaaaaaaacaaacaaccccatcaaaaagtgggcgaaggacatgaacagacacttctcaaaagaagacatttatgcagccaaaaaacacatgaaaaaatgctcatcatcactggccatcagagaaatgcaaatcaaaaccacaatgagataccatctcacaccagttagaatggcaatcatgaaaaaagtcaggaaacaacagctggaggtcatgcctgcaaccatgggcagcacattcaacaacttaccggcacccaggaaccatggagaaaaaaaccagcagcggggacacccccactgtcttcccatccaccctgggtcgcaagaaaagcacaagtgctcaactaactgaactgacagctcttacacttgagttaagcaagggaaaggtaagaaacgccccttcaaagttagatctaagcccttttgagatgctgtatggatggccttttctcaccaatgatttcttattagaccaagagacctctgaattgggcaagcatgtaaactctctggctcgttttcaacaggaattaactcaagtagcagaagcccaaccccaagaagtaggaccacctttatttaacccaggatatttggtattgcccaagcagggagggccttacaccattctcctttcaatgccctcagcagtaaaagttacaggtattgattcctggatacatcatgctcaagttaaagcctggaaaactgagagagcaatccccggcagcccagcggaatgtcttggataccaatgtgaggaaataagagacctgaagctgaaaatcaaaagagataagaaaatgagcaagggctactcatcctactcagttccagtcatccattcagtcatccagtcatccagtctttgtacaactggtacacagaagtcaagaattgaggtttgggaacctctgcctagatttccgaagatgtatggatatgcctggattcctagacaaaagtttgctgcaggggcagggccctcatggagaacctctgttaaggcagtgcagaagggaaatgtggggtcgaagccccaccacagagaccctactggggcactgcctagtggagctgtgagaagaggaccaccatcctccagacctcagaatggtagatccactggcagcttgcaccgtgtgcctggaaaagccagacctcaacaccagcctgtgaaagcagccaggagggaggccgtgccctacaaagccacaggggtagagctgcccaagaccatgggaacccacctattgcatcagtgtgacctggatctacctgccaccttctctctcagccttcacatcaagtacctcaaacatcgacattcttattccccacatctccacctcctattcaccgtcatgggcccccatgccaggcaaatgattcgcatctctggcatagatgttgacaccaggaacctgtataagctgaatttgaaagtaaagtggctggaggttttggatcaagaggaacctgaatacagtagaacaacctccaggaagaagcagggattccctaacagcgatgaagaagatgtattgtggatggagaagcagctgtcctgcttctgtgacaagtaccaaaaatggataccaaccagacagctgaagggacagctcagttacgttaaggaagcagatctgattccagatgtaatgcccccacaagctttgttccatgatgatgatgagatggaaggcaatggagccatagacgcagggatggagtatgtctacaacattgacacgttgcttagatggtctgatggtgaggaggaaggagaaggaggagaagaaggaagaggaggaggaagaggaggagaaggaggaggaaagagggaggagggagaaggaaaaaaagaagaagaacaaggaggatggggaggaggacaggaagtggaagaagaaggaggaggaggagggggaaattaa

SEQ ID NO: 6622 - DNA, 494 bp, Homo sapiens
  SIMILAR (117)..(380): 431254mologous to Oryza sativa Similar to Arabidopsis thaliana DNA chromosome 4, BAC clone F28J12; RNA helicase - like protein (AL021710),accession number AP002092,Smith-Waterman Score= 201.
tttcgtgctcttcgggggccacgccctccgggccctgggggcctagcgcgcgacggtggggtggagctagcctcgtgaccttttaccccaacatggctgcgcccgtgggaccggtgaagttctggcgacccggtacagaggggccaggtgtaagcatctctgaagagagacaaagtctggctgaaaactctgggacaacggttgtttacaacccttatgctgccctttccatagagcagcagaggcagaagctgccggtattcaagcttaggaatcatattttatacttgatagaaaattatcagacagtggtgattgttggtgaaacaggatgtgggaagagcacacagattcctcaggaaaaatcctatgtgatgtggataggagtagaaagaaggatcaagaaaggccttgtaaaggaattggcatttgaaattgaccttgactgggagctgactgagaagatattccaagccagtgaatattgtggttag

SEQ ID NO: 6623 - DNA, 732 bp, Homo sapiens
  SIMILAR (253)..(621): 701254mologous to Rattus norvegicus transcription factor,accession number L24051,Smith-Waterman Score=403.
atgcccccttcagccaacttggagaaaaggcttcctcagaaactgaggcctccatctgtgccaacccttgtaaagcggttcacctcttcagaggctaatgcctctcaaaaccaagaacaattaaagcgagagtctttccaagcaactggggaattgagcaaaataaatcagaaatcctcagccttcgctctggaggctcgcctcattatgagagcagatctattagccctcttgccattgtctttcatttctcaagtcgtggtgtctacgacagtcaatgtggatggccatgtcctggcagtctctgataacatgtttgtccataataattccaagcatgggcggagggctcggaggcttgacccctcggaagactgggtaatttttgaggaaaaggagtttatgtcttacggttctggaggctgggaagtccaagggcatgatgccagcactggtgagggcttccaggctgcatcatcctattgtggaaagttgatcactcctcatgccatccgtgtgcagacccctcctcggcacatccctggtgttgtggaagtcacactgtcctacaaatctaagcagttctgcaaaggaacaccaggcagattcatttacacagctcactttagctactttgggcatggtgattcacctgaaggatccagttcaaactcttacctctctgaagtgttctctgaccgctgtggtatagtggacagagccctgggctga

SEQ ID NO: 6624 - DNA, 800 bp, Homo sapiens
  SIMILAR (177)..(638): 791254mologous to Homo sapiens dJ5O6.2 (novel protein similar to C. elegans F40E10.6 (isoform 2)),accession number AL020993,Smith-Waterman Score=578.
ccagcccagcctgggaactgctgactggtccagggtatggtcaggtgatgattctggggcctgctggcctgggctctgctgctgctgctgctgctgcttcagcttctctctgcctcagtttcctcacctgtaccaccttctgtgctcctcctccacactcaacctccttttccccccaacaggccaccctgcagttctgtgtggtgaagccactcatggcggtcagctccctccaagggtctgtcccagccagaaaatgctccccgtcccgcagcgtcaccagtggctacctctacgtgaccatcatctacaacatctccgtcagcctggccctctacgccctcttcctcttctacttcgccacccgggagctgctcagcccctacagccccgtcctaggaaaggaatcattctgggtccagacacccgtgcctccccatccaggcatgctcctggccatcctggagaagtgtggggccatccccaaaatccactcggcccgcgtgtcggtgggcgagggcaccgtggctgccggctaccaggacttcatcatctgtgtggagatgttctttgcagccctggccctgcggcacgccttcacctacaaggtctatgctgacaagaggctggacgcacaaggtatgagccagggtcctaggcgacccccgctgggagaagcagggagccccaaacatcccaggaccctcccacctcccagcatcctacaggtgcggctgggtcaggacatgggatccccactctatatgcaggaatggggccacagaggtcggggaagagca

SEQ ID NO: 6625 - DNA, 330 bp, Homo sapiens
  SIMILAR (235)..(306): 951254mologous to Homo sapiens prolyl 4-hydroxylase alpha (II) subunit,accession number U90441,Smith-Waterman Score=125.
atgaaagtgattgctttcagcaggcacacttttgagggaaaccgaaaacactggcacaaggttgcaaattatggagtgggaggacagtatgaaccgcacttcgacttctctaggtcttgtgggtggtggatgaagcctgttgtaaacttgggtgaaagttgttgtctgttgcagcgaccttttgacagcggcctcaaaacagaggggaataggttagcgacgtttcttaactacaatgatgagcgagatactttcaagcatttagggacggggaatcgtgtggctactttcttaaactacgtgagtatgatgtgtgctgatgagccctaa

SEQ ID NO: 6626 - DNA, 658 bp, Homo sapiens
  SIMILAR (2)..(421): 721254mologous to Homo sapiens human RAD50 G65 variant,accession number W22781,Smith-Waterman Score=495.
  misc_feature (1)...(658): n = a,t,c or g
caaaagctcctggctagaggaagatgatgaccctgttgtggcccgagtaaatcgtcggatgcagcatatcacagggttaacagtaaagactgcagaattgttacaggttgcaaattatggagtgggaggacagtatgaaccgcacttcgacttctctaggcgaccttttgacagcggcctcaaaacagaggggaataggttagcgacgtttcttaactacatgagtgatgtagaagctggtggtgccacccgtcttccctgatctgggggctgcaatttggcctaagaagggtacagctgtgttctggtacaacctcttgcggacgggggaaggtgactaccgagacaagacatgctgcctgccctgtgcttgtgggctgcaagtgggtctccaataagtgggttccatgaaccnaggacaggagttcttgagaccttgtggatcaacagaagttgactgacatccttttctgtccttccccttcctggtccttcagcccatgtcaacgtgacagacacctttgtatgttcctttgtatgttcctatcaggctgatttttggagaaatgaatgtttgtctggagcagagggagaccatactaagggcgactcctgtgtgactgaagtcccaagcccttccaattcagcctgtgccatc

SEQ ID NO: 6627 - DNA, 717 bp, Homo sapiens
  SIMILAR (12)..(716): 871254mologous to Homo sapiens HSPC302,accession number AF161420,Smith-Waterman Score=1054.
ttcggcacaggctaagaaatagattgaaagatgttggtggagaagcattttacccattacttgaagatgaccagtctaatttacctcattcaaacagcaataatgagttgtctgcagctgccacgctccctttaatcatcagagagaaggatacagagtaccaactaaatagaattattctcttcgacaggctgctaaaggcttatccatataaaaaaaaccaaatctggagagaagcaagagttgacattcctcctcttataagaggtttaacctgggctgctcttctgggagttgagggagctattcatgccaagtacgatgcaattgataaagacactccaattcctacagataggacaaattgaagtgggatattcctcgctgtcattcagtacgatgaactgttattcatgcaccagaaggtcatgcaaaatttaggcgtgtattaaaaggcctgggtagtgtctcatcctgatcttgtgtattggcaaggtcttgactcactttgtgctccattcctatatctaaacttcaataatgaagccttggtatatgcatgtatgtctgcttttattcccaaatacctgtataacttcttcttaaaagacaactcacatgtaatacaagagtatctgactgtcttctctcagatgattgcatttcatgatccagagctgagtaatcatctcaatgagattggcttcattccagatc

SEQ ID NO: 6628 - DNA, 508 bp, Homo sapiens
  SIMILAR (313)..(507): 801254mologous to Homo sapiens HSPC302,accession number AF161420,Smith-Waterman Score=268.
atgacctacttccaccttgggagccggcgtctggatgaggggaatgctgtgacacttgaacagaggtaccaactcagccacagggaagtagagtaccaagcaggctcttgtggcccccaattccaggacttggctcttggacagcatttctggacctgccgtgggccaaagggaaactacactgaagaccagtctaatttacctcattcaaacagcaataatgagttgtctgcagctgccatgctccctttaatcatcagagagaaggatacagagtaccaactaaatagaattattctcttcgacaggctgctaaagggagctattcatgccaagtacgatgcaattgataaagacactccaattcctacagatagacaaattgaagtggatattcctcgctgtcatcagtacgatgaactgttatcatcaccagaagttcatgcgaaatttaggcgtgtattaaaagcctgggtagtgtctcatcctgatcttgtgtattggcaag

SEQ ID NO: 6629 - DNA, 891 bp, Homo sapiens
  SIMILAR (460)..(837): 381254mologous to Homo sapiens bA269H4.1 (KIAA1415, similar to T-Lymphona invasion and metastasis inducing protein 1),accession number AL445192,Smith-Waterman Score=220.
atgaaggaagaagaacattctaggcccactgaacagcctgtagaaagggtcagattttctcgtgtactgaagaatagggcctggcctacttttaaacaggccaaatctaaaatctccccactgcacagcagtgatttctgccctaccaactgccatgtcaatgtgatggaagtttcttatcccaaaacatcaacctctttgggaagtgcatttggtgttcagttggatagcaggaagcataattctcatgataaagaaaacaaatcttcggagcaaggtctgtctctgggacagcaggatggccatggtctcaggtatctgctaaaagaagaagacttagaaacccaagacatctatcagaaactgctgggcaaacttcagactgcactgaaagaggtggagatgtgtgtttgtcaaatagatgaccttctgtcttcaataacatattctcctaaattagaacgtaagacatcagagggcataataccaacagacagtgacaatgagaagggagaaagaaacagcaaacgggtatgttttaatgtagcaggagatgaacaggaagattctggtcatgacaccatcagcaacagagactcttacagtgactgcaacagcaataggaattccatcgcctccttcaccagcatctgcagcagccagtgcagctcgtatttccacagtgatgaaatggactcagaatttcaacaggaaatggaaccaaagctgagttgtccaaaaaggctacggcttcatatcaagcaagatccttggaatcttcccagcagcgtccggactcttgctcagaacatcaggaaatttgttgaaggtcagcatgaaaagcaaagaacattgcatgatattagcaataatcaatttaaaacccactaa

SEQ ID NO: 6630 - DNA, 584 bp, Homo sapiens
  SIMILAR (2)..(394): 571254mologous to Woolly monkey sarcoma virus reverse transcriptase (476 AA),accession number X15311,Smith-Waterman Score =373.
attatggattccaaactttgcagtactagccaaacctttgtacagggtgacaaaggggggtgaccgggagccttttgaatgggggcctctacaacagcaagccttttgtaagttaaaggaaaaatttatgttggccccagccctaggactatcagatgtgacaaagccctttacactctatgtgtcagaaagagaaacaatggcagttggagttttaacccagactgtggggcactggccaaggccagcggcctatctctcaaaacaactagatggggtttccaaaggctggccaccacgtctaagggccctggcagcaacagccctgttagcacaagaagcagataaactaacccttgggcaaaacctgaatataaaggtcccccatgctgtgccatgggcatcagtagactgggagttatatgtggactggagcagcttcatcaacccacaaggagaaagatgtgcaggatatgcggtggtaactttggatgctgtcattgaagccaaacctttgccacagggcacttcagcccagaagactgagctcattgctttaacaagggctcaagaactcagtgaag

SEQ ID NO: 6631 - DNA, 152 bp, Homo sapiens
  SIMILAR (64)..(150): 341254mologous to Gallus gallus RIHB,accession number X76482,Smith-Waterman Score=54.
tcaggtggcaaaagggatggatgccctgcttcagcacctggaggactgtgggtataggtgtccaagaagaaagctcagatctgcagacagcaggttacaaagtggggcgatgggagcgctttgatgggaacctctacaacagcaagcctttt

SEQ ID NO: 6632 - DNA, 894 bp, Homo sapiens
  SIMILAR (361)..(480): 851254mologous to Homo sapiens Human secreted protein, SEQ ID NO: 7420,accession number G03339,Smith-Waterman Score=162.
ctaggccttgggcctgtgatgggaggggctgccatgaatgtctctgacatgttctggagacattttccctattatcttggtgattaatgtttggctcttcattactatacaaatttcagcagctggcttgaatttctccccagaaagtgagattttcttttctactgcattgtcaggttgaaaactttccaagcttttatgctccatcgcctcttgaatgctttgctgcttagaaatttcttccaccagataccctaaatcatctctctcaagttcagagttccatagacctctagggcaggggcaaaatgccaccagtctctttgttaaagcatagcaagagtcacctttgttccaattcccaacaatttcctcatctccatctgagaccacctcatactggacttcattgtccacaccactatcagcattttggtcaaagccattcagcaagtctctaggaagttccaaactttcccaccttttcctgtcttcttctgagtccgttctgtccgtcacttcccagatccgcgctttctctgtccttcctgtgcgacggttacgccgctccatgagcttatcgcgaataaatacctgtgacggaagatcacttcgcagaataaataaatcctggtgtccctgttgataccgggaagccctgggccaacttttggcgaaaatgagacgttgatcggcacgtaagaggttccaactttcaccataatgaaataagatcactataaccagaccgttcagctggatattacggccttttggggatcctctagagtcgacctggaggactgtgggtataaggtgtccaagaagaaagctcagatctgcagacagcaggtacgctacctgggattcactattcggaaaggggagcacagc

SEQ ID NO: 6633 - DNA, 1626 bp, Homo sapiens
  SIMILAR (1250)..(1618): 231254mologous to Homo sapiens cisplatin resistance- associated overexpressed protein,accession number AB034205,Smith- Waterman Score=136.
atgaatgcagattacaagccgcttctccaagactcttctactttatcggagaaaaacttttacccagagcccagggtcccaaattttcctaatttaccacaggtgttcgggtgtcacaaagagttgaagcattcttttgatgagcagtttggaaacactgttttggtaggatctgcgaagggatatttggagcacttacgggtctatggagaaaaataccttcagataaaaactagaagaatctttgcgaaaaactgttgtgatatgggtaaaactttcctttcttttgagccttttgagaaccgtttcggcggaactgccccggcgatattggaacgcctgaagcccaggggaaacaggaaatttcacggcaccatcagtcttcacagcaaggctggtgagatccaagtaggaggttttggctggctcaggaaggatgagggcagtgcttctgggggacgctcacagtctgacttccagtggatcctccatagagggggcacgaactggtgggcttacctgggtttgggcatgtctggaccagtggccttcattgccacacttgaaatgtgcaggcaggacaagctgcagacaaaacccttcagacaccagttagagaagaaagggctttattcggccaggagctttggcaagactcactctccaacaactgagctccccaaaatagctcctgagagccagaagctgtttgcgtttcggtggaagatctacagtcaggtgtcactactcagtacacttggaactggcttcccaagggttcaagaactcccttactatcttcggggaggctctgacttggacttgcaaaagtttcctgctaaagacctaagctatgtcttgctcctgtcgtggatgaccttctgctgggacactccatggcagttgggtgctcaaaaggttgatgccctgtttcagcacctggaggactgtgggtataaggtgcccagaagaaatctcagatctgcagacagcagtgcatgtgggaacctattccctttggtaggtgtggaggaatgttcattggtccagtccacagaatgcttgtttgactccctgacgattgcctggggtcacaatagtgaaactgcatctcaaaaaaagaaaaaaaaattgagaacttgttatatggtaccgagcgtaacgcctgcgacctggaacagggctaagggtaaaaccgaccgggtgaaaacgggggaacaggatttcgaacctgggccgaatgggggaccagcaaaaaaaacgagaaaagacgacacaaacagacaaagaagagacaacgaaaaaaccacaaacgaaaaaaagataaaaaaacgaacaaaaacacagggagcgaccaaccggcgagagagacaacagccaaacaaaagacgacagaacccaagcacgagaaataaaacagaacaaaccaaaagccacacagcaaagaagcgaacagcacaggacaagccaggtacaagagaaatgcacagagagcacaacagaagaacaaaaccaacggacgcacgaacgcgagcaaaacacagcgaccagaacaacacgcacacaccgaaccagcggccagacaaaggccacagcaaagggacgaagaaacaacaaaagagctaa

SEQ ID NO: 6634 - DNA, 1974 bp, Homo sapiens
  SIMILAR (655)..(1233): 431254mologous to porcine endogenous retrovirus pol,accession number Y17013,Smith-Waterman Score=362.
atggcccaagtatgggcaaatgataatcctccgggactggcggtcaaccaagcccccgtgctcatagacgttaagcctggggcccaaccaattagacaaaagcagtatccggttcccagagaagctctcaaaggaatccagccagggaccaaggactaccagccagtacaggacttgcgcttggtcaaccaagctacagtgactttgcacccaacagttcctaacccttacacattgttagggctgctgctggctgaggacagctggtttacctgtctggacttaaaagatgccttctttagcatcagactagctcctgagagccagaagctgtttgcctttcagtgggaagatccgcagtcagacctaggctgcatcttgctcctgtacgtggacgaccttctgctgggacactccacggcagtcgagtgtgcaaaagggatggatgtcctgcttcagcacctggaggactgtaggtataagatgtccaagaagaaagctcatatctgcagacagcaggtacgctacctgggattcactattcggaaaggggagcgcagcctgggaaagagaaaaaatggcagttggagttttaacccagactgtggggccctggccaaggccagtggcctatctctcaaaacaactagatgggtttccaaaggctggccactatgtctaaggaccctggcagcaacagccctgttagcacaagaagcagataaactaacccttgggcaaaacctgaatataaaggccccccatgctgtggtaactttgatgactaccgaaggacatcattggctaacaaatgctagattaaccaagtaccaaagcttgccatgtgaaaatccccacataactattgaagtctgtaacaccctaaatcccaccaccctgctcccagtatcagagagcccgggcgagcataactgtgtagaggtgttggactcagtctattctagcagacctgaccttcgggaccagccatgggcatcatcagtagactgggagttatacatggacgggagcagcttcatcaactcacaaggagaaagatgtgcaggatatgcggtggtaactttggatgctgtcattaaagccaaactgtggctacagggcacttcagcccagaaggctgagctcattgctttaactcgggctgtagaactcagtgaagggcaagagtcacttgaagaattgttaggccggtacttctacgtctcacacttgccagcctttgccaaagcagtagcacaactgtgcattacatgccgacagcacaatgcgaggcaaagccccactgtttcgccccacatacaagcttatggagcagctccttttgaggatcttcaggtggatttcacagaaatgccaaaatgtggaggtaacaagtatttgctggttcttacgtgtacttactctgggtgggtggaggcttatccaacacgaactgaaaagccctacaagaaaggaaagaatgacccttcctgtactaagggacaatgtaaccccttagagctagtgataaccaatccccttaatcctcactggaaaaaaggggagcgtgtgaccttaggaatcgacagggccagactggatcctcgagtaaatatcttggttcgaggaggagaagtttacgaacgctctcctgagccagtgtttcaaactttctatgatgaactaaatgtgccagtaccagaaattccaggaaaaacaagaaatttgtttttgcaactagccgagtgtgtagcccagcctctcaatgtcacttcatgttatgtctgtggaggaaccgtaacaggatatcaatggccatggaaagcccgagaattagtacctgtagacccagttcctgatgaattcctggctcaaaagaattaccctgataatttctgggtcctaaaaccctcaattactggacaatattgcatagctagagaaggaaaaaaattcactcaccccgtaggatga

SEQ ID NO: 6635 - DNA, 1464 bp, Homo sapiens
  SIMILAR (67)..(480): 541254mologous to Friend murine leukemia virus gag-pol polyprotein (precursor protein),accession number D88386,Smith- Waterman Score=376.
atgagggagctttattcaatctggctgaagggctattggactgaaggggactgggctcaatcacccccaaggagcccacgggaagctctcgaaggaatccgggttcatctcaggtgcttcaaagcctatggaattatagttctttgccagtgtccatggaacacccccctcctgccagtccctaagccagggaccaagcactacgaaccagtacaggacttgcgcttggtcaaccaagctacagtgactctgcacccaacagttcctaacccttacacgttgttagggctgctgccggctgaggacatctggtttacccatctggacttaaaagatgccatctgtagcatcagaatagctcctgagagccagaagctgtttgcgtttcagtgggaagatctacagtcaggtgtcactactcagtacacttggaactggcttccccaaggttgggtgctcaaaagggttgatgccctgtttcagcacctggaggactgtgggtataaggtgcccaagaagaaatctcagatctgcagacagcaggtacgctacctgggattcactatttggaaaggggagcacagcctgtggtcagaaagaaagcaggtcatctgcagcctaccggaacctaaaaccagaaggcaagtaagggaattcctgggagctgtggggttttgcacattatggattccaaactttgcagtgctagccaaacatttgtacggcattacaaaggggggcaactgggagccttttgaatgggggcctctacaacagcaagcctttttatcagagagcccagtcgagcataactgtgtagaggtgttggactcagtttattctagcagacctgaccttagggaccagccatgggcatcagtagacttggagttatatttggacgggagtagcttcatcaacccacaaggagaaagatgtgcagaatatgcggtggtaactttggatgctgtcattgaaaccaaaccattgccacagggcacttcagcccagaaggctgagctcattgctttaactcgagctctagaactcagtgaaggtgattgcatttggatcaaagactgcaacatagcccctttgaggccacggtggaaaggacctcagaccgtcatcctgaccacccccacggctgtaaagagaagcatagccatagggaattggcaagatgatgaatggctccctgagagaatcacacaatattatgggcctgctacttgggcacaatacggctcgtggggatactacaaccccatttacatgctcaaccaaatgatatggttacaagctgtcttagaaataaccactaataaaactggcagagccttgactattctggcctggcaagaaactcagatgagaaatcctacctatcaagatagattggctctcgactacttactagcagctgaaggaggggtctgtgggaaatttaaccttactaattga

SEQ ID NO: 6636 - DNA, 1008 bp, Homo sapiens
  SIMILAR (302)..(358): 731254mologous to Xenopus laevis zinc finger protein Fez,accession number AF195021,Smith-Waterman Score=73.
atggttatctcagtagatgcagaaaaagcctttggcaagattcaacagcccttcatgctgagaactctcagtaaattagggctcggggttgcccgctcccggaatcccggagtctccgcggcccgaaccgagtctggaccatttagaagacgccggcaggttgaaaggaaaaccaagaagcgcgcagcccggctctggaaggctttggagagtcagctgacttgtacacaattcgcggcctctggagccttacctgccttcttgactgaatgccaccatgttcggttttacggcgttgtgctgcagcgacctgctcaactgcgcactgagtctcaagggcgacctggccgcgacggcctgccgctgcagcagtacaagctggtctttaatgcgcactataacttaacccgtcacatgccagtgcacacaggagccagacccttcgtttgcaaagtgtgcggaaaaggtttcaggcaagcaagcaccctgtgcaggcacaagatcattcacacgcaggaaaaacctcacaaatgtaaccagtgtggcaaagcatttaatagaagttccactttaaacactcatacccgaatacacgcgggctacaaaccgtttgtgtgtgaattctgtggcaaagggtttcatcaaaaagggaattacaaaaaccacaagttgacccacagcggggagaagcagttcaagtgcaatatctgcaacaaggctttccaccaggtttacaacctcaccttccacatgcacacccacaacgacaagaagcctttcacctgccccacgtgcggcaagggtttctgcaggaactttgacctcaagaagcatgtccgcaagctgcacgacagcagcctggggctggcccgcacgccagctggcgaaccaggcactgaaccgccgcccccgctaccgcagcagccgccgatgacgctgcctcctctgcagccgccgctgccaaccccggggcccctgcagcccgggctccaccagggccaccagtga

SEQ ID NO: 6637 - DNA, 174 bp, Homo sapiens
  SIMILAR (13)..(75): 501254mologous to Drosophila melanogaster brahma associated protein 60 kDa,accession number AF071503,Smith-Waterman Score=47.
ccctgtcctccccctgggccgggatgcagcgctgcccctggcccctctggagctcagcagggagccccatgcccttccaggtgtggagagcagcctgcgcgtcactcgctgccggagccctcgggcagcttggctgttttatgcccaattcttcaccctccccctatccacctc

SEQ ID NO: 6638 - DNA, 588 bp, Homo sapiens
  SIMILAR (522)..(587): 1001254mologous to Homo sapiens neogenin,accession number U61262,Smith-Waterman Score=125.
ttaagggaagaggccaggatgctgcagcccctcaggacatagctccccgggctcctccccgaggctggctgggctcttgggtcctggatgggtccttccttccacacaagctgtgtcctggagaaccttccataaccttcccaaccctttacttggtggggaaccctggtggtggtaatgaaccttaattgagccctcagttgtcgcgctgaaataacaaacactacttcccacagctctggaggctggcagtctgggttgagagtgccagcacgggggcttctggtaaggccttttttttttctgacttgtagacggccgccttctccctgtgccctcacaggacaaagagatcgtctctgtctggtctctttttataagggcactcatcccactcatgagggtgccaacttcatgacctgatgaccttccgaaggcctcatttccaaatgccatcacctcgagggttaggaattcaacgtaggaatttgggagggacacaaaggtgcagtccctagcagcatcatttccactccagcagcctcgcttctccagctcgcagtcatctctaccacccgggcagcccat

SEQ ID NO: 6639 - DNA, 4650 bp, Homo sapiens
  SIMILAR (236)..(4093): 891254mologous to Rattus norvegicus neogenin,accession number U68726,Smith-Waterman Score=6065.
gggccgggccgggctgggctggagcagcggcggccgcgggagccgagcttgcagcgagggaccggctgaggcgcgcgggagggaaggagacaagggctccgcggcgctgtcgccgccgctaccgctcactctcggggaagagatggcggcggagcggggagcccggcgactcctcagcaccccctccttctggctctactgcctgctgctgctcgggcgccgggcgccgggcgccgcggccgccaggagcggctccgcgccgcagtccccaggagccagcattcgaacgttcactccattttattttctggtggagccggtggatacactctcagttagaggctcttctgttatattaaactgttcagcatattctgagccttctccaaaaattgaatggaaaaaagatggaacttttttaaacttagtatcagatgatcgacgccagcttctcccggatggttctttatttatcagcaatgtggtgcattccaaacacaataaacctgatgaaggttattatcagtgtgtggccactgttgagagtcttggaactattatcagtagaacagcgaagctcatagtagcaggtcttccaagatttaccagccaaccagaaccttcctcagtttatgctgggaacaatgcaattctgaattgtgaagttaatgcagatttggtcccatttgtgaggtgggaacagaacagacaaccccttcttctggatgatagagttatcaaacttccaagtggaatgctggttatcagcaatgcaactgaaggagatggcgggctttatcgctgcgtagtggaaagtggtgggccaccaaagtatagtgatgaagttgaattgaaggttcttccagatcctgaggtgatatcagacttggtatttttgaaacagccttctcccttagtcagagtcattggtcaggatgtagtgttgccatgtgttgcttcaggacttcctactccaaccattaaatggatgaaaaatgaggaggcacttgacacagaaagctctgaaagattggtattgctggcaggtggtagcctggagatcagtgatgttactgaggatgatgctgggacttatttttgtatagctgataatggaaatgagacaattgaagctcaagcagagcttacagtgcaagctcaacctgaattcctgaagcagcctactaatatatatgctcacgaatctatggatattgtatttgaatgtgaagtgactggaaaaccaactccaactgtgaagtgggtcaaaaatggggatatggttatcccaagtgattattttaagattgtaaaggaacataatcttcaagttttgggtctggtgaaatcagatgaagggttctatcagtgcattgctgaaaatgatgttggaaatgcacaagctggagcccaactgataatccttgaacatgcaccagccacaacgggaccactgccttcagctcctcgggatgtcgtggcctccctggtctctacccgcttcatcaaattgacgtggcggacacctgcatcagatcctcacggagacaaccttacctactctgtgttctacaccaaggaagggattgctagggaacgtgttgagaataccagtcacccaggagagatgcaagtaaccattcaaaacctaatgccagcgaccgtgtacatctttagagttatggctcaaaataagcatggctcaggagagagttcagctccactgcgagtagaaacacaacctgaggttcagctccctggcccagcacctaaccttcgtgcatatgcagcttcgcctacctccatcactgttacgtgggaaacaccagtgtctggcaatggggaaattcagaattataaattgtactacatggaaaaggggactgataaagaacaggatgttgatgtttcaagtcactcttacaccattaatgggttgaaaaaatatacagagtatagtttccgagtggtggcctacaataaacatggtcctggagtttccacaccagatgttgctgttcgaacattgtcagatgttcccagtgctgctcctcagaatctgtccttggaagtgagaaattcaaagagtattatgattcactggcagccacctgctccagccacacaaaatgggcagattactggctacaagattcgctaccgaaaggcctcccgaaagagtgatgtcactgagaccttggtaagcgggacacagctgtctcagctgattgaaggtcttgatcgggggactgagtataatttccgagtggctgctctaacaatcaatggtacaggcccggcaactgactggctgtctgctgaaacttttgaaagtgacctagatgaaactcgtgttcctgaagtgcctagctctcttcacgtacgcccgctcgttactagcatcgtagtgagctggactcctccagagaatcagaacattgtggtcagaggttacgccattggttatggcattggcagccctcatgcccagaccatcaaagtggactataaacagcgctattacaccattgaaaatctggatcccagctctcactatgtgattaccctgaaagcatttaataacgtgggtgaaggcatccccctgtatgagagtgctgtgaccaggcctcacacagacacttctgaagttgatttatttgttattaatgctccatacactccagtgccagatcccactcccatgatgccaccagtgggagttcaggcttccattctgagtcatgacaccatcaggattacgtgggcagacaactcgctgcccaagcaccagaagattacagactcccgatactacaccgtccgatggaaaaccaacatcccagcaaacaccaagtacaagaatgcaaatgcaaccactttgagttatttggtgactggtttaaagccgaatacactctatgaattctctgtgatggtgaccaaaggtcgaagatcaagtacatggagtatgacagcccatgggaccacctttgaattagttccgacttctccacccaaggatgtgactgttgtgagtaaagaggggaaacctaagaccataattgtgaattggcagcctccctccgaagccaatggcaaaattacaggttacatcatatattacagtacagatgtgaatgcagagatacatgactgggttattgagcctgttgtgggaaacagactgactcaccagatacaagagttaactcttgacacaccatactacttcaaaatccaggcacggaactcaaagggcatgggacccatgtctgaagctgtccaattcagaacacctaaagcggactcctctgataaaatgcctaatgatcaagcctcagggtctggagggaaaggaagccggctgccagacctaggatccgactacaaacctccaatgagcggcagtaacagccctcatgggagccccacctctcctctggacagtaatatgctgctggtcataattgtttctgttggcgtcatcaccatcgtggtggttgtgattatcgctgtcttttgtacccgtcgtaccacctctcaccagaaaaagaaacgagctgcctgcaaatcagtgaatggctctcataagtacaaagggaattccaaagatgtgaaacctccagatctctggatccatcatgagagactggagctgaaacccattgataagtctccagacccaaaccccatcatgactgatactccaattcctcgcaactctcaagatatcacaccagttgacaactccatggacagcaatatccatcaaaggcgaaattcatacagagggcatgagtcagaggacagcatgtctacactggctggaaggcgaggaatgagaccaaaaatgatgatgccctttgactcccagccaccccagcctgtgattagtgcccatcccatccattccctcgataaccctcaccatcatttccactccagcagcctcgcttctccagctcgcagtcatctctaccacccgggcagcccatggcccattggcacatccatgtccctttcagacagggccaattccacagaatccgttcgaaatacccccaggcactggacaccatgccagcctcttcgtctcaaacatgctgcactgatcaccaggaccctgaaggtgctaccagctcctcttacttggccagctcccaagaggaagattcaggccagagtcttcccactgcccatgttcgcccttcccacccattgaagagcttcgccgtgccagcaatcccgcctccaggacctcccacctatgatcctgcattgccaagcacaccattactgtcccagcaagctctgaaccatcacattcactcagtgaagacagcctccatcgggactctaggaaggagccggcctcctatgccagtggttgttcccagtgcccctgaagtgcaggagaccacaaggatgttggaagactccgagagtagctatgaaccagatgagctgaccaaagagatggcccacctggaaggactaatgaaggacctaaacgctatcacaacagcatgacgaccttcaccaggacctgacttcaaacctgagtctggaagtcttggaacttaacccttgaaaacaaggaattgtacagagtacgagaggacagcacttgagaacacagaatgagccagc

SEQ ID NO: 6640 - DNA, 882 bp, Homo sapiens
  SIMILAR (313)..(879): 1001254mologous to Homo sapiens prepromultimerin,accession number U27109,Smith-Waterman Score=1024.
atggccatcaatgagagactggataaagaaaatgtggtacataaacaccatggaatactatgcagccataaaaaggaacaagatcatgtcctttggagggacatggatggagctggaggccatcatcctcaacaaactgacaaggaaacagcaaaccaaaccctgcatgttcttacttacaagtgggagttgaacactcctaaaaccttggacgatcggaataatgaatgtcttttgtatgttaatgagaagactggtggctggggactcctagatagcttcaggatggggattggtcaccagaaagaccaagaggagtattcaagctgtagtcggcatccgtgccaaaatgggggcacgtgcataaatggaagaactagctttacctgtgcctgcagacatccttttactggtgacaactgcactatcaagcttgtggaagaaaatgctttagctccagatttttccaaaggatcttacagatatgcacccatggtggcattttttgcatctcatacgtatggaatgactatacctggtcctatcctgtttaataacttggatgtcaattatggagcttcatataccccaagaactggaaaatttagaattccgtatcttggagtatatgttttcaagtacaccatcgagtcatttagtgctcatatttctggatttttagtggttgatggaatagacaagcttgcatttgagtctgaaaatattaacagtgaaatacactgtgatagggttttaactggggatgccttattagaattaaattatgggcaggaagtctggttacgacttgcaaaaggaacaattccagccaagtttccccctgttactacatttagtggctatttattatatcgtacataa

SEQ ID NO: 6641 - DNA, 594 bp, Homo sapiens
  SIMILAR (593)..(507): 751254mologous to Homo sapiens PRO1546,accession number AF116638,Smith-Waterman Score=124.
tcagaacacggacatttgttgcttagcgccttggctgacattaatctcatcttgtttcactggactgttcccatggcttggtttcaacagagtcaagttatctacttgttttactcccagattgtcttctttactaggttcaacagtaggcactggagacatggagatgactgaggcacaccttgtcctcatgagagcagcataatatactgacacacatattaagtactcaacaaatagtaactctagcttcataagtagtttagtaactaaagggttagatgtgatataggcagtactagaggtataaatttcctccccttgccctccacccctgacaggccccagtgtgtgctgttcccctccctgtgtccgtgtgttctcattgttcaacacccacttatgagtgagaatatctggtgtttggttttcttcctgtgttagtttgctgaggatgatggcttccaggtttatccatgtctcggcaaaggacatgttctcattctttttatggctgcatagtattccatggtgtatatgtcccacattttctttatccagcgtatcattgatgggaatttgggttggttccat

SEQ ID NO: 6642 - DNA, 3624 bp, Homo sapiens
  SIMILAR (1)..(3621): 971254mologous to Rattus norvegicus Ca2+-dependent activator protein; calcium-dependent actin-binding protein,accession number U16802,Smith-Waterman Score=6055.
agcgagaaggagaaggaagagttggagcggctgcagaaagaggaggaggagaggaagaagaggctgcagctgtatgtgttcgtgatgcgctgcatcgcctacccctttaatgccaagcagcccaccgacatggctcgccggcagcagaagatcagcaaacagcagctgcagacagtcaaggaccggtttcaggctttcctcaatggggaaacccagatcatggctgacgaagccttcatgaacgctgtgcagagttactatgaggtgttcctgaagagcgaccgtgtggcccgcatggttcagagtggaggctgttccgccaacgactcccgggaggtcttcaagaagcacattgagaagagagtgcgcagcctgcctgagattgacggcctcagcaaggagactgtgctgagctcctggatggccaaatttgatgccatctaccgtggagaagaggacccgcggaagcagcaggcccggatgacagccagcgcagcctccgagctgattctgagcaaggagcaactctatgagatgttccagaacattcttgggatcaagaagttcgaacatcagctcctttacaatgcctgccagctggacaatccagatgagcaagcagcccagatcagacgagagctggatggacgtctacaaatggcagaccaaatagccagggaacgcaaatttcccaagtttgtatccaaagaaatggaaaacatgtacattgaggagctgaagtcatctgtcaacctgctcatggccaacttggagagcatgccggtatccaaaggcggggagttcaagctccagaaactcaaacgcagccacaatgcttccatcatcgacatgggcgaggagagtgagaaccagctctccaagtcagatgtcgtgctgtctttctcattggaggtggtaattatggaagtccaaggcctcaaatctttggctccaaatcgcatcgtatattgcacaatggaggtggaaggaggagagaaactacagactgatcaggccgaggcttctaaaccaacctggggcacccagggtgacttctccacaacccatgcactgccagctgtgaaggtgaagctgttcacagagagcacaggcgtcctggcgttggaggacaaggagcttgggcgggttattctccatcccaccccgaacagccccaaacagtcagagtggcacaaaatgacagtctccaaaaactgccccgaccaagatctcaaaatcaaacttgctgtccgaatggataagcctcaaaacatgaagcattctgggtatttatgggccatcggtaagaatgtctggaagagatggaagaaaaggttttttgtattggtgcaggtcagtcagtacacgtttgccatgtgcagttatcgggagaagaaagcggagcctcaggaacttctacaattggatggctacactgtggattacaccgacccccagccaggtttggagggtggccgagccttcttcaatgctgtcaaggagggagacaccgtgatatttgccagtgacgatgaacaagaccgcatcctgtgggtccaggccatgtatcgggccacggggcagtcacacaagcctgtgcccccgacccaagtccagaaactcaacgccaagggaggaaatgtacctcagctggatgcccctatctctcaattttctggactgaaggacgcagatagagctcaaaaacatggcatggatgaatttatctcttccaacccctgtaactttgaccacgcttccctctttgagatggtacaacgccttactttggatcacagacttaatgattcctattcttgcctgggctggttcagtcctggccaggtgtttgtactagacgagtattgcgcccgaaatggagtccgggggtgtcaccgacatctctgctacctcagagacttgcttgaacgggcagaaaatggcgccatgatcgaccccacccttcttcactacagctttgccttctgtgcatcccatgtccatgggaacaggcctgatggaattggaactgtgactgttgaagaaaaggaacgttttgaagaaatcaaagagaggctccgagttctgctagaaaatcagattacacattttaggtattgctttccatttggtcgacctgaaggtgctttgaaagctactctctcactcttggaaagggttttgatgaaagatattgttaccccagtgccacaagaggaggtaaaaacagttatccgtaaatgtctggaacaggctgcgttagtcaactattctcggctctcagagtatgccaaaatcgaagagaatcaaaaggatgcagaaaatgtaggccggttaatcactcctgccaaaaagcttgaagatacaatacgtcttgctgaactagtcattgaagttcttcagcaaaatgaggagcaccacgcagaggggaaagaggcctttgcgtggtggtcagatttaatggtggagcatgcggagacgttcctgtcactctttgcagtagacatggatgcagccttagaggtgcaacctccagacacatgggacagttttccactatttcagctgctgaatgattttctccgtactgactataatttgtgcaatggaaaatttcacaaacacctgcaagacctgtttgccccacttgttgttagatatgtggatctgatggagtcctcaattgcacaatccattcacaggggctttgagcgggagtcatgggaaccagtcaataatgggtcaggcacctcagaagatctgttttggaaacttgacgcccttcagaccttcattcgggacctgcactggcctgaagaagagtttggaaagcacctggaacaacggctgaagttgatggcaagtgacatgatcgaatcttgtgtcaaaagaaccaggattgcatttgaagttaagctgcaaaaaaccagtcgatcaacagattttcgagtcccacagtcaatatgcaccatgtttaatgttatggttgatgccaaagctcaatcaacaaaactttgcagcatggaaatgggccaagagcatcaataccattcaaaaatagacgaactaattgaagaaactgttaaagaaatgataacactcttggttgcaaagttcgttactatcttggaaggagtgctggcaaaattatccagatatgacgaagggactttgttttcttcttttctgtcatttaccgtgaaggcagcttccaaatatgtggatgtacctaaacccgggatggacgtggccgacgcctacgtgactttcgtccgccattctcaggatgtcctgcgtgataaggtcaatgaggagatgtacatagaaaggttatttgatcaatggtacaacagctccatgaacgtgatctgcacctggttgacggaccggatggacttacagcttcatatttatcagttgaaaacactaattaggatggtaaagaaaacctacagagatttccgattgcaaggggtcctggactccaccttaaacagcaagacctatgaaacgatccggaaccgtctcactgtggaggaagccacagcatcagtgagtgaaggtgggggactgcagggcatcagcatgaaggacagcgatgaggaagacgaagaagacgattag

SEQ ID NO: 6643 - DNA, 609 bp, Homo sapiens
  SIMILAR (61)..(189): 861254mologous to Rattus norvegicus Ca2+-dependent activator protein; calcium-dependent actin-binding protein,accession number U16802,Smith-Waterman Score=199.
atggcttaccgcagctttgactcctgggctcaggccaccctcccgcctcaccttcctaagtatctggcactacaggtcagtcagtacacgtttgccatgtgcagttatcgggagaagaaagcggagcctcaggaacttctacaattggatggctacactgtggattacaccgaccaacagccagcactgttcacaatagcagagttggaaccaactcaaatgcccatcaatgacagactggataaagaaaatgtggcacatatacaccatggaatactatgcagtcataaaaatgggagtttcctctcccaaaataagaggtcatctacttctcctaagtacttcatcatatcaaaagttctcagaaatctgagaatggttgtcaccagccacttctcggagcacatgatctctcctttttcagcaccacccaaggtcacccagctgctgcccatgaagatgctgccagcagagggtgtccagccagcacaagagccaggcaggccagctccgctgcaattggcagaaagtttcttagcgcaaaggaggggtaaactagcatctgggggaatgtatgaggggcctgaagaagagaatgaaccattatga

SEQ ID NO: 6644 - DNA, 1923 bp, Homo sapiens
  SIMILAR (1065)..(115): 781254mologous to Cloning vector pSacBII SacB,accession number U09128,Smith-Waterman Score=1251.
  misc_feature (1)...(1923): n = a,t,c or g
ctaaggacacagggggccagatggaggattgagcatcccaggattttggtatctacttgagggtcctggaatcaatcttccacagacaccgagggacaactgtgtaacacggggactggtcatggaccctctcaaaccacacaagcaatgcccagtgaggagctgtcggggatcctctagagtcgacctgcaggcatgcaagctaagcctctgtttgtcaagaagcttggaaaaaccacattgttcccttgggcttgcggcacgcgaaagtgagagtaaagtaattgtcacatcgttgggatcaagacccaatttgcagcacagccccgttttgtccagccggcttgtaaggcccgttaaaagagtttgatacataacccacgcatgtaaaatatcgtgtgagttaataccatcgatcgtcattttgaaaccgcgtgaatcagtgaacaagtaccatttgccgttcatttgaaaaacattcgcgcgctcgatttcatcagttaccgtgtttgaagtgatcagcggcttcattacttttttcaatgtgtaatcattatttaactctatgataccgagggcgccgttcgctaactcagcatcgcgttttttagcgctctgctgaagcttctggctttctttacggaagaagttcgtgccgccgccgtagtacgctttgttaaataaagattcttcgccttggtatccgttttctgttcccgtgttggcttcgaatacaaggtatttatggcctttgtcttcaacgtagtgagggtctctcagcgtatggttgtcgccggatgtataattgccttcatcgataaactgctgaacgttctgatatgtttttccgtctccgtcaaaaatcgttttgtgatcttccactccgttgattttgagtgtgtcatcagattttgacacatttacctgcgctgttgtcaggctttgtttgccgtaatgtttaccggaatagtcagtgtagaataaacggatttttccgtcagatgtaaaggttgcagaaccggaccattcttgcgtctgatctttcaggatcggatcgttggcgtcggggatcctctggccttccttctccttttcttgttcctctctctctttctctccgtagacgtcggactgtgcccagactggtgtcaggggtatctctagaccgagccgggggtatgcccccaaggcactcttggagaatctgacgattatgtgtcttggggttgatcttctcgtggagtatattactggagttctctggatttcctgaatttgaatgttggcctgtcttgctaggttgaggaagtgctcctggatgatatcctgaagcatgttctccaacttggttccattctccccatctctttcaggtgctccaatcaatcgtaaatttggtctttttacataatcccatatgtcttggaaattttgtttgttctttttgggggatcctctagagtcaagccgcggggtcagcaacgctatggcgttatggctgcatagtattccatggtgtatatgtgccacattttcttaatccagtctatcattgatggacatttgggttggttccaagtctttgctattgtgaatagtgctgcaataaacgtacatgtacatttgtctttatagcagcataatttataatcctttgggtatatacccagtaatgggatggctgagtcaagatggtatttctgattctagatccttgaggaatcgccacactgtcttccacaatggctgcactangtttacactcccaccaacagtgtaaaagtgttcctgtttctctacatcctctccagcacctgttgtttcctgactttttaatgatcagatagcctcctattttttaactatgagttggaatttgctgcttttgatatgataagaaagttcaaagtttctcttccttgc

SEQ ID NO: 6645 - DNA, 357 bp, Homo sapiens
  SIMILAR (109)..(300): 821254mologous to Homo sapiens NAG13,accession number AF194537,Smith-Waterman Score=270.
atgtgttatgagcattccaagcagagggaacagcatgtgcagcagtacagaagcctgaaagaatatggctacgtcttggtttcaacagtgctggaaacagggatgcaggaaaatctagaagaaatggataaattcctggacacatacaccctcccaagactaaaccaggaagaagttgaatcccagagtacaccaataacaggctctgaaattgaggcaataattaatagcctaccaaccaaaaaaagtccaggaccagacaaattcacagctgaattctaccagagaattcagactcaacactgcaacttcaactctaacctcaacgtccaggccgccagtctgccccagttctga

SEQ ID NO: 6646 - DNA, 683 bp, Homo sapiens
  SIMILAR (414)..(623): 821254mologous to Homo sapiens cysteine-rich secretory protein-2/type I,accession number X95239,Smith-Waterman Score=297.
cgccgcagctcctcaacgccgcaacgcgccggcccaactgcaggaaggtctgtctctggagccagggtaaatggttataaaattatacaccatggccctcctaaagacactctaggaaaaccatgtcatcctgatcttaaaacacctgcaagaaagagcacagtacttcaccattaataaagtagatatttcatcctgctcagaaaaccaacatttccagcaatggctttactaccggtgttgtttctggttactgtgctgcttccatctttacctgcagaaggaaaggatcccgcttttactgctttgttaaccacccagttgcaagtacaaagggagattgtaaataaacacaatgaactaaggaaagcagtctctccacctgccagtaacatgctaaagatggaatggagcagagaggtaacaacgaatgcccaaaggtgggcaaacaagtcactttacaacatagtgatccagaggaccgcaaaaccagtacaagatgtggtgagaatctctatatgtcaagtgaccctacttcctggtcttctgcaatccaaagctggtatgacgagatcctagattttgtctatggtgtaggaccaaagagtcccaatattgtcctgctggtaataatatgaatagaaagaataccccgtaccaacaaggaacaccttgtcccggtt

SEQ ID NO: 6647 - DNA, 1386 bp, Homo sapiens
  SIMILAR (241)..(969): 1001254mologous to Homo sapiens cysteine-rich secretory protein-2/type I,accession number X95239,Smith-Waterman Score=1346.
cggtgagaggggcgcgcagcagcagctcctcaacgccgcaacgcgccggcccaactgcaggaaggtctgtgctctggagccagggtaaatggttataaaattatacaccatggccctcctaaagacactctaggaaaaccatgtcatcctgatcttaaaacacctgcaagaaagagcacagtacttcaccattaataaagtagatatttcatcctgctcagaaaaccaacatttccagcaatggctttactaccggtgttgtttctggttactgtgctgcttccatctttacctgcagaaggaaaggatcccgcttttactgctttgttaaccacccagttgcaagtgcaaagggagattgtaaataaacacaatgaactaaggaaagcagtctctccacctgccagtaacatgctaaagatggaatggagcagagaggtaacaacgaatgcccaaaggtgggcaaacaagtgcactttacaacatagtgatccagaggaccgcaaaaccagtacaagatgtggtgagaatctctatatgtcaagtgaccctacttcctggtcttctgcaatccaaagctggtatgacgagatcctagattttgtctatggtgtaggaccaaagagtcccaatgcagttgttggacattatactcagcttgtttggtactcgacttaccaggtaggctgtggaattgcctactgtcccaatcaagatagtctaaaatactactatgtttgccaatattgtcctgctggtaataatatgaatagaaagaataccccgtaccaacaaggaacaccttgtgccggttgccctgatgactgtgacaaaggactatgcaccaatagttgccagtatcaagatctcctaagtaactgtgattccttgaagaatacagctggctgtgaacatgagttactcaaggaaaagtgcaaggctacttgcctatgtgagaacaaaatttactgatttacctagtgagcattgtgcaagactgcatggataagggctgcatcatttaattgcgacataccagtggaaattgtatgtatgttagtgacaaatttgatttcaaagagcaatgcatcttctcccccagatcatcacagaaatcactttcaggcaatgatttacaaaagtagcatagtagatgatgacaactgtgaactctgacataaatttagtgctttataacgaactgaatcaggttgaggattttgaaaactgtataaccataggatttaggtcactaggactttggatcaaaatggtgcattacgtatttcctgaaacatgctaaagaagaagactgtaacatcattgccattcctactacctgagtttttacttgcataaacaataaattcaaagctttacatctgc

SEQ ID NO: 6648 - DNA, 567 bp, Homo sapiens
  SIMILAR (235)..(411): 491254mologous to Homo sapiens Human secreted protein, SEQ ID NO: 6812,accession number G02731,Smith-Waterman Score=135.
atggctttactaccggtgttgtttctggttactgtgctgcttccatctttacctgcagaaggaaagctgcttcagctccagtcatggctaaaaggggtcaatgtacagctccggctgtttcttcagcgggtgcaagccccaagtcctggcagtttacatgtggtattgggactgtgggagcacagaagtcaagaattgaagtttgggaacttctgcctacatttcacaggatgtatggaagtgcctggatatccagatagaaacttgctgcaggggaagagctgtcatggagaacctctgctagggcagtgcagaagggaaatgtggggtgcaagcccaaacacagagtcactactaaagcactgtgtagtggagctgagaagagggccaccatcctccagaccccagaatggaacaagcagcgacaatagccttcctccttgcagagcctctgtcactcagtttaaccccacaaatgacctcacaaacaactcatctcattattcttctctaatgagaagtacactgatgatgatgatcatcatcatcattttgatgtcagtctag

SEQ ID NO: 6649 - DNA, 427 bp, Homo sapiens
  SIMILAR (198)..(425): 1001254mologous to Homo sapiens cysteine-rich secretory protein-2/type I,accession number X95239,Smith-Waterman Score=384.
tggaccagcgtggtggaattccgcggagagaggggcgcgccgcagctcctcaacgccgcaacgcgccggcccaactgcaggaagggttataaaattatacaccatggccctcctaaagacactctaggaaaaccatgtcatcctgatcttaaaacacctgcaagaaagagcacagtacttcaccattatttccagcaatggctttactaccggtgttgtttctggttactgtgctgcttccatctttacctgcagaaggaaaggatcccgcttttactgctttgttaaccacccagttgcaagtgcaaagggagattgtaaataaacacaatgaactaaggaaagcagtctctccacctgccagtaacatgctaaagatggaatggagcagagaggtaacaacgaatgcccaaaggtgggcaaacaa

SEQ ID NO: 6650 - DNA, 981 bp, Homo sapiens
  SIMILAR (13)..(351): 611254mologous to Homo sapiens FLJ00026 protein,accession number AK024436,Smith-Waterman Score=346.
atgtgcctggtgtttctgagcagtagcgaggaggccagtgtgctggaacagagtgagcaagggggaaagggcgggctctacgaggcggtgaatgaggtctacaagaacctcatccccatcctggaagcccaccgtgactacaagaagctggccgcggtgcacggcaaactgcaggaggccttcaccaagatcatgcaccagagttccggctgggagccccagcgcgtgttcgggacgtatttccgcgtgggcttctacggcgcccacttcggtgacctggatgagcaggagtttgtgtacaaggagccatcgatcacgaagctggcagagatctcacaccggctggaggcatgtccttgtgaagatctgggagagttggtgtatacatttattgaagcctttacttcatgccagttggagaaggtgcttcagcaaggggacatcagtgagtgctgtgagccttacatggtgttgaaagaagtggacacagccaagaacaaagagaagctagagaagctgcgcctggcggccgagcagttctgcacccgcctgggccgctaccgcatgcccttcgcctggacggccgtgcacttggccaacatcgtgagcagcgctgggcagctggaccgggactctgactcggagggcgagcgccggccagcctggacagaccgccgccgtcgggggccccaggaccgggcgagtagtggggacgacgcctgcagcttctctggcttccgtccagccacgctaactgtcacaaacttctttaagcaggaggctgagcgactcagtgacgaggacctcttcaagttcctggctgacatgaggcgcccgtcgtccctgctgcggcgactacgtcctgtgactgccactcaacaaacctacactgagagcacctactgtgccaggggcatcagagacccaacgatgaccatgatggacaaatccctgacctcaggggctggctacagcttctaa

SEQ ID NO: 6651 - DNA, 513 bp, Homo sapiens
  SIMILAR (39)..(413): 351254mologous to Leishmania major L8453.1,accession number AC008054,Smith-Waterman Score=122.
atgtacaccatcatcaacgggcccagcaagttggtcgcgcagcgccgcacaggtctcacgcagcagcaggtgaagggccagctccaggagctcctgaaaagccggcagcccgcgccgccgaccttgcagccccagcgggcgcagcccttcgcgcagccgctgggaccctggcccctgtcgagtgcagggccaaggcttgtgttcaatcgtgtgaatcgccggcgggacccctccaagtccccatccctccaggggacccaggagacctacacactggcccacaaggagaatgtccgctttgtgtccgaagcctggcagcaggtgcggcagcagctggatggtggcccagccgtcctgctcactgtgcccagggaccagagaccagcccctggggatgtcggagaggagctccaggctaataaagtcgagaaactgccaaaaaaaaaaaaagaaaagaaaagaaaagaaagaaagaaagagaaagggaatgctgataatagatccgcattttga

SEQ ID NO: 6652 - DNA, 255 bp, Homo sapiens
  SIMILAR (46)..(180): 411254mologous to Plasmodium falciparum merozoite surface antigen 2,accession number U91677,Smith-Waterman Score=62.
tccgttaagtgcgagccccggcgcaggggccggatctggccgggggccggcggcggtgtgggagcggcgcgtcatgtacaccatcaccaaggggcccagcaagctggtcgcgcagcgccgcacaggtcccacgcagcagcaggtggagggccggctcggcgagctcctgaaatgccggcagcccgcgccgccgacctcgcagcccccgcgggcgcagccctttgcgcagccgccgggaccctggcccctgtcgag

SEQ ID NO: 6653 - DNA, 625 bp, Homo sapiens
  SIMILAR (100)..(582): 311254mologous to Mus musculus ataxin-2,accession number AF041472,Smith-Waterman Score=122.
  misc_feature (1)...(625): n = a,t,c or g
ggcgtcgagttcatagccgtgcggnggaattcccaggcttgtgttcaatcgtgtgaatggccggcgggccccctccacgtccccatcccttcgaggggacccaggagacctacacagtggcccacgaggagaatgtccgctttgtgtccgaagcctggcagcaggtgcaacagcagctggatggtggcccagccggtgagggcgggccaaggcctgtgcagtacgtggagaggacccccaatccccggctgcagaacttcgtgcccattgacttggacgagtggtgggcgcagcacttcctggctagaatcaccagctgttcctagcggctgctgggaggggggcgctgctacacggccgacctgtcgccaggagagaagcatggcgccctgcccatccactgttgcgcctggctgggtgccggccacacctgaagtgccagcatttggacttttgcacctttttttcccttggcccggctgtcccaaccaagctgccatggccaagggccgaacccgtctgacctcagccctgctcactgtgcccagggaccagcgaccagcccctggggctggcagggaggagctccaggctaataaagtggagaaactgtcaaaaaaaaaaa

SEQ ID NO: 6654 - DNA, 422 bp, Homo sapiens
  SIMILAR (402)..(283): 401254mologous to Mus musculus Tcte2 protein,accession number U46151,Smith-Waterman Score=65.
cactgcacgcccggggctcgtgccagaccccgtcactctccatctcggttatcgttctggttctgcccgaggtccccgaaggctgccgcctcgttttgccccaggctttgggtgtcttcactgaacttggagggtcacgaagcttcgttctgcgtctctctctgtgggtgacccacatatcacttgtacccatgccacttctggtaccagcaccgaacacgaaggattcctaggaaatctgagcgcttatttcccaccccgcctccccaactatcatggaaaggaacatgggactactgaatctgtttgctgtgttgtaacgacagtgaaggccgcgactttcttgtacttagggtgctgaagtaatgatctgagggatttgctcgtcatttgctgtggcagagatgatgttgacaccctgg

SEQ ID NO: 6655 - DNA, 1172 bp, Homo sapiens
  SIMILAR (345)..(614): 911254mologous to Mus musculus ubiquitin-protein ligase E3- alpha,accession number AF061555,Smith-Waterman Score=416.
gatacccagggggtcagtgggctggcggcttcctgctgctccctgtcagagtcaaagcacagatcctcagggtgggctcaggggccgaggcagcccagggaagctccgggtggggaccgtgtcttcctggggttggtgccctctggccgggaccctttgctggcccatggtccccggtttccaaatttttatgttttttttctacccgggagaaaaatgaaagatactattgtgtccttttcaatgatgaacaccattcatatgaccacgtcatatacagcctacaaagagctcttgactgtgagctcgcagaggcccagttgcataccactgccattgacaaagagatgtttgacacagtgaagcgattaagagaaaaatcttgtttaattgtagcaaccacatcaggatcggaatctattaagaatgatgagattactcatgataaagaaaaagcagaacgaaaaagaaaagctgaagctgctaggctacatcgccagaagatcatggctcagatgtctgccttacagaaaaacttcattgaaactcataaactcatgtatgacaatacatcagaaatgcctgggaaagaagattccattatggaggaagagagaagtggcatgggtacaagtgatatgtgggtcacccacagagagagacgcagaacgaagcttcgtgaccctccaagttcagtgaagacacccaaagcctggggcaaaacgaggcggcagccttcggggaaatcgggcagaaccagaacgatctccgagatggagagtgacggggtctggcacgagccccgggcttgcagcgaactgaaagtccccggtacccctcccctcctcagcaggctcggtcactcggcgaggggtgcggccggaggagggggtcgagactgggggagggcggcgccctggggggtcggggggtgtgtcctacctgggccgtggcggacgcaggggtttctggaggagggctctggtccagctcaggaccgggaccggcgggggttaaccctcggcaggcgggaccgccactgcctgcccatcccccaccgccgactgcggcgggacccgagcgcggcttccagggccggccggctgggtagtcccctggggtaccgtccgcgtttactggcggggggaggccaacacaggccgatcacctga

SEQ ID NO: 6656 - DNA, 742 bp, Homo sapiens
  SIMILAR (5)..(391): 981254mologous to Homo sapiens NaCl electroneutral Thiazide- sensitive cotransporter,accession number X91220,Smith-Waterman Score=641.
cgtggtgggaatagagaccgtgcgggacctgctccaggagtatggggcacccatcgtggaccccattaacgacatccgcatcattggcgtggtctcggtcactgtgctgctggccatctccctggctggcatggagtgggagtccaaggcccaggtgctgttcttccttgtcatcatggtctcctttgccaactatttagtggggacgctgatccccccatctgaggacaaggcctccaaaggcttcttcagctaccgggcggacatttttgtccagaacttggtgcctgactggcggggtccagatggcaccttcttcggaatgttctccatcttcttcccctcggccacaggcatcctggcaggggccaacatatctggtgacctcaaaggcaggcttcttggcttggcattcaaggctccagcctgcctgtctagcctcatccctgaccagtgccacccttcccatgagcctgctgcagccctgaggctctactgctttgcccgtgttacctcgtccctcctccacgcctttgcctgtgctgcgctctctacctgcaactccgcacagtatccttctaagcaaaaaggtgttttctatgcggaggcccagccactgaccaccagtaccctggccaggggcaccttcggtcattgccctccgtggcccaagaaaggggacagaaccacagcccaagaagccaatagccgcggggaagtcctcacatttctggagaaatag

SEQ ID NO: 6657 - DNA, 461 bp, Homo sapiens
  SIMILAR (322)..(441): 451254mologous to Homo sapiens unconventional myosin IXb,accession number AF143684,Smith-Waterman Score=106.
  misc_feature (1)...(461): n = a,t,c or g
natagatnnccctggagagcgctgcacgagccgctttgaaaggaaagggtagtgtccaaacagcattttccagacaagctctgtacttttttgccaaaagaattaactttaaactgaaggcaggggacagttaaacaagagtcggcactgggaacagctgtgcgtagaccagaccagtgacttataaggaggcgatcgagatcggatgacagcaaatcatgaaagctacctcctcatggcaagcacccagaatgatatggaagactgggtgaagtcaatccgccgagtcatatggggacctttcggaggagcaacacagatgtacacacggtggcatcacttcttaagctgtacctccgagaacttccagaaccagttattccttatgcgaagtatgaagattttttgtcatgtgccaaactgctcagcaaggaagaggaagcatgtgttaatgaattagc

SEQ ID NO: 6658 - DNA, 417 bp, Homo sapiens; identical to SEQ ID NO: 3120
  SIMILAR (136)..(225): 421254mologous to Caenorhabditis elegans glycine- rich,accession number U64837,Smith-Waterman Score=68.

SEQ ID NO: 6659 - DNA, 1597 bp, Homo sapiens
  SIMILAR (1596)..(1513): 421254mologous to Homo sapiens Human secreted protein encoded by gene 24 clone HSKXE91,accession number W75080,Smith-Waterman Score=45.
aacctttcatcttcaagaatctgatgactgagttttgtaggaatgtacccaacagttggaccagagcctggccagttcccaccaattggagtaagctatttaattgagggttaagaagctcgatagttttttcaatctgttatcagaaaaatattatctaaagacactgatagcagctgactggtaaaactgaaagttggccttagtaaatggaactagtaaaaaatagataaaaatatgtaaaaccttttatgtcctgtcaaggaaaaaaaaataagcaaacttgatttgttttaaaattgtaaatattcattgcaaaacctaaattatacaaaatctatttcgatttgaatctcttaacatatgaaaagccacatcttaagtgcattatgctctgtaaggcatgttattagccagctttgctgaaaaatgtattcttctacagctcagaaagaggagtaaaattgctctagaaatttttgatctcagccactttgcatctaaagaggaacccaactccccactcacaatcccccacacacattttaattataagagttcaacattttccacagatatcattaagccaagcaaggaaactcctctctgtaaaaacaacaaaaaagttgcaatgtaaatagttattttagctattttctttgtgattagaggataagattttgttatttcttttggtacttagtcctttaactatctgaaaatggctcactttgacctgtttctttggtcagccaaactgaagtgaggggcctctgtttatatatagaatcttgtatatgtaactttacttatgtgggaccaatggccagtatattctaatggacacaaatctcccaatccttatgtaggattatctgttcaccttgccatgtccatcttgcaatgagacctaacttgcacctgcctgtttttctgcatgattggactccaaagactattaccaatgatgagaattgtcttgtgtcagtgtttataaaatggacttaaagcacacacacatgcatacccacattcacatgcacccttacagttctagatcaaccctggaaggcaaaaccatgtacgtccagtttctttgcaaggtctgagcagtgagaactaaattcagtcagtctaatgggtaaaatgcaacctcagtgatgcttaataaggatttgaaatcgttcaagtcatttctgtgttctttctcacaccctttcctttctattttgtcttcttttattttcaaaatgtctgtggaacaagaggatgaatcgggggagaacttctgcttcttttgactctttttaggtaatatggagtcaatatattatgatttctgtttcttatggattattaaaatcagaggaaatctgcttctctcaacataaaaccaaatccaaacccagacattgttggagtttgcctgttgacaatggttatgatgctgctcgttgtcttgagttgcatgtaacgacagtagctctgaagggtgtcatgatttcattttggcaactggtaaaagaaacttgtagtgtggtctgattgtgccagggaataaataagaaataaggaatgaaaaaaaaaaaaaaaaaaa

SEQ ID NO: 6660 - DNA, 1173 bp, Homo sapiens
  SIMILAR (440)..(1171): 931254mologous to Homo sapiens hypothetical protein,accession number AL136646,Smith-Waterman Score=1159.
aagagtttatatccccttctacaagaaaacttaaaatatagctaccaccgcttttgaaaggaatggtttgtgtccaaacagcattttccagacaagctctgtactttttttgccaaaagaattaactttaaactgaaggcagtggacagttaaacaagagtcggcactgggaacagctgtgcgtagaccagaccagtgacttataaggaggcgatcgagatcggatgacagcaaatcatgagagctacctcctcatggcaagcacccagaatgatatggaagactgggtgaagtcaatccgccgagtcatatggggacctttccggaggaggcatttttggacagaaactggaggatactgttcgttatgagaagagatatgggaaccgtctggctccgatgttggtggagcagtgcgtggactttatccgacaaagggggctgaaagaagagggtctctttcgactgccaggccaggctaatcttgttaagggagctccaggatgcctttgactgtggggagaagccatcatttgacagcaacacagatgtacacacggtggcatcacttcttaagctgtacctccgagaacttccagaaccagttattccttatgcgaagtatgaagattttttgtcatgtgccaaactgctcagcaaggaagaggaagcaggtgttaaggaattagcaaagcaggtgaagagtttgccagtggtaaattacaacctcctcaagtatatttgcagattcttggatgaagtacagtcctactcgggagttaacaaaatgagtgtgcagaacttggcaacggtctttggtcctaatatcctgcgccccaaagtggaagatcctttgactatcatggagggcactgtggtggtccagcagttgatgtcagtgatgattagcaaacatgattgcctctttcccaaagatgcagaactacaaagcaagccccaagatggagtgagcaacaacaatgaaattcagaagaaagccaccatggggcagttacagaacaaggagaacaataacaccaaggacagccctagtaggcagtgctcctgggacaagtctgagtcaccccagagaaacagcatgaacaatggatcccccacagctctatcaggcagcaaaaccaacagcccaaagaacagtggtcacaagctata

SEQ ID NO: 6661 - DNA, 883 bp, Homo sapiens
  SIMILAR (401)..(778): 871254mologous to Homo sapiens hypothetical protein,accession number AL136646,Smith-Waterman Score=557.
aggagctacccgctgtgggtctattgtgaactgttctattgctcaacaaagctcctcttcattttgcttgccctccacttgtctgagttcttggtcgcaggacaagaacttggagcctgctgaatggcagagctaaaagagctacaacacagggctgaaacatgccccttagctctccacgttgcaggcaaagaggagaaaagaaccgtggtccctcagggagctcagacttgggagttccccaggccagggctgtgactccctctttggggtcctgtggtacctgacgttttcaagcttctgggcaccactgcgttccccggtgccagccagtgaagctgcttgcagtgcacctggtctagccgcagcctggctgagagccagtgcctgtgccggcacctggagctgcaggtcccgttgcagcagccacaacacagatgtacacacggtggcatcacttcttaagctgtacctccgagaacttccagaaccagttattccttatgcgaagtatgaagattttttgtcatgtgccaaactgctcagcaaggaagaggaagcaggtgttaaggaattagcaaagcaggtgaagagtttgccagtggtaaattacaacctcctcaagtatatttgcagattcttggatgaagtacagtcctactcgggagttaacaaaatgagtgtgcagaacttggcaacggtctttggtcctaatatcctgcgccccaaagtggaagatcctttgactatcatggaggacattttgaaaataaaagaagacaaaatagaaaggaaagggtgtgagaaagaacacagaaatgacttgaacgatttcaaatccttattaagcatcactgaggttgcattttacccattagactga

SEQ ID NO: 6662 - DNA, 2073 bp, Homo sapiens
  SIMILAR (1930)..(1856): 481254mologous to Arabidopsis thaliana F24O1.6,accession number AC003113,Smith-Waterman Score=55.
tcatttgcgttcccaagtctgtgccgagcttcctgtgggcaggaaggggccctcactgccttctcccttgtgggtcttcgagcccatgaagtgggggcttggccagggcatgaggtgtctttcaaggtcgagctggtgtggcccgggcaccttctcatttgtcattccacaattccccttgtgtgtggtccttgtccacgtgctgcagggcagggtcccaggatggtccttgtccacatgctgcagggcagggtcccgggaagcagaccagctctggcactggtgcaagctcatcaccttggaccagctgcctttaaaaatcattgccaaagcgtttgctcctaaggattggaaacgaccatcggcaggggacgggttaaaccgattaaggtgactgacaccgcgcagtgatgcgcagccagtgtaacggccccactcctgtcctcttgactgcaagacggtggctccaccgccaaggtcacgaggtgtaccaggctggagggagagcagtgtacggtacagccgagggaaaggcttttccagaagcccctgaactgacctgcaggtctcactggcagcgctgggcacatggcccctgccgccactccaggtgagctgtggattgaggaaccctagtcctgatctcccatcggtggtaggaagccgggcatctgtatagaccaagagcggcagcagcccagctaaagtgtggcctttggcagaatggttcaagtctggctctgccctctgtgactggacaagaagcttggcttctttgggcatctgactcctcctcagagctgtctctgtgcccacgaaaacatgccgctcctccacacagtgctgagcacaggcaaatctctcagggcttggcgtcttcttgctggggggcgggaggggacaaggtagtgtctgcttcgatggtggggtcggcacctgggcagtgtccaatgtctgctttgatgacggggtcagcatctgggcaatgtccaggacacccttgctggtctggcacgaatgctgattcatgaggccgtgatcctcacagggcctccaggcttctggccttgcccacggcctcctacgagcaataaccacaaccccactggggctcatggacagcgcacggccagaatgggcttggtatttttttccagcgagtgtcttggtttgtgtgaggacagacgatggtgtcacgcccacgcatttctggcctcggccagcctgtctgtctgtcagcagcgtcaccgcaggcggctcctcttgggtcccatgatccaactccagcaggcagatgaggcctggagccaggcgggcggcagcccagctccagctaaatatacgtgtgggaggctcctcccggcctgtgggtccctcctggcccttttctttcccactaaagctggaggttcgggagaacaaaggcagctcccctgaaagagccaaggccaggcgggaggtgccctggagaccggccgagcccgagagccgaggcagggctgcctcagaccagaaagccggccctgccagccatcggccgtcgaagaaggcgtgcagcttacgcagacctcgggtgattttggagcaaagctcccagcacttagcagcagcgctgtcttcctggatgcagccagccctgctggaaacgggtgggaaggctgtcttcttcactcccgggggcctctgaaggtgggcgtgagtcaggggctcctgggagaaatcgaccgcccttgccggcctccacgggccctggaaagcctgagagcctggcgctcctgccacatccccattgccatggcaacggcagacacaatggtttctgtggagttcggatctataaataatttctagattagtcttggcgaggtggatggggtgggcactgaggggaggttcctggtggccggcggaacgggccactgtccacaggccatgccagggccccacttctggaaaggctccccgctcaagctctgcagagcggttctcgcgacacttcccgtgctggatccgtgccgccagcatggattccttcagcctggctccggcctggggtgggctctgagccgccat

SEQ ID NO: 6663 - DNA, 739 bp, Homo sapiens
  SIMILAR (605)..(739): 621254mologous to Homo sapiens unnamed protein product,accession number AK023986,Smith-Waterman Score=141.
aaggtgtctaagcgctcgcggaaggaggaggaagacctggaatcgctcatagcccatttccagacactcgatgccaagaggacggagactgtggaacttccgtgccccccaccctcaccaaggttaaatgcctccctctcggttcatcctgagaaagatgagttaatcctttttggaggtgaatatttcaacggccaaaaaacttttttgtataacgagctctatgtctacaatatcagaaaggacacctggaccaaagttgacatccccagtccacctccgaggcgctgtgctcaccaggcggtggtagtgcctcaaggtggcggacagctgtgggtctttggaggggagtttgcctctcccaacggagagcagttctaccactacaaggatctctgggtcctgcatttggccaccaagacctgggaacaagtcaaatcaacaggcggtccttcgggtcggagtggacatcggatggtggcctggaagagacaattgatcctgtttggtggcttccatgaaagtacacgggattacatctactacaacgacgtgtatgcctttaatctggacaccttcacatggagcaagctgtccccgtcagggacggtgcccacacccagatcaggctgccagatgtccgtcactccccagggcggcatcgtccgtctatgggggctactcgaaacagagagttaagaaagacgtggacaagggcacacggcactcagacatgttc

SEQ ID NO: 6664 - DNA, 1506 bp, Homo sapiens
  SIMILAR (1)..(462): 941254mologous to Homo sapiens putative p150,accession number U93572,Smith-Waterman Score=740.
  misc_feature (1)...(1506): n = a,t,c or g
atgattgtatatctagaaaaccccatcatctcagccccaaatctccttaagctgataagcaacttcagcaaagtctcaggatacaaaatcaatgtacaaaaatcacaagcattcttatacaccaacaacagacaaacagagagcaaaatcatgagtgaactcccattcacaattgtttcaaagagagcaaaatacctaggaatccaacttacaagggatgtgaaggacctcttcaaggagaactacaaaccactgctcaatgaaataaaagaggatacaaacaaatggaagaacattccatgctcatgggtaggaagaatcaatatcgtgaaaatggccatactgcccaaggtaatttacagattcaatgccatccccatcaagctaccaatgacttcctgcacagaattggaaaaaactactttaaagttcatatggaagcaaaaaagagcccgcatcgccaancattcgtgccagaccagcaagggtgtcctggacactgcccagatgctgaccccgtcatcaaagcagacactggacactgcccaggtgccgaccccaccatcgaagcagacactaccttgtcccctcccgccccccagcaagaagacgccaagccctgagagatttgcctgtgctcagcactgtgtggaggagcggcatgttttcgtgggcacagagacagctctggcggtggtagtgcctcaaggtggcggacagctgtgggtctttggaggggagtttgcctctcccaacggagagcagttctaccactacaaggatctctgggtcctgcatttggccaccaagacctgggaacaagtcaagccgggaatgttaaccagtcaaatgaagagtctgctgtgggtggggagggtgcagacagattccctgccctgggcccacctgctggaggaggacatgaccatagccttacagtgggacccggaaggtgctgtgaaggaagaaaagaaaagaaaaggaaaaggaagaaagagagaagaagaagaaaaagaagaacaagaagaagggaagaaaaaagaaccaagaccacaaagaagagaaaagaagaagaagaagaagcgagaaagagagaaaaagagacagagagagaaagagagtgagagaaagattaagcgcacaccctccattccctggacctccaaatccgtactcacaacaggctgtgtctccttatcagacgcacactccacacgaccttccaggaccaagggtgacctgcggaaccacacactggctgccaaggcaaacgtctcaaagcaatgctccgcgaggaccagtcgtctggccgtcttctcccacaaacgctccccggcctttatgctgacactaccactgcaccgccggccccattctgtgacctggcctgagctggtgacggggtccttggggcggccctgtgtgtcttctcctctcctgatgattgaaatgggtcggcgtctgagccgacagccgggctgtgctcctgatgaagcagcatcgtag

SEQ ID NO: 6665 - DNA, 2610 bp, Homo sapiens
  SIMILAR (25)..(1086): 831254mologous to Rattus norvegicus potassium channel protein,accession number M84211,Smith-Waterman Score=1532.
atggtgaggaggcgggactttatcttaaacgtgaagggaagccacctgaagcaacaagacggtgacccaggcctccccgatccccggggcacctccggagaacatcacaacgtggaggtggagacggagcccttcctgacctacgtggagggggtgtgcgtggtctggttcaccttcgagttcctcatgcgcatcaccttctgcccagacaaggtggagtttcttaaaagcagcctcaacatcatcgactgtgtggccatcctgcccttctatctcgaggtgggcctctcgggcctcagctccaaggccgccaaagacgtgctgggcttcctgcgggtggtccgcttcgtccgcatcctgcgcatcttcaagctgacccggcacttcgtggggctgcgcgtgctgggacacacgctccgcgccagcaccaacgagttcctgctgctcatcatcttcctggccctgggggtgctcatcttcgccaccatgatttactacgctgagccgcattggcgccgacccgatgacatcctgggctccaaccacacctacttcaagaacatccccattggcttctggtgggctgtggtcaccatgacgaccctgggctatggagacatgtaccccaagacgtggtcggggatgctggtcggggcgctgtgtgccctggcgggggtgctgaccatcgccatgcctgtgcccgtcattgtcaacaactttggcatgtactattcgctggccatggccaagcagaagctgcccaagaagaagaacaaacacatcccccggcccccgcaaccgggctcgcccaactactgcaagcctgacccacccccgccacccccgccccacccgcaccacggcagcgggggcatcagcccgccgccacccatcaccccaccctccatgggggtgactgtggccggggcctacccagcggggccccacacgcaccccgggctgattagggggggagcggccacgcccccgctacctcgctactgctccgacccaatcccgacggtctttccccccggggaacaaaccatgctttctgggggtgtggtcgtcgccaccaaaaatgcggagcttattgggagaatggtactgcgggggccatgggcgcaggatgagagaaacgttgctactcgctggctgctccgtgaccccaccatgtcctctcctaccacgagttccctggatacccccctgcctgcccttatcacacacgagcagaagctcactgtacctctcccggattccaccctcttccaggaaatggcccccctcagcctaggcgccccttcttcttcacccactgtaaaggaggagggtccggagccgtggcccgggggtccggaccctgatgtcccaggcactgatgaggccagctcagcctgcagcacagactgggtcatcccagatcccgaagaggaaccagagcgcaagcgaaagaagggcccagccccgaagatgctgggccacgagctttgccgtgtctgtggggacaaggcctccggcttccactacaacgtgctcagctgcgaaggctgcaagggcttcttccggcgcagtgtggtccgtggtggggccaggcgctatgcctgccggggtggcggaacctgccagatggacgctttcatgcggcgcaagtgccagcagtgccggctgcgcaagtgcaaggaggcagggatgagggagcagtgcgtcctttctgaagaacagatccggaagaagaagattcggaaacagcagcaggagtcacagtcacagtcgcagtcacctgtggggccgcagggcagcagcagctcagcctctgggcctggggcttcccctggtggatctgaggcaggcagccagtgctccggggaaggcgagggccgttgtggctccccggtttggcaaatgggccccaaggccgggttggggagagtccccggtggggttgccgggggccccaattgggccagcctgggtcctgccttttacgtccctgccacatcgtcgtcttcccacgtagagtcactgaccacagagctgtcagctgagcgcagtttctcagccaaagcagagagcgggcggcagcagctggaacggcagatccaggagctacggggacgcctgggtgaggaggatgctggggcccgtgcccgccacaagacccggaaaaaagcaccttcatacgaactaaaaatcagtgggaccaagtttcccattcagtatggaactgggcgggtagatgaaatcctgagtgaggacaagctgactattggtggaatcaagggtgcatccgtgattttcggggaagctctgtgggaatccagcctggtcttcactgtttcccgccccgatgggatattgggcctcggttttcccattctgtctgtggaaggagttcggcccccgctggatgtactggtggagcaggggttgggctctgggcttgacttcactgatgtgcagagctgggaagtagtgggtggagagtttcggggccacagaaaggacccctggacgttagggggatttaagaagcccaaagcctttcctaaagcccatgcctttgttcccctgctcttttcgagcgtggcatcacgaagcttgctttga

SEQ ID NO: 6666 - DNA, 921 bp, Homo sapiens
  SIMILAR (343)..(786): 561254mologous to Homo sapiens nonmuscle myosin heavy chain- A,accession number M69180,Smith-Waterman Score=438.
atgccttatctcatttcgtccacacgaaatttggctgatgtggatgcggaggcagagcagggacagtctactcgtgtgaggtcacgcagcaagcacctcttcccagtgctgatggaatcttggtgcctctcgccctcagctgcacagaagctctgccgcctcttgggactgggggtgacggatttctcccgagccttgctcacccctcgcatcaaagttggccgagactatgtgcagaaagcccagactaaggaacaggctgacttcgcgctggaggccctggccaaggccacctacgagcgcctcttccgctggctgctcacgtgtcctgcgtccctgcagctgaactccttcgagcagctctgcatcaactacaccaacgagaagctgcagcagctcttcaaccacaccatgttcgtgctggagcaggaggagtaccagcgtgagggcatcccctggaccttcctcgactttggcctcgacctgcagccctgcatcgacctcatcgagcggccgcctgcattccattcgggcggacagatgtccctgaaggcccgagggacaccagccgctatgccaggctccaaagaacccgaggcaaaccaacgctggtcccggtctttgaggactccccggcccagtgagggagaccgacaggtcgactacaaggccaacgagtggctgatgaaaaacatggaccctctgaatgacaacgtcgcagccttgctccaccagagcacagaccggctgacggcagagatctggaaagacgccgacctcctcctcgagccctgctcccactaccggttcctgaccaacgggccgtcatcctctcccggccaggagcgggaactcttccaggagacgctggagtcgctgcgggtcctgggattcagccacgaggaaatcatctgtgagtga

SEQ ID NO: 6667 - DNA, 552 bp, Homo sapiens
  SIMILAR (181)..(396): 751254mologous to Xenopus laevis nonmuscle myosin heavy chain b,accession number L09740,Smith-Waterman Score=291.
atgaaggacaaagcaggtcacagcctgcacagccccgtggtccatggtgaggactttggttttactctgggccacgtattacgcgagtatgttcttgttgcgctggttgtcgccgcttctacacgtcgtccgctcggatctgtgttgcgctgtcgttaccggttcgtgctgcatccatgcgtgcggatggtctcagcagttctccagtttggcaacattgccttgaagagagaacggaacaccgatcaagccaccatgcctgacaacacagctgcacagaagctctgccgcctcttgggactgggggtgacggatttctcccgagccttgctcacccctcgcatcaaagttggccgagactatgtgcagaaagcccagactaaggaacaggtagagtcactgaccacagagctgtcagctgagcgcagtttctcagccaaggcagagagcgggcggccgagctggaacggcagatccaggagctacggggacgcctgggtgaggaggatgctggggcccgtgccgccacaagatgaccattgctgcccttga

SEQ ID NO: 6668 - DNA, 690 bp, Homo sapiens
  SIMILAR (103)..(591): 351254mologous to Rattus norvegicus alpha-1-inhibitor III precursor,accession number J03552,Smith-Waterman Score=255.
atgcagaggggaaatgtggggttggagcccccacaaagagtcctcactggggcactgcctagtggaaccgtgagaagagggccaccgtcctccagaccccagaatggtagaccgaccaatggcttgcaccgggcacctagaaaagccacagacactcaatgccagcttgtgaaagcagcaactggggctttcccctgcagtgctataggggtagagctgccccaggccttgggagcccaccccttccatcaatgtgacatggatgtgagacatgctgaaggaatagaaaaatcatattcacaatccatcttattagacttgactgacaataggctacagagtaccctgaaaactttgagtttctcatttcctcctaatacagtgactggcagtgaaagagttcagatcactgcaattggagatgttcttggtccttccatcaatggcttagcctcattgattcggatgccttatggctgtggtgaacagaacatgataaattttgctccaaatatttacattttggattatctgactaaaaagaaacaactgacagataatttgaaagaaaaagctctttcatttatgaggcaagaacactatgggataattctgatttgcagtgttctctggtttttagaagcaatgggatatgatggaaaggaccaggaatcgggacgggatgcttga

SEQ ID NO: 6669 - DNA, 261 bp, Homo sapiens
  SIMILAR (1)..(75): 1001254mologous to Homo sapiens Human secreted protein, SEQ ID NO: 8096,accession number G04015,Smith-Waterman Score=136.
atgaaccgcagccgccaggtgacgtgcgtggcctgggtccgctgcggcgtggccaaagagacaccagacaaggtcagctccggcatccagcagcatctgaaccatcgcctcgtccccacggacgcaggcatacatcaggggagtcatgccctgtgctgctggtcagcatcaaggaaattgaatgcttctgagcatgtggcgttgcccatcattgacatctggtttgacatggtcatttgcaagcaaaaggcaagcaaatga

SEQ ID NO: 6670 - DNA, 1881 bp, Homo sapiens
  SIMILAR (446)..(1618): 991254mologous to Homo sapiens IEF SSP 9502,accession number L07758,Smith-Waterman Score=2055.
gccctggcagcggccctgtgcagatccctgagcgtgtggcagcagtgcggtcgtggtccctccctatgcagcctgggtttctagcgtgacacggccttgacttgaggaccatgaaccgcagccgccaggtgacgtgcgtggcctgggtccgctgcggcgtggccaaagagacaccagacaaggtagagctgagtaaaggaggagtaaaacgcctcattgctgaggcagaggagaaattgcaagaagaaggtggtggcagtgatgaagagaagacaggcagtcctttagaagaagggattgcaaagtgcacgcacccaggcacgccccaagagagcccctcgagggatggtgacccagaggattgacaggacgcttgatgatgatgagctggctgagtacgacttagataaatatgatgaggaaggtgacccagatgctgagactcttggttgaatctctcttgggtcttacggtctacgggagtaatgatcaagatccttacgttactctgaaagatacagaacaatatgaacgtgaagatttcttgattaagcccagtgataatcttatagtttgtggccgagctgaacaggaccagtgcaatttagaggtgcatgtttataatcaagaagaagactctttttatgtacaccatgatatactcttgtctgcatatcctctgagtgtggaatggctgaattttgatcctagcccagatgattctactggaaattacattgctgtaggaaacatgacccctgttattgaagtgtgggaccttgatatagtggactctttagagccagtcttcacactcggaagtaaactttcaaaaaagaagaaaaagaaaggaaagaagagttcctcagcagaagggcataccgatgctgtccttgacctttcatggaataagctaatcagaaatgttttagcaagtgcatcagctgacaacactgtaattctgtgggatatgtccttggggaaaccagcagctagcctcgctgtacacacagacaaggtccaaacactgcagtttcatccatttgaagcacagactctgatttctggctcatatgataagtcagtggctttgtatgactgccgaagtccagatgaaagccatcgaatgtggcgattcagtgggcagatagagagagtgacttggaatcacttttcaccttgtcatttcttggccagtacagatgacggctttgtatataatttggatgcacgttcagataagccaatttttacacttaatgcacacaatgatgaaatctctggtcttgatcttagcagtcaaatcaagggctgtctcgtgactgcttcagctgacaaatacgtgaagatctgggacatcttaggagataggccaagtctagttcattctagggacatgaaaatgggagttctcttctgttcttcatgttgccctgatttgccatttatttatgcctttggaggtcaaaaagaagggcttcgggtctgggatataagcacagtctcttcagtaaatgaagcatttggaagacgagagaggcttgttcttgggagtgcaagaaattcatctattagtggcccttttggcagcaggagctcagatacacccatggagtcttaatgaagatcatctaatttcctgcttaccttaactgggaattttaaaaagttggcctaaaaatgttccatgcgtggcagcaaccatgcagagtgactgaaacacaattcatttctgactgacattcctttctgcaactgcggtggcaccacaaatatccggtctttgtgcttgctcttcagatggatggtttgtaaggctcttgttgcatttcttaaaaaagagtaataaaaaggatttttaaaaagtaattccttaaacat

SEQ ID NO: 6671 - DNA, 552 bp, Homo sapiens
  SIMILAR (229)..(489): 601254mologous to Homo sapiens unnamed protein product,accession number AK000282,Smith-Waterman Score=251.
atgtcttttgcagcaacttggatggagccagagaccattatcctaagtgaagtaactcaggaatggaaaatcaactatcgatatgggcaggcatacaggcagctgtgtccagagctgatagcaaaattgttctgtagatcagccatcgagatgcatttggcaagcacatcatctctgcaacaggttcagctaccaagcctaggaatccaaccaagttcattcccaagctcaggccagtcagttggcaacttaagagattccagtatgccaaaagagcctgcaggagactttccatttgaggattacagtccacttatatttagaaccatttctgatgggactatcagtggcttcaaaccggagagtgggaagatggatgccaaaaccacagtaggaagggccaagggcaaattgtggctctttggaaagaagccaaaggaggctccagacaatgcccagtgtctggccaaggtgatgagaaggagagaagaaaggagagctgcgaccatttgggcaacccagaccttgaagctccccaagccagggctgtga

SEQ ID NO: 6672 - DNA, 1319 bp, Homo sapiens
  SIMILAR (1)..(480): 981254mologous to Homo sapiens unnamed protein product,accession number AX058596,Smith-Waterman Score=823.
gccaaacagcagttgaatctgcgtacgcatatggccgatgaaaataaaaatgaatatgctgcacaattacaaaactttaatggagaacaacataaacatttttatgtagtgattcctcagatttacaagcaactacaagaaatggacgaacgaaggactattaaactcagtgagtgttacagaggatttgctgactcagaacgcaaagttattcccatcatttcaaaatgtttggaaggaatgattcttgcagcaaaatcagttgatgaaagaagagactctcaaatggtggtagactccttcaaatctggttttgaacctccaggagactttccatttgaagattacagtcaacatatatatagaaccatttctgatgggactatcagtgcatccaaacaggagagtgggaagatggatgccaaaaccacagtaggaaaggccaagggcaaattgtggctctttggaaagaagccaaagccacagtccccacccttaacccctactagtttattcacatccagtactcctaatgggtcccagtttctcacattctccattgagcccgtgcattattgtatgaatgaaataaaaacagggaagcccagaattccttctttcagaagcctcaaaagagggtggtcggtgaagatgggccagcactagaagatttcagtcatctgccaccagaacagagacgtaaaaaactacagcagcgcattgatgaacttaacagagaactacagaaagaatcagaccaaaaagatgcactcaacaaaatgaaagatgtatatgagaagaatccacaaatgggggatccagggagtttgcagcctaaattagcagagaccatgaataacattgaccgcctacgaatggaaatccataagaatgaggcttggctctctgaagtcgaaggcaaaacaggtgggagaggagacagaagacatagcagtgacataaatcatcttgtaacacagggacgagaaagtcctgagggaagttacactgatgatgcaaaccaggaagtccgtgggccaccccagcagcatggtcaccacaatgagtttgatgatgaatttgaggatgatgatcccttgcctgctattggacactgcaaagctatctacccttttgatggacataatgaaggtactctagcaatgaaagaaggtgaagttctctacattatagaggaggacaaaggtgacggatggacaagagctcggagacagaacggtgaagaaggctacgttcccacgtcatacatagatgtaactctagagaaaaacagtaaaggtgcagtaacttatatctaa

SEQ ID NO: 6673 - DNA, 744 bp, Homo sapiens
  SIMILAR (133)..(540): 271254mologous to Discopyge ommata agrin,accession number L01423,Smith-Waterman Score=138.
atggagctggcctgggcttccagctgccttttcagaaagcaagtaggaattatagagatgcctaaagttagagcagaaggtgggaggggcaagaaggtggagggaggccagcggacacaacccgaggacccaggcggcctgcgcatccgcgccaagactgggggtggccgatgcaaatgtgaggccggagtaacacagccagagtgtgagacctatgagaagtgctgccccaacgtatgtgggaccaagagctgcgtggcggcccgctacatggacgtgaaagggaagaagggcccaggctctgagtgtgacatctgggatggccagcccgtgtgtaagtgcaaagaccgctgtgagaaggagcccagctttacctgcgcctcggacggcctcacctactataaccgctgctacatggatgccgaggcctgctccaaaggcatcacactggccgttgttacgctagccatcacttcacctggcccaacaccagccccccaccacctgagaccaccatgcaccccaccacagcctccccagagacccctgagctggacatggcggcccctgcgctgctcaacaaccctgtgcaccagtcggtcaccatggatcacctgggagaagcagttggaggatcgggagaatgtggtcatgcggcccaaccatgtgcgtggcaacgtggtggtcaccaacattgcccagctggtcatctataacgcccagctgcaggatgctgggatctaa

SEQ ID NO: 6674 - DNA, 1291 bp, Homo sapiens
  SIMILAR (572)..(366): 1001254mologous to Homo sapiens putatative 28 kDa protein,accession number AF164799,Smith-Waterman Score=353.
atgccattttatatcagcgacttgagcatctgtggagatcggattctaagggccctatgcccccaggaccttccaacatatagcttgcatagtcgtggaaaaatgcgtgcttcttgttctcgtaaattcctggataataattcatctaggctggtatcctgtaacatgggtgctttgatttccatttgggggaccaccactcccccattgcatgcaacaatattggacagtcaaccaactgtccaccctcctctggccaaagactgcctgccctgtggactgcaagcttcagcatcagacctgagggcaagagccttacagagactgtgtcagcagctcccatgggtagggtcccagccacataccaggagcccgtccccacagaggggtgggaagacgggcctcttcgccggcctggcctcctctgtgtccatgcggcccgcatccccgccctctcctgctgcggacagctgttcagcctgtcgtttcttcgcccgtcggccacccttgcgggtgacctgggtaaagccctcctctgccctggcgctctgcgtttccatttcggattccatccccggaaatcttaaagcgctgccggctgaaacacgtgcgcagctgcaccacgcagaagccagcctcagccaaccacccctgcagctccgcccctttcctaaaacgtcacaggccggggacctgcaggatttggggccgtatgtatgtgtgcgaaaggcagtgggtaaaggcgataaacaaattcgtgctgttgtgaaggaacattctgtgcgatcgcaggagcgcatctggcattatccggggataactacagccaacatgccagggcatctggggcagaatacggaaagcgggagggacaaattgccaatgtttggagtctggtttccaggttgccgtttttgggggctctgggtgtggcggttgccgtagctgaaattggctgcaccatgtcggccttcgagaagcctcagatcatcgcccatatccagaagggcttcaactacacggtgtttgactgtaagtgggtgccctgcagcgccaaatttgtgaccatgggcaacttcgcacggggcaccggcgtcattcagctgtacgagatccagcacggggacctgaagctgcttcgggaggtgggtgccgggtcgaggatccggactgccgttgggggcgagtgcggatcctggggtctgcattcctctttgccagagccttcgcccagcgtcccccaaagcatggcttgagccgcgcgagaccagagaagctgaccgccgactga

SEQ ID NO: 6675 - DNA, 576 bp, Homo sapiens
  SIMILAR (51)..(110): 501254mologous to Leishmania major probable CG14353 protein,accession number AL358712,Smith-Waterman Score=57.
ctctgggtgtggcggttgccgtagctgaaattggttgcaccatgtcggccttcgagaagcctcagatcatcgcccatatccagaagggcttcaactacacggtgtttgactattgaaaaggccaaacctattaaatgtggaacatttggtgcaacatctttacagcagagatatttagctactggagattttggtggaaaccttcatatatggaatttagaagctccagagatgccagtatattctgtaaagggccataaagaaattataaatgccatagatggcataggtggactaggaattggagaaggagcacctgaaattgtgactggcagccgagatggaactgtgaaggtgtgggacccaaggcaaaaagatgatcctgttgctaatatggaacctgtacaaggagaaaacaagagagactgttggactgtggcatttgccatacctgtgattcttcgttccacactaaccagccaggctcagacctctcaatgcttctccaccaatgctgggtcccggagtacgctgttgtggttcaaagttcttaaactcagtattcacagtgtctaa

SEQ ID NO: 6676 - DNA, 486 bp, Homo sapiens; identical to SEQ ID NO: 5197
  SIMILAR (220)..(483): 821254mologous to Mus musculus Pro-Pol-dUTPase polyprotein,accession number Y12713,Smith-Waterman Score=382.

SEQ ID NO: 6677 - DNA, 999 bp, Homo sapiens
  SIMILAR (568)..(828): 751254mologous to Mus musculus Pro-Pol-dUTPase polyprotein,accession number Y12713,Smith-Waterman Score=371.
atggtgggaaaggccaaatggaagccaatagagctacctttacttagaaaaatagtaaatcaaaaacagtatcacatccctggaggggttgcaaagattagtgccaccatcaaggacttgaaggacgtgggggtggtaattcccaccacatccccgttcaactctcccatctggcctgtgcagaagacagatggatcctggagaaagtggattatcctagcaaggccagcaatttaccttactgtcctacctcacgggtatatcaactctctggctttgtgtcataatcttattcgaagagaccttgatcacttttcccttccacaagatatcacactggtccattacattgatgacattgtgctgactggatccagtgagcaagaagtagcaaatacactggacttattgacatctcttgactgggctttggtggaaactgaatgtttgactatgggtcatcaagtcaccatgcaacctgaactgactatcatgaactgggcgctttctgacccatctaactataaagtgggttgtgcacagcagcattccattatcaaatggaagtggtatatacgtgatcaggctcgagcaggcaccacctgcaagtggacagctgcagcactacagcccctttctaggacatccctgaaggacagcggtgaaaggaaatcttcccagtgggcagaacttcgagcagtgcacctgatcatgcactttgcatggaaggagaaatggccggatgtacaattatacactgattcatgggctgtagccaatggatcggctggatggtcagggacttggaagaatcatgattggaaaattgccaccactgtcatcgcccaatgggcccatgaacaaagcagccatggtagcaggaatggaggttacacatgggctcagcaacatggacttccactcaccaaggctgacgtggctacggccactgatgaatgcccaatttgccagcagcagagaccaacactgagcccttga

SEQ ID NO: 6678 - DNA, 1383 bp, Homo sapiens
  SIMILAR (5)..(127): 571254mologous to Mus musculus Pro-Pol-dUTPase polyprotein,accession number Y12713,Smith-Waterman Score=114.
atgcctagcgggtctatttggattttggagtccatgcattcctcatttgggtgtgttacttcagtccatttatctagtgacccaaaaggctgccattctgagtggggtccagaacaggagaaggctctgcaagaggtccaggctgctgtgcaagctgctctgatacttgagccatatgacccagcaggtccagtggtgcttgaggtgtcactggcagatagggatgctgtttggagcctttggcaggcccccataggtgaatcacagcaaaggcctctaggattttggagcaaggccctgccatcttctgcagccataaagcgtgtcatgcacagcagcattccatcatcaaatggaagtggtatatacatgatcgggctcgagcaggtccggaaggcacaaatagttctgcacgatatgcagccaccatgtgaaaatgggacagcttcagcactacagcctctttctaggaaatccttgaaggacagcagtgaagggaaatcttcccagtgggcagaacttcgagccgtgcacctggctgtgcacgttgcatggaaggagaaatggccagatgtgcgattagatactgattcatgggccgtagccaatggtttggccagatggtcagggacttggaaggagcatgataggaaaattggtgacaaagaagtctggggaagaggtacgcggatagaactctctgagtggtcaaaaactgtgacgatatttgtatcccattgcttctaccaagactaccatccatccgtgggctcacagaatgccttatacaccaacatggtattccacacagcattgcctctgaccaaggcactcactttacggctaaagaattgcaacagtgggctcatgctcacggaattcactggtcttaccatgttccccatcatccagggttggggcaaagttctccagaaggccgtgtatgctctgaatcagcgtccaatatatgaatggaaggaagaatcatgcttgcacacaggtgtggctgatgcgctcagaggcaactgggcagaaggccacagggagcacaaggccttgtggctgggcctctggagcacctggtctcagcacccgctcaggtccttgaagacgaccagacaccatccagggcttggtgtactctctgaagatatatgcgaggcagggggagctacagaagagctgtccagggcctctggttttgccacagggtatgggaagagaaaagaagacactaagaagcataagcagcactctgtgtcagatataatagaacagcaacactcattgggattaacagaaaaaacagtaaaaggaacacctacacaaggcatctctatgagacctggactttatcacaaggcaactgagtttcaagagtga

SEQ ID NO: 6679 - DNA, 2232 bp, Homo sapiens
  SIMILAR (601)..(1059): 791254mologous to Mus musculus Pro-Pol-dUTPase polyprotein,accession number Y12713,Smith-Waterman Score=639.
atgaaactcctgaagatcaaggacaaggaaaggatcctacaaccagcaacagaaaataaacaaataacatacaataaagctccaatacatctggcagcagactcttcagtggaaaccttacaggcaaggctgagagctattgtggtgggaaaggaccaatggaagccattacagctgcctctagctagaaaaacagtaaatcaaaaacaatattgcatccctggagagactgcagagattaatgccaaaatcaaggacttgaaagatgcaggggtggtgattcccaccacatccccatttaactctcctatttggcctgtgcaggagacagatggatcttggagaatgacagtggattactgtaagcttaaccaagtggtgactccaattgcagctgctgtaccagatgtggtttcattgcctgaacgaagtaacacagctcctggtacctgctgggaagtccggcaatataccttcactgtcgtacctcaggggcatatcaactctctggttttgtgccatgatgttgttcgcagagatcttggtcactttttccttccacaagatatcaccctggtccattacattgatgacattatgctgattggatctacccctcctataaccaagaagaaggcacaacacctagtgggcctatttggattttggaggcaacttgttcctcatttgggtgtgttactctggcccatttatcaagtgacccaacaggctgccagttttgagtggggtccagaaaaggagaaggctctgcaacaggtccaggctgctgtgcaagctgctttgccacttgggccatatgacccagcagatccaatggtgcttgaggtgtcagtggcagatagggatgctgtttggagcctttggcaggaccccataggtgaatcacagtggaggtctttaggattttggagcaaggccctgccatcttctgcagataactactctccttttgagagacagctcttggcctgttactggggtttggtagaaactaaatgtttgactatgggtcatcaacctgcactgatggcctcgtggggagttccttatgataagttgacagaggaagagaagacaagggcctggtttacagatggctctgcatgtttcagaaaaagccctcaggcccagagatgcagacactggcagctggagggtacagtccccctctggctgctgtcatgggttggcattgagtgccttttccaggcacacagtgcaagcttttccaggcacacagtgcaagctttcagtggatctaccactctggagtctggaggacagtggcccttttctcaaagctccactaggcagtgccccagtggggactctgaatcaacccaaatgcccatcaatagactggataaagaaaatgtggtacatatatgccatggaatactatgcagccataaaaaggaacaagatgtcctttgcaggaagaagcatgacttggggcaagggggctctcttcttgtgaagcaggacatgaaagggctgccagccaaaggctggtatgacagtgctcccaggagctggggcaatgagtgcttctttgaaggggaatctgaacgacacatcttaggttcaccccaagaagtcagtgagaatagtcagagatggctggggacagtcccatccagggcatcacagtgggaagctccagacattcaaaaggctgcacttccattgattatttctttgaaggagattcataagactagagtgatggctttttctcgtttcccttgtgcttatattgatatccagagaataaaatacctagcaatccaacttacaagggatgtgaaggacctcttcaaggagaactacaaaccactgctcaaggaaataaaagaggatgcaaacaaatggaagaacattccatgctcatgggtaggaagaatcaatatcgtgaaaatggccatactgcccaaggtaatttacagattcaatgccatccccatcaagctaccaatgcctttcttcacagaattggaaaaaactactttaaagttcatacggaaccaaaaaagagcccgcatcgccaagtcaatccgaagccaaaagaacaaagctggaggcatcacactacctgacttcaaactatactacaaggctacagtaaccaaaacagcatggtactggtaccaaaacagagatatagatcaatggaacagaacagagccctcagaaataatgccgcatatctag

SEQ ID NO: 6680 - DNA, 789 bp, Homo sapiens
  SIMILAR (226)..(789): 841254mologous to Mus musculus Pro-Pol-dUTPase polyprotein,accession number Y12713,Smith-Waterman Score=834.
agagacctccagccttttaccagtgtgactgtgcattgcagaaagggaaatgaccagacatttgggggaccactggacgctggctctgagctgacattgattccaggggacccaaaacatcattgtggtcccccagttaaagtaggagcttatggaggccaagtaattaatggagttttagctcagccctcttatttggcttgtgcagaagacagatggatcttgagaatgacagtggactattgtaagcttaaccaagtggtgattccaattgcagctgctgtatcagatgtggtttcattgcttgagcaaattaacacatctcctggtacctggtatgcagccattgacttggcaaatgcctttttctccattcctgtccataaggcccagcagaagcaatttgccttcagctggcaaggccagcaatatacctttactgtcctacctcagtggtatatcaactctccagctttgtgtcataatcttattcggagagaccttgattgcttttcgcttccactagatatcacactggtccattacattgatgacattatgctgattggatccagtgagcaagaagtagcaaacacactggacttattcgtgagacatttgcgtgccagaggatgggaaataaatccaactaaaattcagggaccttctacctcagtaaaatttctagggttccagtggtgtggggcctgtcaagctattccttctaagatgagggataagttgctgcatttagtccctcctacaaccaagaaagaggcacaatgtcta

SEQ ID NO: 6681 - DNA, 553 bp, Homo sapiens
  SIMILAR (1)..(399): 771254mologous to Mus musculus Pro-Pol-dUTPase polyprotein,accession number Y12713,Smith-Waterman Score=515.
atgacagtggactattgtaagcttaaccaagtggtgattccaattgcagctgctgtatcagatgtggtttcattgcttgagcaaattaacacatctcctggtacctggtatgcagccattgacttggcaaatgcctttttctccattcctgtccataaggcccagcagaagcaatttgccttcagctggcaaggccagcaatatacctttactgtcctacctcagtggtatatcaactctccagctttgtgtcataatcttattcggagagaccttgattgcttttcgcttccactagatatcacactggtccattacattgatgacattatgctgattggatccaagacagctcttggcctgttactggctttggtggaaactgaacatttgactataagtcatcaagtcaccatgcgacctgaactgcctatcatgaactgggtgctttttgacccatctagccataaagtgggttgtgcacagcagcattccatcatcaaatggaagtggtatgtacatgattgggctcgagcaggtcctgaaggcacaa

SEQ ID NO: 6682 - DNA, 266 bp, Homo sapiens; identical to SEQ ID NO: 3627
  SIMILAR (3)..(137): 861254mologous to Mus musculus Pro-Pol-dUTPase polyprotein,accession number Y12713,Smith-Waterman Score=211.

SEQ ID NO: 6683 - DNA, 582 bp, Homo sapiens
  SIMILAR (180)..(575): 711254mologous to Mus musculus Pro-Pol-dUTPase polyprotein,accession number Y12713,Smith-Waterman Score=471.
ccaaccctgtcatctcccaatgggcccatgaacaaagtggccatggtggcagggatggagattatgcatgggctcagcaacatggacttccactcaccaaggctgacatggctatggccacagctgagtgcctagtttgccagcagcagagaccaacactgagacctcaatatggcaacggctggggcaaagttctccagaaggccatgtatgctctgaatcagcatccgatatatggtactgtttttcccatacccaggattgatgggtccaggaatcaaggggtggaagtgaaagtggcaccactcaccatcacccttagtgatccactagcaaaatttttgcttcctgttctctcagcattacattctgctggcctagaggtcttagttccagagggaggaatgttgccatcaggagacacagcaatgattccattaaactggaagttaagcttgccacctggatactttgggctcctcctacctttaagtcaacagactaagaagggagttacagatttgggtggggtgattgacctggactatcaagatgaaatcagtctactattccatatcagag

SEQ ID NO: 6684 - DNA, 404 bp, Homo sapiens
  SIMILAR (3)..(233): 791254mologous to Mus musculus Pro-Pol-dUTPase polyprotein,accession number Y12713,Smith-Waterman Score=351.
gcaccacctgcaagtggacagctgcagcactacagcccctttctaggacatccctgaaggacagcggtgaaaggaaatcttcccagtgggcagaacttcgagcagtgcacctgatcatgcactttgcatggaaggagaaatggccggatgtacaattatacactgattcatgggctgtagccaatggatcggctggatggtcagggacttggaagaatcatgattggaaaattgccaccactgtcatcgcccaatgggcccatgaacaaagcagccatggtagcaggaatggaggttacacatgggctcagcaacatggacttccactcaccaaggctgacgtggctacggccactgatgaatgcccaatttgccagcagcagagaccaacactgagcccttga

SEQ ID NO: 6685 - DNA, 2715 bp, Homo sapiens
  SIMILAR (1249)..(2712): 961254mologous to Mus musculus E-cadherin binding protein E7,accession number AF167441,Smith-Waterman Score=2740.
atggagaactataccagttcacctttcaatgtgcaaaaaaatgatatacaaaaaattttagttgggaaatataaaagaacaatacagctgaagaggattctgaagtatgtaaagacagatgagaagcaccaggaaagcttcaaatcattttcagtggagcatcagatcactctcattcaggattgtaaagatacccttgaattaatagaaacagagctgacggaagaagaacttgatgtccaggatgaggtcttgaaaaaatgttgcaaagaaaacattcaaccccctatagtgaaatcaggcagtaaggatgacaggcagagatttctgtggaggaaatacattgctagagtgaaaatcacagtacctgcatcttggcccaccagcttacttgcaccaatggcctcatggggaattccctatgatcagttgacagaggaagagaagactagggcctggttcacagatgtttctgcatggtatgcaggaaccacccaaaagtggacagctgcagcactacagcccctttctaagacatccccgaaggacagtgccacccctgccatcgcccaatgggcccatgaacaaagtggccatggtggcagggatggaggttatgcatggactcagcaacatggacttccactcaccaaggctaacctagctgcggccactgctgagtgcccaatttgccagcagcagagaccaacactgagccctcaatatggcaccattcctcggggtgatcagccagttacctggcctttcctttttaacctctccttccggccaagccttcgcgctctcttcccctccctcggtttctatccgctcccgttagctccactccgcacattcctgcaaggtgtccccgttaagaggaggcagctgcgccgcactggctctccaccctccatccggccctggcgcccagtcgtcaggggcctgcggtttcctggcctaccgtctggtgtggtacctacctcctccgtgccggcaacaaccgctcctactctggttctgctgagctccgagcccggaccagtgggcgatgtaggccttcgggaagggagagccccggctctgttttatttagcccagctgctctggcctacgttatggagactggcgggtagattgcggtctccgagtcgcggaatcctctttacgctgggagtggacgggcgagaatgggttggagacttcctgctgtctcagtcagctttgggcgggattagctgttataagagtaacaatgagttacaaggcactaatagttctggatccttgggtggtcttgatgttcgcagacgaattcctataaagctcatctccaaacaagcaaacaaagcgaaacctgcaccgcgaactcaaagaactataaacaggatgcctgcaaaggctccacctggtgatgaagaaggatttgattataatgaagaagaacggtatgactgtaaagggggtgagctgtttgcaaatcagcgaagatttcctggacaccttttttgggactttcagataaacatcttaggtgaaaaggatgatacaccagttcatttctgtgacaagtgtggattgcctattaaaatctatgggagaatgattccatgcaagcatgttttttgctatgactgtgctattttacatgaaaaaaagggagataagatgtgtccaggctgtagtgatcctgtgcagcgaattgagcagtgtacacgaggttctctcttcatgtgtagcattgttcaagggtgcaagagaacatatttgtctcagagagacttacaggctcatatcaaccatcgccatatgagagctggaaaacctgttacccgtgcttcacttgaaaatgttcatcctcctattgccccaccaccaactgaaatccctgagcgttttataatgccaccagacaagcaccatatgagccatattccgccaaagcagcacatcatgatgccaccacctcctttgcaacatgtgccacatgagcactataatcagccacatgaggatattcgtgctcctccagcagaattgtccatggctccacctccacctcgatcggtcagtcaggaaacctttcgtatttcaacaagaaaacacagcaatttaataaccgtccctattcaggatgactcaaattcaggtgctagagaaccaccacctcctgccccagcacctgctcaccatcatcctgaatatcagggtcaaccagtggtatcgcaccctcatcatattatgcctccacagcaacattatgcaccacccccacctcctccaccaccaataagccatccaatgccacatcctccccaggctgcaggtactcctcacttggtatatagccaagctccacctccaccaatgacctctgctccaccaccaataacccctccccctggacatattattgcccagatgccaccttatatgaatcatcctcctccaggacctcccccacctcaacatggtggtccacctgtaactgcaccccctcctcaccattataatcctaactcattaccccagttcactgaagatcaaggaactctgagccctccatttacacaaccagggggaatgagtcctggtatatggcctgcaccaagagggccaccaccacctccacgattgcagggtccgccttctcaaaccccacttcctggaccacatcatccagatcagacaagatatagaccgtattaccaatga

SEQ ID NO: 6686 - DNA, 1506 bp, Homo sapiens; identical to SEQ ID NO: 6114
  SIMILAR (1125)..(1244): 701254mologous to Mus musculus Pro-Pol-dUTPase polyprotein,accession number Y12713,Smith-Waterman Score=147.

SEQ ID NO: 6687 - DNA, 636 bp, Homo sapiens
  SIMILAR (184)..(291): 751254mologous to Homo sapiens reverse transcriptase,accession number AJ233632,Smith-Waterman Score=144.
atgaccgtggattatcgtaagtttaaccaagtggtgactccaatggcagctctgtaccagatgcggtttcattgcttgagcaaattaacacatttcctggtacctggtatgcagccattgacttggcaaatgcctttttctccattcctgtccatgaggcccaccagaagcaatttgccttcactacctcaggggtatatcaactttccagctttgtgtcataatcttattcggagagaacttgatttctttttgcttctacaagatatcacactggtccattacattgatgacattctgctgattggatccagtgagcaagaagtagtaaacacactggacttattgattcataagagaagtaaggaagcagagcacactgctgcttccaggattagagtgtcatgcttaccagagcagaaaagtcatgaacagacactgccgtgggaacaagtgcccagctctggagatataaaggagtatttcccaaatgcttttgtcctccttaccacagcttccctgcagggacaagataatacttctcagcttcagctcacatggaaagcacctgaagatataaaaatgagtaagacagatgcagatgcagatgaagaaattgaggctctgagaggttaa

SEQ ID NO: 6688 - DNA, 1103 bp, Homo sapiens
  SIMILAR (314)..(907): 821254mologous to Mus musculus Pro-Pol-dUTPase polyprotein,accession number Y12713,Smith-Waterman Score=879.
agacctctggccttttaccagggtaactcttcacaggggaaagagaaatgatcagacatttcagggactactggacactggctctgagctgatgttgattccagaggacacaaaacatcactgtggtcctccagttaaagtagaggcttatggaggtcaggtaattaatggagttttagctcagatccaacttacagtgggtccagtgggttcagggactcatcctgtggtcatttacccagtgccagaatgcataattggcataggcatacttagcagctggcagaatccccacattggctccctgactagtaggaagacagatggttcttggagaatgacagtgcattatcataagcttaaccaaatggtgactccaattgcagctgctataccagatgtggtttcattgcttgagcaagttaacacatctcctggtagctggtatgcagccattgacttggcaaatgcctttttcttcattcctgtccataaggcccaccagaagcaattcgccttcagctggcaaggccagcaatatacctttactgtcctacctcagtggtatatcaactctccagctttgtgtcataatcttattcggagagaccttgattgcttttcgcttccactagatatcacactggtccattacattgatgacattatgctgattggatccagtgagcaagaagtagcaaacacactggacttattcgtgagacatttgcgtgccagaggatgggaaataaatccaactaaaattcagggaccttctacctcagtaaaatttctagggttccagtggtgtggggcctgtcaagctattccttctaagatgagggataagttgctgcatttagtccctcctacaaccaagaaagaggcacaatgtctaacagctcttggcctgttactggctttggtggaaactgaacatttgactataagtcatcaagtcaccatgcgacctgaactgcctatcatgaactgggtgctttttgacccatctagccataaagtgggttgtgcacagcagcattccatcatcaaatggaagtggtatgtacatgattgggctcgagcaggtcctgaaggcacaa

SEQ ID NO: 6689 - DNA, 2061 bp, Homo sapiens
  SIMILAR (1078)..(1848): 751254mologous to Mus musculus Pro-Pol-dUTPase polyprotein,accession number Y12713,Smith-Waterman Score=1064.
atggatgaagctggaagccgtcatcttcagcaaacaaacacaggaacagaaaaccaaacaccgcatgttctcactcttaagtgggagttgaaccatgagaacacatggacacagggagggaaacaacaaacactggggtctgttgggggagaaagaactgagattgtggaaatacagacacaagctcttatcatgcaagtggctgacctgcaacaaaagatgtatacactaaagtccctgcaagcccttagaggtgaggttgagagtgtgacccatgaggaggtgcacacactaaaaaaaaactgttttgagttctctaatttatatgaacagccaatctggagaacaggtgctgtaccagatgtggtttcattgcttgagcaaattaacacatctcctgctacctggtatgcagccattgacttgggaaatgcctttttctcgattcctgtccataatacccaccagaagcaatttgccttcagctggcaaggccagcaatatatctttactatcctacttcaggtgtatatcaactctccagctttgtgtcataatcttattgggagagattttgattgctttttgcttctgcaagctatcacactggtacattacattgatgacattatgctgaatggatccaacacactggactcatgggtgagaaatttgcatgccagaggatggaaaataaatccaacaaaaattcagggagcttctacctcagtaaaatttctagggatccagtggccatatgacccagcagatccaatggtgcttgaggtgttaatggcagatagggatgctgtttggatcctttggcaggcacccataggtgaatcacagcagaggcctctaggattttggagtaaggccctgccatcttctgcagataactactctccttttgagagactgctcttggcctgttactgtgctttcgtggaaactgaacgtttgactatgggtcatcaagtcatcgtgcgacgcgaactgcctatcatgaactgtatgctttctgactcatcaggccacaaagtgggtcacgcacagcagcatcatgaaattgaagtgatatttgtataccatgtgagtgctcaccaatgggtgacttcagcagatgaggagtttaataatcaagtggataagatgacccgttctgaggataccactcagcctctttcctcagccacccctgtcatcacccaatgggcccacgaacaaagtggccatggtggcagggatggaggttacacatgggctcagcaacatggacttccactcaccaaggctgacctgactatggccactgttgagtgcccaatttgccagcagcagagaccaacactgagccctcaatatggcaccattccttggggtgatcagccatccacctggtggcaggttagttatattggaccttttccatcatggaaagggcagaggtttgtcctgactggaataggcacttattccggatatgggtctgcctatcctgcacgcaatgcttctgccaagactaccacctgtggactcaaggaatgcctaatccaccatcatggtattccacacagcattgcttctgaccgaggcactcattttatggctaaagaggtgtggcagtgggctcatgctcgtggagttcactggtcttatcgtgtttcccatcatcctgaagcagatggattgatagaatggtggaatggccttttgaagtcacaattacaacaccaactaggtgacaatactttgcaggactggggcaaagttctccagaaagccacatatgctctgaatcagcatctgatatatgaacattggactccaagttcttcagttttgggacacggactggctctccttccttctcagcttgcagacaacctattgtgggaccttgtggtcatggcctatacgttaaaactacagaatgctgatgaaataaacataaggcgtagatgtctgactagacagccaggaagtactgctcccaccgagagaccaaaatatggagtaaaccaacatgcttcaaacacatcttcagagagaaaacactga

SEQ ID NO: 6690 - DNA, 1173 bp, Homo sapiens
  SIMILAR (149)..(760): 641254mologous to Mus musculus Pro-Pol-dUTPase polyprotein,accession number Y12713,Smith-Waterman Score=643.
ctgggaagtccggcaatataccttcactgtcgtacctcaggggcatatcaactctctggttttgtgccatgatgttgttcgcagagatcttggtcactttttccttccacaagatatcaccctggtccattacattgatgacattatgctgattggatctacccctcctataaccaagaagaaggcacaacacctagtgggcctatttggattttggaggcaacttgttcctcatttgggtgtgttactctggcccatttatcaagtgacccaacaggctgccagttttgagtggggtccagaaaaggagaaggctctgcaacaggtccaggctgctgtgcaagctgctttgccacttgggccatatgacccagcagatccaatggtgcttgaggtgtcagtggcagatagggatgctgtttggagcctttggcaggaccccataggtgaatcacagtggaggtctttaggattttggagcaaggccctgccatcttctgcagataactactctccttttgagagacagctcttggcctgttactgggttttggtggaaactgaacgtttgacaatgggtgaccccagcagaggaggattttaataatcaagtagataggatgacccattctgtggataccactcagcctctttccccagccacccatgtcatcacccaatgggcccatgaacaaagtggccatggtggcagggatggaggttacacacgggttcagcaacatggacttccactcaccaaggctgacctggctacagcgggcaaagttttccagaaggctgtgtaagctctgaattagcattcaatatatggtactctttctctcatagccaggattcacaggtccaggaatcaaggagtggaagtggaagtggcaccactcaccatcagccccagtgatccaccagcaaaatttttgcttcctgttcccccgacattacgttctgctggcctagagttcttagttccagaggaaggaatgctgccatcaggagacacaacagttccattaaactggaagttaagattgccacctggacactttgggctcctcttccctttacatcaacaggctaataagggagttacagtgttggttggggtgactgacttggactatcaagatgaaatcagtctactaccccacaatggag

SEQ ID NO: 6691 - DNA, 2490 bp, Homo sapiens
  SIMILAR (973)..(1923): 691254mologous to Mus musculus Pro-Pol-dUTPase polyprotein,accession number Y12713,Smith-Waterman Score=1097.
atggccgaatcggaacagctccagtctacagctcccagcaagatcaatgcagaaggcaggcaaacagagtctagagtggacctccagcaaactccagcagacctgcagcagaggggcctgaatgttagaaggaaaactaacgaacaaaaaggaatagcatcaacatcaacaaaaaggatgtccactcaaaaaccctatcagaaggatcacaactcgtcggcagcaagggaacaaaactggatggagaatgagtttgatgaattcacagaagtaggcttcagaagttgggtagtaacaaactctttcaagctaaaggatcatgttctaacccaatgcaaagaagctaagaaccttaaaaaaagaattggaaaaaactactttaaagttcatatggaaccaaaaaagagcccatgtagccaagacaatcctaggcaaaaagaacaaacctggaggcatcacagtacctgacttcaaactatactacaaggctacagtgaccaaaacagcacgagacatggatgaagctggaaaccatcattctcagcaaactaacacaggaacagaaaaccaaacaccacatgttctcactcactcattttccggggaggctgtgtaataagatagcccggtgcatccttttaacctctttcaacactaaacggccaaatgaaaacatgactcacaggaaagaagaaaggggttatgggaataatagagtaatttgggaaatcatgaccataggggaaaagaaacgggtgattcacagtacaaggaggcaatatgccatggttaagagcactaactttgaaattggaatgatagaaagagctgaaattgtggaaaaacagacacaagctcttatcatatccaacagtgggagctgcagtcactcaactacaaaatttaactgcaatgggagtaattggatcccatggtgccaggggccaagtagtggcactcaaccgtcaaaggcaaggagacctccaaccttttaccagggtaactgtgcactggggaaaagggaaatgcagatatttgggggactactggacactggctctgagctgacattgattccaggggacccaaaacatcattgtggtcctccagttaaagtaggggcttttggggggtcaggtaattaatggagctttagctcgggtccaacttatagtgggtccagtgggtccctgggcgcatcctgtggtcatttccccagtgccagaatgcataattgacatagacatacttagcagctggcagaacccccacattagctccctgactggtagggtgagagctattatggtgggaaaggccaaatggaagtcattagagctgcctctacctagaaaaatagtaaatcaaaaacaatatcacatccctggagggattgtggagattagtgccaccatcaaggacttgaaagatgcaggggaggtgattccgattcccaccacattcccattaaactctcccatttggcctgtgcggaagacagatggatgttggagaatgacagtggattattgtgagcttaaccaagtggtgactccaactgcagctacagtaccagatgtggtttcattgcttgagcaaattaacacatctcctggtacctggtatgcagacattgacttggcaaatgccgttttctccattcctgtccataaggcccaccagaagcaatttgccttcagctggcaaggccagcaatatacctttactgtcctacctcaggagtatatcaactctctaggtttgtgtcataatcttattcagagagaccttgaccacttttcgcttctgcaagatatcacactggttcattacattgaagacattatgctgattggatccactgagcaagaaatagcaaacacactggacttattgtttatggctaaagaagtgtggcagtgggctcatgctcatggaattcactggtcttaccatgtttcccatcatcctgaagcagctggattgatagaatggtggaaaggccttttgaagttacaattacaatgccaactgggtgacaatactttggagggctggggcaaagttctccagaaaaccgtgtatgctctgaatcaacatccaatatatggtactgtttctcccatagccaggatccacaggtccaggaataaaggggtggaagtggcaccattcaccatcacccccagtgatccactaccacaatttttgcttcctgttcctgctacattatgttctgctggcctggaggtcttagctccagagggaggaacgttgccaccaggagacagaacaacgattccattaaactggaagttaagattgccacctgaagactttgggctcctcccatctttaagtcaacaggctaagaagggagttacagtgttggctggcgtgattcacccagactatcaagatgaaatcagtctactactccacaacggatgtaaggaagatcttctgaatggaatacagcagatccattag

SEQ ID NO: 6692 - DNA, 375 bp, Homo sapiens
  SIMILAR (21)..(263): 971254mologous to Homo sapiens cytokeratin 17,accession number Z19574,Smith-Waterman Score=407.
tcccaaaggctggtactgaaatgagcacctccatccgccagttcacctcctccagctccatcaagggctcctccggcctggggggcggctcgtcccgcacctcctgccggctgtctggcggcctgggtgccggctcctgcaggctgggatctgctggcggcctgggcagcaccctcgggggtagcagctactccagctgctacagctttggctctggtggtggctatggcaacagctttgggggtgttgatgggctgctggctatgcagccgccccatctgccccacagtctccggcctctccagcctcagccccctgcttcagtcccttccccatgcttccttgcctgatgacaataaagcttgttgactcagc

SEQ ID NO: 6693 - DNA, 3342 bp, Homo sapiens
  SIMILAR (1)..(1236): 881254mologous to Homo sapiens cytokeratin 17,accession number Z19574,Smith-Waterman Score=1756.
atgaccacctccatccgccagttcacctcctccagctccatcaagggctcctctggcctggggggcggctcgtcccgcacctcctgccagctgtctggcggcctgggtgccggctcctgcaggccgggatctgctggtggcctgggcagcgccctcgggggtagcagctactccagctgctacagctttggctctggcggtggctatggcagcagcagctttgagggcgttgatgggctgctggtcggaggtgagaaggccaccatgcagaacctcaatgaccgcctggcctcctacctggacaaggtgcgtgccctggaggaggccgacactgagctggaggtaaagatccgtgactggtaccagaggcaggccccggggcccgcccgtgactacagccagtactacaggataatcgaggagctgcagaacaagccacccccatccgatgacctgactactctcccatctccgctgatcctcacagccaccgtggacaatgccaacatcctgctacagaatgacaatgcccatctggctgctgctgacttccgcaccaagtttgagacagagcaggccctgtgcctgagtgtggaggccgacatcaatggcccgtgcagggtgctggatgagctgaccctggccagagccgacccggagatgcacattgagaacctcaaggaggagctggcctacctgaagaagaaccacgaggagatgaacgccccgcgaggccaggtgggcggtgagatcaatgtggagatgggcgctgccccaggtgtggacctgagccgcatcctgaacgagatgcgtgagcagtatgagaagatggcagagaagaaccgcaaggatgccgaggattggttcttcagcaagacagaggagctgaaccgcgaggtggctaccaacagtgagctggtccagagcggcaagagcgagatttcggagctccggtgcaccatgcaggccttggagatcgagctgcagtcccagctcagcatgaaagcatccctggagggcaacctggcggagacagagaaccgttactgcatgcagctgtcccagatccagggactgatcggcagtgtggaggagcggctggcccagcttctctgcgagatggagcagcagaaccaggagtacaagatcctcctggacatgaagatgcggctggagctggagatcaccacctaccaccgcctgctggagggcgaggatgcccaaaccgtacaacacacaccaggctctccatgcgtgcctgagtgggcccatgaccggtgctctctcccagctcagctggatgaatggagctgccaggcccagcgtgggatctgtggacacaggagagagaactgctgggaacggatccccagccagtcctgtttctacaggccaactgctcgctcgctcacctccctccttggcacgatgagcacctgcagccaccagttcacctcctccagatccatgaagggctcctgcagcatcgggggcagcatcgggggcggctccagccgcatctcctctgtcctggctggagggtcctgccatgcccccagcacctacgggggggcctcctgcgggctggggggcggctatggcggtggcttcggcagcagcagcagctttgctagtggctttgggggaggatatggtggtggccttggtgctggcttcggtggtggcttgggtgctggcttgggtggtggctttgctggtggtgatgggcttctggtgggcagtgagaaggtgaccatgcagcacctcggtgaccgcctggcctcctacctggacaaggtgcgtgctctggaggaggccaacgccgacctggaagtgaagatccgtgactggtaccagaggcagcggcccagtgagatcaaagactacagtccctacttcaagaccatcgaggacctgaggcacaagatcattgcggccaccattgagaatgcgcagcccattttgcagattgacaatgccaggctggcagctgatgacttcaggaccaattacgagcacgagctggccctgcagcagactgtggaggctggcgtcaatggcctgtgccgggagatgcttgctctgcgaggtcagaccggtggagaagtgaacgtggagacggatgccgcacctggcgtggacctgagctgcatcctgaatgagatgcgcaaccactgggggctttgggagagcctcacctttcactctgctttcctgtctcagaccaaggagctgaacaaaaaagtggcctccagcagtgaactggtacagagcagccgcagtgaggtgacggagctccagagggtgttccagggcctggagatggagctgcagtcccagctcagcataaaagcgtccctggagaacagcctggaggaaaccaaaggctgccactgcatgcagctgtcccagatccagggactgattggcagtgtggaggagcagctggcccagctatgctgtgagatggagcagcagagccgggagtaccagatcttgctggacatgaagacacggctggagcaggagatcgccacctaccgccacctgctggagggcgaggacgcccatcttcacctcctcttcgtcctcttcgagccgtcagacctggcccatcctcaaggagcagggctcatccagcttcagccagggccagtgctcctagaactgagctgcctctaccacagcctcctgcccaccagctggcctcacctcctgaaggcctggccaactgctcgctcactcacctccctcctcagcaccatgagcacctgcagccgccagttcacctcctccagctccatgaagggctcctgcggcatcgggggcggcatcgggggcggctccagccgcatctcctccgtcctggccggagggtcctgccgcgccaccagcacctacaggggtggcctgtctgtcgcctcctcctgcttctcctctgggggagcctacaggctggggggcggctatggcggtagcttcagcagcagcagcagcttcagtagtggctttgggggaggatatggtgatggccttggtgctggcttcggtggtggcttgggtggtggctttgctggtggtgatgggcttctggtgggcagtgagaaggtgaccatgcagaacctcaacgacagcctggtctcctacctggacaaggcgcgtgccctggaggaggccaacgctgacctggaggtgaagatccatgactggtaccagtggcagcggcctgctgagatcaaagactacagtccctacttcaagaccatcgaggatctgaggaataaggtgggtgaatgggcagcagaaggtgccattccagctagctccttctgggaacaatag

SEQ ID NO: 6694 - DNA, 2274 bp, Homo sapiens
  SIMILAR (1)..(1161): 821254mologous to Homo sapiens cytokeratin 17,accession number Z19574,Smith-Waterman Score=1541.
atgaccacctccatccgccagttcacctcctccagctccatcaagggctcctctggcctggggggcggctcgtaccgcacctcctgccagctgtctggcggcctgggtgccggctcctgcaggccgggatctgctggtggcctgggcagcgccctcgggggtagcagctactccagctgctacagctttggctctggcggtggctatggcagcagcagctttgagggcgttgatgggctgctggtcggaggtgagaaggccaccatgcagaacctcaatgaccgcctggcctcctacctggacaaggtgcgtgccctggaggaggccgacactgagctggaggtaaagatccgtgactggtaccagaggcaggccccggggcccgcccgtgactacagccagtactacaggataatcgaggagctgcagaacaagccacccccatccgatgacctgactactctcccatctccgctgatcctcacagccaccgtggacaatgccaacatcctgctacagaatgacaatgcccatctggctgctgctgacttccacaccaaggtgctggatgagctgaccctggccagagccgacccggagatgcacattgagaacctcaaggaggagctggcctacctgaagaagaaccacgaggagatgaacgccccgcgaggccaggtgggcggtgagatcaatgtggagatgggcgctgccccaggtgtggacctgagcctcatcctgaacgagatacgtgagcagtatgagaagatggcaaagaagaaccgcaaggatgccgaggattggttcttcagcaagacagaggagctgaaccgcgaggtggctaccaacagtgagctggtccagagcggcaagagcgagatttcggagctccggtgcaccatgcaggccttggagatcgagctgcagtcccagctcatcatgaaagcatccctggagggcaacctggcggagacagagaaccgctactgcatgcagctgtcccagatccaggggctgatcggcagtgcggaggagcggctggcccagcttctctgcgagatggagcagcagaaccaggagtacaagatcctcctggacatgaagatgcggctggagctggagatcaccacctaccaccgcctgctggagggcgaggatgcccagagcctcctcaagctccaggctgcggcgccttaccgagaagctctggcctcggacgaagggcatttttcggggcagacttcgctcctcagacccccaagagttgttgatctgggtgttacggaccacagcattctcatcaaaacgggggttcatgtggaaggcgatgtggctcccagagcacaggttgatgtggaacctgcggggagagagtcagggaaggagggaatgagagatgaggaccaaagggtgaggagcccagatttgctgagggcctactgtgcacttcgctcatctcagggagctccctcgaatgccaaaagggtaacagcagctcccatccagctgccggtgccctgtgggaatgtgggcccagcataccctaatcttcccatttttcacgtggtgttggccgtccccttttctgggactatccaagggggtctccaggacggatttcagatcactgtcaatggggccgttctcagctccagtggaacccagacgggcttcagtggaaacgacattgccttccacttcaaccctcggtttgaagacggagggtatgtggtgtgcaacacgaggcagaaaggaagatgggggcccgaggagaggaagatgcacatgcccttccagaaggggatgccctttgacctctgcttcctggtgcagagctcagatttcaaggtccctggtaacatttatttttcagcgacattgttccagcctttatccagagtctattacggttatagttctgtaagcacattgcaaattacctttgcaagcacagtaggaacactgggcttgagaagccgaaggagggaccaggagctcaggggtggtccccatcccggcctggggcacctcccccgaaatcacgtagaaggaatgaaagatgaagacaatcatgacttggcaaccaccataataataattgacccaacaaaaataatcaatgaaatgctaaatctagtgggcactttcgagccagcaataggtcagtaccctgctgggatggagcttccagaggaagtggcaggcagccatctttgctgtttcacagacttcactgatgatacctccagctatgggaaaaaccgaggcaactag

SEQ ID NO: 6695 - DNA, 1380 bp, Homo sapiens
  SIMILAR (757)..(1374): 721254mologous to Homo sapiens putative p150,accession number U93574,Smith-Waterman Score=811.
atgcccacctggctgccgatgacttctgcaccaagtgaggctgggtctctggagctgccccaggggctggacaagctgaccctgcctggagccaacctggagatgcagcctgagaacctcaaggaggacctggtctacctgaagaagaaccatgaggagctgtcaatggcaatcaagcgtaatgagagcatggccaaaggtctgcagagggctctgctgcagcagcagccagaggatgacagcaagtgcttcccccggccccaggacctgatccggctttatgacatcatcttacagctgacccttgaggaccgggaaggcaagggcctgtcattttcctttgcctgtgtggacaaggatgtcagtgtgaagatggacactgtgcctggagtgaacctgagctgcatcctgaatgagatgcgtgaccaggacaagaaactggtggagaagagctgcaaggatgcccagggctggttcttcagcttgaaagcattgctggagggcagcctggtggagacggaggtgtgttacaggacccagctggcccagctgcaggggctcatcagaagcatggaacagcagctgtgcgagctctgctgtgatgcagagcaccaggaccacgagcaccaggtccttctggacgtgaagacgcagctggagcaggagatcgccacctacagccgcttgctagaggttgaggacgcccagctggccactcagtactccttgtccctggcctcgcagcccacccgggaagacctagaaaaagctattttaaaattcatatggaaccaaaacagagcccaaatagccaagacaatcctaagcaagaagagcaaagctagaggcatcatgctacccagcttcaaaatatactacaagactacagtaaccaaaacagcatggtgctggtacaagaaccgacacatagaccaatggaacagaatagagaacccagaaataagaccacacacctacaaccatgtgatctttgacaaacctgacaaaaggaagcaatggggaaaagattccctatttaataaatggtgctgggagaactggctagccatatgcagcaaattgacactggaccccttccttaacccatatacaaaagttaactcaagatggattaaagacttaaatctacaacccaaaactataaaaatcctgaaagaaaacctaggcaatgccattcaggacacaggcaagggcaaagatttcatgacgaagatgccaaaagcaattgcaacaaaagccaaaattgacaaatgggatctaattaaactaaagagcttctgcacagcattaagaaactatcaacagagtaaaccgacaacctacagaatgggagaaaatttttgcactctatccatctga

SEQ ID NO: 6696 - DNA, 885 bp, Homo sapiens
  SIMILAR (1)..(201): 921254mologous to Homo sapiens cytokeratin 17,accession number Z19574,Smith-Waterman Score=313.
atgaccacctccatccgccagttcacctcctccagctccatcaagggctcctctggcctggggggcggctcgtcccgcacctcctgccagctgtctgggggcctgggtgccggctcctgcaggccgggatctgctggtggcctgggcagcgccctcgggggtaacagctactccagctgctacagctttggctcttgcggtgtacaccccattgccattgccaccccactgcacatacctgataacgcagccagcccagcagtggaaccaacaccatcagaaccagtgccaagtgctgcctctaggaaacaggcacaaagttaccaaactcaactaaatggtaaaaaacagtgcttagaagacagcagctctgaaattcctcgtttgatatgtgacccagatcccaattgtgaaatcaatgaaagagatgagttcattattgaaaaactgaaatcagctgtaaatgagatagcactaagcaggaataaattacaagatgaaaatcagaagctcttgcaagaactgaaaatgtaccaaagacagtgccaggctcgtttaactcgcagtatcctcggtgaacgctaccagaaaaacaccggggtagcgacggatacccggcagcggactacgaccggtgtcgtcatctataccgcacctatctcctacggtctctccccacgggagagaaggcaggccccagggtctttccccaggatggccttgggtcaggtggacaaggatgtcagtgtgaagatggacactgtgcctggagtgaacctgagctgcatcctgaatgagatgcgtgaccaggacaagaaactggtggagaagagctgcaaggatgcccagggctggttcttcagcgtggtgggtggccgtgtgtaa

SEQ ID NO: 6697 - DNA, 1557 bp, Homo sapiens
  SIMILAR (107)..(1399): 821254mologous to Homo sapiens cytokeratin 17,accession number Z19574,Smith-Waterman Score=1634.
  misc_feature (1)...(1557): n = a,t,c or g
tagcgcgcctgaagtaccgggtcgacccacgcgtgcgatctactcttcagcccttctcctgtgtgcctgcctcctgccgccgccaccatgaccacctccatccgcrcagttcacctcctccagcatccatcaagggctcctccggcctggggggcggcgtcgtcccgcacctcctgccggctgtctggcggccttgggtgccggctcctgcaggctgggatctgctggcggcctgggcagcaccctcgggggtaagcagctactccagctgctacagctttggctctggtggtggctatggcagcagctttgggggtgttgatgggctgctggcttggaggtgagaaggccaaccatgcagaacctcaaatgacccgcntgggctcctacctggacaaggtgccgtgcccttggaaggaggccaacactgagctggaggtgaagatcccgtgacctggtaaccagaggcagggccccggggcccgcccgtgactacagccagtactacaggacaattgaggagctgcagaacaagatcctcacagccaccgtggacaatgccaacatcctgctacagattgacaatgcccgtctggctgctgatgacttccgcaccaagtttgagacagagcaggccctgcgcctgagtgtggaggccgacatcaatggcctgcgcagggtgctggatgagctgaccctggccagagccgacctggagatgcagattgagaacctcaaggaggagctggcctacctgaagaagaaccacgaggaggagatgaacgccctgcgaggccaggtgggtggtgagatcaatgtggagatggacgctgccccaggcgtggacctgagccgcatcctcaacgagatgcgtgaccagtatgagaagatggcagagaagaaccgcaaggatgccgaggattggttcttcagcaagacagaggaactgaaccgcgaggtggccaccaacagtgagctggtgcagagtggcaagagtgagatctcggagctccggcgcaccatgcaggccttggagatagagctgcagtcccagctcagcatgaaagcatccctggagggcaacctggcggagacagagaaccgctactgcgtgcagctgtcccagatccaggggctgattggcagcgtggaggagcagctggcccagcttcgctgcgagatggagcagcagaaccaggaatacaaaatcctgctggatgtgaagacgcggctggagcaggagattgccacctaccgccgcctgctggagggagaggatgcccacctgactcagtacaagaaagaaccggtgaccacccgtcaggtgcgtaccattgtggaagaggtccaggatggcaaggtcatctcctcccgcgagcaggtccaccagaccacccgctgaggactcagctaccccggccggccacccaggaggcagggaggcagccgccccatctgccccacagtctccggcctctccagcctcagccccctgcttcagtcccttccccatgcttccttgcctgatgacaataaagcttgttgactcagctatga

SEQ ID NO: 6698 - DNA, 452 bp, Homo sapiens
  SIMILAR (38)..(232): 371254mologous to walleye epidermal hyperplasia virus type 2 pol polyprotein,accession number AF014793,Smith-Waterman Score=108.
ctttctgctccccagctccttcagctgtactcactctttgttaagtcccacaattaccattgttcctggcccggacttcaatctggcctcccacattattcctgataccacacctgacccccatgactgtatctctatgatccacctgacattcaccccatttccccatatttccttctttcctgttcctcaccctgatcacgcttgatttattgatggcagttccaccaggcctaatcgccacacaccagcaaaggcaggctatgctatagcacaagccactatcccgcctcttagaacctctcatttcctttccatcgtggaaatctatcctcaaggaaataacttctcagtgttccatgtgctattctactactcctcagggattattcaggccccctcccttccgtacacattaagacgagatcgtcgacccgggacttcaagagcgg

SEQ ID NO: 6699 - DNA, 1794 bp, Homo sapiens
  SIMILAR (649)..(1791): 1001254mologous to Homo sapiens homolog of S. cerevisiae Msh2p,accession number U03911,Smith-Waterman Score=1931.
atgacctcgggtcctcagaccagccagcccaaggaacatctcaccaatttcaaatcggatgaacaggaaagagtttcttctctagcccaatctcacactgacaaccaccggcttcatgagccaggcctccaggaaggcattagagcagttccccgagaagatccccaatggaactatcaggcagattcccccagaggccccctggaccatcatagacgccgagcttcaggtaactcacagtggaggcaagccaaactcattgccttaactcgggccctcactcttgcaaagggactacgcatcaatatttatactgactctaaatatgccttccgtatcctgcaccaccatgctgttatatgggctgaaagaggtttcctccctacgcaagggtcctccatcattaatgccactttaataaaaactcttctcaaggccgctttacttccaaaggaagctggagtcattcactgcaagggccatcaaaaggcatcagatcccatcactcagggcaacgcttatgctgataagcctattggttttggattggaaaagttattgacatttcatctctcccaattgcaagaatatagaggaaccaagtggagggaaaaatcccacaggaaagtcaaccatgatgagaacacaagcaaattgacttctttaaatgaagagtataccaaaaataaaacagaatatgaagaagcccaggatgccattgttaaagaaattgtcaatatttcttcaggctatgtagaaccaatgcagacactcaatgatgtgttagctcagctagatgctgttgtcagctttgctcacgtgtcaaatggagcacctgttccatatgtacgaccagccattttggagaaaggacaaggaagaattatattaaaagcatccaggcatgcttgtgttgaagttcaagatgaaattgcatttattcctaatgacgtatactttgaaaaagataaacagatgttccacatcattactggccccaatatgggaggtaaatcaacatatattcgacaaactggggtgatagtactcatggcccaaattgggtgttttgtgccatgtgagtcagcagaagtgtccattgtggactgcatcttagcccgagtaggggctggtgacagtcaattgaaaggagtctccacgttcatggctgaaatgttggaaactgcttctatcctcaggtctgcaaccaaagattcattaataatcatagatgaattgggaagaggaacttctacctacgatggatttgggttagcatgggctatatcagaatacattgcaacaaagattggtgctttttgcatgtttgcaacccattttcatgaacttactgccttggccaatcagataccaactgttaataatctacatgtcacagcactcaccactgaagagaccttaactatgctttatcaggtgaagaaaggtgtctgtgatcaaagttttgggattcatgttgcagagcttgctaatttccctaagcatgtaatagagtgtgctaaacagaaagccctggaacttgaggagtttcagtatattggagaatcgcaaggatatgatatcatggaaccagcagcaaagaagtgctatctggaaagagagcaaggtgaaaaaattattcaggagttcctgtccaaggtgaaacaaatgccctttactgaaatgtcagaagaaaacatcacaataaagttaaaacagctaaaagctgaagtaatagcaaagaataatagctttgtaaatgaaatcatttcacgaataaaagttactacgtga

SEQ ID NO: 6700 - DNA, 219 bp, Homo sapiens
  SIMILAR (67)..(219): 881254mologous to Homo sapiens reverse transcriptase homolog= pol {retroviral element},accession number S61070,Smith-Waterman Score=226.
ctgaagactgacactgcccaatcacctcggaagcctacaggaccatcacagatgctttgggtaactcttacagtggaagggtcctccatcattaatgcctctttaataaaaactcttctcaaggctgctttacttccaaaggaagctggagtcattcactgcaagggccatcaaaaggcatcagatcccatcgctcagggcaacgcttatgctgataag

SEQ ID NO: 6701 - DNA, 528 bp, Homo sapiens
  SIMILAR (290)..(526): 751254mologous to Homo sapiens reverse transcriptase homolog= pol {retroviral element},accession number S61070,Smith-Waterman Score=293.
aactcttacagtggaaagtaagtccatcaaagcctataaactctccttacaattcccccattttacctgtccaaaaaccggacatgccttacaggttagttcaggctttgttgagtctcccacagttaccattgttcctggcctggacatcaatctggcctcccacactattccggataacactcctgaaccccatgactgtatctctctgatccacctgacattcactccatttccccatgtttccttctttcctgttcctcaccctgatcacacttggtttattgatggcagttccactaggcctaattgccactcaccagcaaagacgggctatgctatagtatcttccacacttatcattgacgctactgctcttcccccctccactacctctcagcaagccgaactcattgccttaactcgagccctcactcttgcaaagggactacccatcaatattcatactgactctaaatatgccttccatatcctgcaccaccatgctgttatataggcagaaagagg

SEQ ID NO: 6702 - DNA, 1923 bp, Homo sapiens
  SIMILAR (1386)..(1472): 791254mologous to Homo sapiens Fragment of human secreted protein encoded by gene 18,accession number Y14483,Smith-Waterman Score=115.
atgtctgacaaaagggaagaaatgaccgtggtggccttctctgaccctgtgggaaaagcctttacccatccagtgaaagtgtctacccagaccaagagggcagaaatgagcatcctggaaaccaatcagtacttgcgctctgaactggaaaagtgcaaacagaacttccaagacctcacagagaaattcctgacatccaaagctactgcctactgcctggccaatcacctgcagaaatgtaagtgtgaagagtgcaaagaccttatagaatctgtgctggaggaggaggtgcagtttcaggagagggagctggccgaattgccgaggtcagctgcaaggctccgggaagtccaggaggaagaaatggatgaagtcctggagtactcactagatgaacagtatttgactcattccagctgccatgactcccaccagcttcccagcagcaatgccttcctctttgatgcacaggaaggcccctcggctgtggaaacagccagccctggcggcggcatggtgaacatagacgtggagttccacatccggcacaactacccctggaacaagttgccggccaacgtgaggcagtcattaagtggagatagctcatcatggaggtcttcatctttgtcttcacatcaaaaggtgctcttgtcatggggtggaggggaaagtaggaggcctgtacaagaagcttcatcggcaactgacactgatacaaatagtcaagaagatccagctgacacagccagtgtaagaagcctgagtctgtctgcaggacacacgaagcacatcgcattcctgtttgactccactcttactgccttcttaatgatgggaaatctttcaccagttcagagcactggtgaaagagaagcacagagatattttgatcatgcgcttactctgagaaacacaatactgtttctgcatcataacaaagatctagttgtgcaaactgcacagccagaccaacccaattatggttttcctctggatctcttatgctgtgaaagccttcttggtctggaccctgcaactggcagcagagttctaaacaaaaattacacactgcttgtttccatggctcccctcaccaatgaaatccggcctgtcagcagctgcacccctcagcatattggaccagctatcccagaagtcagctctgtctggtttaaacagtacatttatgtttatcatatcactggacaaggaccaccatcccttttattatccaaaggtacaagacctcgaaaactgccagatatatttcagagttacgatcgattgctaataacatcttggggtcacgatcctggagtagttcctacctcaaatgtgctcacgatgttgaatgatgctttaacacattctgcagttttaattcaggagcatgccaacttgcaaatagaaaactcagtgatgcttctgatgagagaggaaaacctgatttggcttctggctcagatgttaaatgggagtacagagtcatttgaaatggtcattgaagaagcaactatagattcagcaacaaagcaaacctctggtgccacaacagaagcagattgggttcctctcgagctgtgctttggaattccgctgttcagttccgaattaaaccggaaagtttataggaaaattgctacacatggcctttgcagaaaagagagccttcaaaacctcttacattccagtagaaaactctctctgcaagtccttaactttgttcactcattccaggaaggtgcttcaacattggatattcacacagagcccagtttttcaagtttgctttcacagtcatcgtatgctgacatgggtgttccacttcctgcaaaaaatttaatatttaaagatggtgtcttatcagaacggagtggatggtcaccttcctcacttattgctaatctccatttgcaataa

SEQ ID NO: 6703 - DNA, 2295 bp, Homo sapiens
  SIMILAR (1478)..(1735): 831254mologous to Homo sapiens putative p150,accession number U93572,Smith-Waterman Score=364.
atgtgtaaaagaatgcctggacttcaggcatctcagaccgtttgcccattttacgacaagaattatctagatctgaaaaggaaaggaactgaaattaagagaagggagagattgaagtgtggcaccaagattgaaaggagaaagaggttgagggatagtgagaggttggagaagagaataaaaagaggctgcttaccggatttaaaattgtctacagaaattcaaataaatagacttagaggcttatatacccttttaagaaaggaaagaaggtttggacttcaagagaccataaattatgcagaagtgactgggatatatgtgaaggaactaattgaagacagggagcatcttaatagtggtaaatacatctttaacatttttgatattaaggtgcctcgtgttgtctttggcataatagatccttacatgttgtgggaaaaaaaggaaggaacaaaagaagggataaaagaaggaatgaagagagagagtcaaaaaagaataaagtgggaaagaagtttcataaccttcattgcccttaacacagcagacaggacactgatgtcatcggcaggatgctacagaaaacaggtgaaaatacacattgatgcccttcctccgccaaacagtcaaaccctgaagaaaagaggaggtgcgagtctcattatttcctttcgaaggcagtcaggaccctctgctgcaggtctgtgggagtttgctagaggtccattccagaccctgtttgcctggttatcaccagcggaggctgcagaacagcaaagattgctgcccgcttcttccgctgaaagcttcatcgcagagggggacccgccagatgccggccagagctctcctccctcaagtctgcatgcagcggctgccactgccctaatgcttttagaggcccttaaaatcacaaactatgctcaactcactctctacagttctcctaacttccaaaatctattttcttcctcacacctgacacatatactgtctgctgactggctccttcagctgtactcactctttgttgagtctcccacaattaccattgttcctggcccggacttcaatccggccttccactttattcctgataccacacctgacccccatgactgtatctctctgatccacctgacattcaccccatttccccatatttccttctttcctgttcctcaccctgatcacacttggtttattgatggcagttccaccaggcctaatcgccacacaccagcaaaggcaggctatgctatggcaggaatactagctactgtgtattatctccagtgggtaattcacccctggtccccaatcctggttctgctcgctgcacagaaggtggcttattatatgcaagagcctgactgtatgaatgggctgctccaggaagatctcccaagtcacaaggttaggcagtcccccagcaatctgttgtttggtagaagtggcacctgtgcaaattggaccctggcagatctggaggacacaaagaataaaatacctaggaatccaacttacaagggatgtgaaggacctcttcaaggagaactacaaaccactgctcaaggaaataaaagaggatacaaacaaatgaaagaaccttccatgctcatgggtaggaagaatcaatatcgtgaaaatggccatactgcccaaggtaatttacagattcaatgccatccccatcaagctaccaataactttctcacagaattggaaaaaactactttaaagttcatatggaaccaaaaaagagcccgcatcaccaagtcaatcctaagccaaaagaacaaagctggaggcatcacactacctgacttcaaactatactacaagcctacagtaaccaaaacagcatggtactggtaccaaaacagagatatagatcaatggaacagaacagagccctcagaaataacaccgcctatctacaactatctgatctttgacaaacctgagaaaaacaagcaatggggaaaggattccctatttaataaatggtgctgggaaaactggctagccatatgtagaaagctgaaactggatcccttccttacaccttatacaaaaatcaattcaagatggattaaagacttaaacattagacctaaaaccataaaaaccctagaagaaaacctaggcattaccattcaggacataggcatgggcaaggacttcatgtctaaaacaccaaaagcaatggcaacaaaagccaaaattgacaaatgggatctaattaaactaaagagcttctgcacagcaaaagaactaccatcagagtga

SEQ ID NO: 6704 - DNA, 892 bp, Homo sapiens
  SIMILAR (259)..(546): 821254mologous to Homo sapiens reverse transcriptase homolog= pol {retroviral element},accession number S61070,Smith-Waterman Score=396.
atgatgtttcgggtctccaggaattactatgccagtgttcacacaaaatgtagaaggctgaagactgacactgccctattgcctcggaagcctacaggaccatcacagacactttgggtaactcttagagagcaggtacactttaaacgggttaaagcctgttatcacttgcctgttacagcatggccctttaaagcctataaactctccttacaattcccccattttacctgtccaaaaaaaactggacaagccttacagcaagctgaactcattgacttaactcgggctctcactcttgcaaagggattacttgtcaatatttatactgattctaaatatgccttccatatcctgcaccaccatgctgttatatgggcagaaagaggtttcctcactatgcaagggtcctccatcattaatgcctctttagtaaaaactcttttcaaggtcgctttacttccaaaggaagctggagtcattcaccgcaagggccatcaaaaggcatcagatcccatagctccgggcaatgcttatgctgataaggaatgctctcctttcatggtggccctaccagaaacttggcatttcttgcgcattagattcattcagcatgaggccatcgacattgatcctggggtatattctgtggaatatcaagaaattggatttgagaaggatatatttgcctcagtaatagttgcataccagatactatggactgtgttgctttcttcccatacagttacatctgaaatggcagccactttggtttccccatctgactcaactgcacagtcactgaagaaaatggtcacaggttcctcagacgaagacttagagaaatgtttacactatacttctgtatccacattgcagaaactttatccag

SEQ ID NO: 6705 - DNA, 1286 bp, Homo sapiens
  SIMILAR (355)..(681): 1001254mologous to Homo sapiens PRO982, a novel secreted protein,accession number Y96731,Smith-Waterman Score=621.
atgcacataaaccagaaaatctacaagaaactgatatatttttggacatatacactcccaagattggaccaggaagagattcggtccctgaatagaccaataacaagttctgaaattgaatcagcaataaatagcctaccaaccaaaaaatttccaagaccagatggattcacagttgaattctaccagatgtacaaagaagagctgacacacaacaagaaaagaaagcttcaggccaatatccttgatgaacatcaatgcaaaaaatcctcaagaaatcccggcaaactgaatccagcagcacatgaaaagctaatccaccatgatcaagcaggctttattcctgggatgcaagctcttgtctgctggataacagtcttcctcctccagtgttcaaaaggaactacagacgctcctgttggctcaggactgtggctgtgccagccgacacccaggtgtgggaacaagatctacaacccttcagagcagtgctgttatgatgatgccatcttatccttaaaggagacccgccgctgtggctccacctgcaccttctggccctgctttgagctctgctgtcccgagtcttttggcccccagcagaagtttcttgtgaagttgagggttctgggtatgaagtctcagtgtcacttatctcccatctcccggagctgtaccagatgctgctgcagggccagtacacagttgtgctcctgccagtgcccaaaacacacctacccgggctcctgcatccccttgccggcaagctgcacccccaccccaccccacccactgcatttttacagaaaaccacaagtagatattgccagcaatgcattatcaacggtgttgctgccagaaagacaacgagagctcttttctcaagccaaactcattgccttaactcgagccctcactcttgcaaaaggactacgcatcaatatttatacagactctaaatatgccttccatatcctgcaccatcatgctgttatatgggctgaaagaggtttcctcattacacaagggtcctccatcattaatgcatctttaataaaaactcttctcaaggccgctttacttccaaaggaagctggagtcattcactgcaagggccatcaaaaggcatcagatcccatcactcagggcaacgcttatgctgataagcctattggttttggattggaaaagttattgacatttcatctctcccaattgcaagaatatagaggaaccaagtggagggaaaaatcccacaggaaagtcaaccatgatgagaacacaag

SEQ ID NO: 6706 - DNA, 1005 bp, Homo sapiens
  SIMILAR (559)..(1002): 441254mologous to Baboon endogenous virus strain M7 gag-pol precursor polyprotein,accession number D10032,Smith-Waterman Score= 298.
atgagaataaacaaggagctcagaagtgagtatcagcagttttctcaagaagccttagagttagagtcagggagatacaaagagaaaagggtaggatatcagcctttgttacaacaagaaactgacatgggcaggaaaggaaatgacaaggaggaagccttatcactccttggtctgaaaaggcaaagggagggaaaactatactcagtctttgttgagtctcccacagttaccattgttcctggcctggacttcaatctggcctcccacgttattccagataccacacctgacccgcatgactgtatctctctgatccacctaacattcaccccatttccccatattttcttctttcctgttcctcaccctgatcacatttggtttattgatggcagttccaccaggcctaatcactactcaccagcaaaggaagctggagtcattcactgcaagggccatcaaaaggcatcagatcccattgctctaggcaatgcttatgctgataatgtggctaaagaagcatctagtgttccaacttctgtccctcacagttacaagctgctagcccatctcttagaccctctcatttcctttccatcatggaaatctatcctcaaggaaataacttctcagtgctccacctgctattctactacccctcagggattgttcaggcctcctccctttcctacacatcaagctcagggatttgcccctgcccaggactggcaaattgactttactcacatgccccgagtcaaaaaactaaaatgcctcttggtctgggtagacactttcactggatgggtagaggcctttcccacaaggtcagagaaggcaaccacggtcacttattcccttctgtcagacatagttcctcagtttggccttcccacctctatacagtccaataacagactggcctttactagtcaaatcacccaagcagtttctcaggctcttggtattcagtggaaccttcatatcccttaccgtccttga

SEQ ID NO: 6707 - DNA, 3588 bp, Homo sapiens
  SIMILAR (2821)..(3429): 791254mologous to Homo sapiens reverse transcriptase homolog= pol {retroviral element},accession number S61070,Smith-Waterman Score=807.
atgtcaacagctgccttaattactttggtcagaagtggtgggaaccaggtgagaaggagagtgctgctaagctcccgcctgctgcaggacgacaggcgggtgacacccacgtgccacagctccacttcagagcctaggtgttctcggtttgacccagatggtagtgggagtccagctacctgggacaattttgggatctgggataaccgcattgatgagccaattctgctgccacccagcattaagtatggcaagccaattcccaaaatcagcttggaaaatgtggggtgcgcctcacagattggcaaacggaaagagaatgaagatcggtttgacttcgctcagctgacagatgaggtcctgtactttgcagtgtatgatggacacggtggacctgcagcagctgatttctgtcatacccacatggagaaatgtattatgtttgtaatgtttgagcacaattcctgggtgaaattcgtatttgcctctgtgcgtgttatttgtggcagagaactgtgcctggtcagcagctctagacctggagcccgtggacactatatgcggggcttcagtggaaagagagatctgcttaattttgtcccagcaactcttctgacctctgggactactgcaacagtagccctattgcgagatggtattgaactggttgtagccagtgttggggacagccgggctattttgtgtagaaaaggaaaacccatgaagctgaccattgaccatactccagaaagaaaagatgaaaaagaaaggatcaagaaatgtggtggttttgtagcttggaatagtttggggcagcctcacgtaaatggcaggcttgcaatgacaagaagtattggagatttggaccttaagaccagtggtgtcatagcagaacctgaaactaagaggattaagctatggaattctcctggtgaaatggtcctgctgttcttcctcacctgcacccaatcagccagcatcacctgcactcaatcatgcagcatcacctgcacccagtcatccagcatcacctgcacacaatcagcatcacctgcatccaatcagccagcatcacctgcacccaagcaatcagcatcacctgcacccagtcagccagcatcacctgcacccaatcagccagcatcacccacacccaatcagccagcatcatctgcacccaatcagccagcatcacctgcacccaatcaatcagcatcacttgcacccaatcagccagcatcatctgcacccaatcagccagcatcacccgcacccaatcagccagcatcacctgcacccaatcagcatcacctgcatccaatcagcatcacctgcacccaatcagcatcacctgcatccagtcagccagcatcacctgcacccaatcaaccagcatcacctgcacccaatcagcatcacctgcatccaatcagcatcacctgcacccaatcagcagcacctgcacccagtcaaccagcaccacctgcacccaatcagcatcacctgcacacagccagcatcacctgcacccaatcagccaacatcacctgcacccaatcagccaacatcgcctgcacccagtcatctagcatcacctgcacccagtcatccagcatcacctgcacccaatcggccagcatcacttgcatccagtcagccagcatcacctgcacccaatcagcatcacctgcacccaatcagctaacacctgcacccaatcagccagcatcacctgcacccaatcagccagcatcacctgcacccaatcagcatcacctgcacccaatcagccaacatcacctgcacccattacatcatgctgatgacagcttcctggtcctcaccacagatggaattaacttcatggtgaatagtcaagagatttgtgactttgtcaatcagtgccatgatcccaacgaagcagcccatgcggtgactgaacaggactttgcggcacctagcctgaacactccgacagcccagagggagcttgtcccagacaatcaagaggaaaagacggtaagccataaagagatggagacctgctatcctggcgaagagggaatggtggtccacacacgggattcagcctcggatcaagcccagcaggtggccttgcaccttgggactgggcctgagcagggaggagtcactcatccccttaggctttcaggccctggggagaatcttacaagttacctgaaactaattatcaagcctctatgctacctgtttggtggtctcttcacatggacgcgtgtgacatttggtgccgtgactcggattggggacctcccttgggagatcaatcctctgtcctcctgctctttgctcagtgacaaagatccacctgtgacctcgggtcctcagaccaaccagcccaaggaacatctcaccaattttaaattagtctccaccccaggttttgagtcctttggatcctccttttctacggacccatctgacctctcccctcctccccaggctgctccttgccaggctgagccagaggccctcaaaatcacaaactgtgctcaactcactctctacagctctcataacttccaaaatctattttcttccttacacctgatgcatgtactttctgccccccggctccttcggctatactcactctttgttgagtctcccacaattaccattgttcctggcccggacttcaatccagcctcccacattattcctgataccacacctgacccccatgactgtatctctctgatccacctgacattcactccatttccccatatttccttctttcctgttcctaaccctgatcacacttggtttattgacggcagttccaccaggccaaatcgccactcaccagcaaaggaaggctatgctatagtatcttccacatctatcattgaggctaccactctgcccccctccactacctctcagcaagccgaactcattgccttaatttgggccctcactcttgcaaagggactacatgtcaatatttatattgactctaaatatgccttccatatcctgcatcaccatgctgttatatgggctgaaagaggtttcctcgctatgcgagggtcctccatcattaatgcctctttaataaaaactcttctcaaggccgctttacttccaaaagaagctggagtcattcactgcaagggccatcaaaaggtgtcagatcccatcactcagggcaatgcttatgctgataaggtagctaaagaatcagctagtgtcccaacttctgtccctcgtggccagtttttctccttctcatcagtcactcccacctactctcctactgaaacttccacctatcaatctcttcccacacaaagcaaatggttcttggaccaaggaaaatatctccttccagcctcacaggcctgttttattctgtcgtcatttcataacctcttccatgtagatagtgtcagaattggattggaggacactcagccgctgtccccggcagaattgcttgcttgcctggtgtgtgggaaaaaactcacactcatttggtcacagaagtcttctgtgtggattgttgttaacacagtgagagcccagaaaaaaacactgtga

SEQ ID NO: 6708 - DNA, 4023 bp, Homo sapiens
  SIMILAR (2308)..(4020): 911254mologous to HERV-H/env62 envelope protein,accession number AJ289709,Smith-Waterman Score=2698.
atggataccagcatctgttctggtggaggtgacaagggggtgattaaaagctttattgctcacacaaagcctgtttggtggtctcctcacacagacacgcatgaaatttggtgctgtgactcggatcgggggacctcccttgggagatcaatcccctgtcctcctgctctttgctccatgaaaaagatccacctacaacctcgggtcctcagacccaccagcccaaggaacatctcaccaattttaaatcgggctgctcatcgccatgccgagctaagtcccaattcttcctcagtctctgctcctccaccctataatccttctatcacctcccctcctcacacctggtctggcttacagtttagttccacgactagctcttccccaccttcccaacaatttcctcttagagaggtggctggagctgaaggcagtcaggatgatcgggaaagagttttttctctagcccaatctcacgctgataaccaccggcttcacgagccagacctccaggaaggcagtagagtagttccccaagaggatccccaatggaactctcaggcaaattccccagatctgcttggcttagcgactgaagatcgacgctgcccgatcgcctcggaagccccttggaccatcacagacgctgagcttcagctccttcagctatgctcactctttgttgagtctcccacaattaccattgttcctggcccggacttcaatccggcctcccacattattccggataccacacctgaccctcatgactgcatctctctgatccacctgacgttcaccccatttccccacatttccttcttccctgtttctcaccctgatcacacttggtttattgatggcagttccaccaggcctaattgccactcaccagcaaaggcaggatatgcaatagtatcttccacatctgttattgacgctaccgctctgcccccctccactacctctgagcaagccgaactagttgccttaactcaggccctcactcttgcaaaaggactatgcatcaatatttatactgactctaaatatgccttccatattctgcaccaccgtgtggtcacatgggctgaaagaggttacctcactacacaagggtcctccatcattaatgcctctttaataaaaactctgctcaaggctgctttacttccaaaggaagctggggtcattgactgtaaggggcatcaaaaggcatcagaacccattgctctaggcaacgcttatgctgataaggtggctagacaagcagctagctctccaacttctgtccctcatggccagtttttctccttcacatcagtcactcccacctactcccccgctgaaacttccacctatcaatctcttcccacacaaggcaaatggttcttagaccaaggaaaatatctccttccagcctcacaggcccattctattctgtcgtcatttcataacctcttccatgcagtttacaagccgctagcccgtctcttagaacctctcatttcctttccatcacggaaatctatcctcaaggagatcacttctcagtgttccatctgctattctactacccctcagggattgttcaggccccctccctttcctacacatcaagctcagggatttgtctctgcccaggactggcaaattgactttactcacatgccccgagtcagaaaactaaaatatctcttagtctgggtagacactttcactggatgggtagaggcctttcccacagggtctgagaaggccactgcagtcatttcttcccttctgtcagacataattcttcagtttggccttcccacctctatacagtctgataacagaccagcctttactagtcaaatcacccaagcagtttctcaggctcttggtattcagtggaaccttcatatctcttaccatcctcaatcttcaggaaaggtagaacagactaatggtcttttaaagacacacctcaccaaggtcagcctccaacttaaaaaggattggacagtacttttacctcttgcccttctcagaattagagcctgtcctcgagatgctacacggtacagtccatttgaacttttatatggatgcactttcttgcttggccccaacctcatcccagacaccagccctctagacgatcatcttccagtcctccaacaggctagacaggaaatttgccaggctgctaatcttctcttgcctactccagatccccagccatatgaagacaccctagctggacaatcagttcttgttaagaatctgacccctcaaactctacaacctcgatggactggaccctacttagtcatctatagtaccccaactgccgtccacctgcaggatcctccccactgggttcaccgttccagagtaaagctgtgtccatcagtcagccagcctaatccctcctcttcctcctggaagtcgcaagtactctcccccacttcccttaaactcactcatatttctgaagaacatgcctacacagctgtccccgccttacagacagactgggcaacatctcccatctccctacacctccgaacttcctttaacagccctcacctttaccctcctgaagaactcatttactttctagacaggtccagcaagacttccccagacatttcacatcagcaagctgccgccctccttcgcacttatttaaaaaacctttctccttatatcaactctactccccccatatttggacctctcacaacacaaactactattcctgtggccgctcctttgtgtatctcttggcaaagacccactggaattcccctaggtaatctttcaccttctcgatgttcctttactcttcatctccgaagtccaactacaaacatcaatgaaacaattggagccttccagctccatattacagacaagccctctatcaatactgacaaacttaaaaacattagcagtaattattgcttaggaagacacttgccctgtatttcactccatccttggctatcttccccttgctcatcagactctcctcccaggccctcttcttgtttacttatacccagccccgaaaataacagtgaaagattgctcgtagatactcgacgttttctcatacaccatgaaaatcgaaccttcccctctacgcagttaccccatcagtccccattacaacctctgacagctgccgccctagctggatccctaggagtctgggtacaagacacccctttcagcactccttctcacctttttactttacatctccagttttgcctcgcacaaggtctcttcttcctctgtggatcctctacctacatgtgcctacctgccaattggacaggcacatgtacactagtcttccttacccccaaaattcaatttgcaaatgggaccgaagagctccctgttcccctcatgacaccgacacaacaaaaaagagttattccactaattcccttgatggtcggtttaggactttctgcctccactgttgctctcggtactggaatagcaggcatttcaacgtctgtcatgaccttccgtagcctgtctaatgacttctctgctagcatcacagacatatcacaaactttatcagtcctccaggcccaagttgactctttagctgcagttgtcctccaaaaccgccgaggccttgacttactcactgctgaaaaaggaggactctgcatattcttaaatgaggagtgttgtttttacctaaatcaatctggcctggtgtatgacaacattaaaaaactcaaggatagagcccaaaaacttgccaaccaagcaagtaattacgctgaacccccttgggcactctctaattggatgtcctgggtcctcccaattgttagtcctttaatacccatttttctccttcttttatttggaccttgtatcttccgtttagtttctcaattcatccaaaaccgtatccaggccatcaccaatcattctatacgacaaatgtttcttctaacatccccacaatatcaccccttaccacaagacctcccttcagcttaa

SEQ ID NO: 6709 - DNA, 1158 bp, Homo sapiens
  SIMILAR (931)..(1155): 771254mologous to Homo sapiens reverse transcriptase homolog= pol {retroviral element},accession number S61070,Smith-Waterman Score=283.
atgcaggttgccactcgccccgggaagggggagatcaacaggtgggggtctctgcccgggcgatcactctccatggaggacagccccgattgtgccctggggactgtgcaatcccgtattgtctcggagtgttcacaacaaagagctttgtccctgaggactgcccgagggcagaggaggaggagagagaagcagcaaatgaattcccaggttgggaaggaaggagctctgacctccagccctctggcgttaaagataaatcctctacagttcccatccaaacggcatccattactcacaatcagaattgggtggggacctagattccactcccaggaatctcctctgggccaggtacaaaattctgagctacaaccagatgaacagtacttcccaacaacacacagagaggttaatccaagggagaaaaacctgggtcaaatgaaaagatcgaggcttgcagacctcattaagcacagtgcctccctttacacgcagctaccaaacacaccctcagctctctgctgcccacagctgaggttcccagaagagcaaatgctgctgatccggaccgaagttagtctcttcccgctggaagtggcaatgagccaggataaatgtacatgcttcccagactccttgcaggaagggatggccaaagccacacaatcagaagttgttgggtggagattctgggaaaactctttaaaaggagccgacacaacactccttcagctatactcactctttgttgagtctcccacaattaccattgttcctggcccggacttcaatccggcctcccacattattccggataccacacctgaccctcatgactgcatctctctgatccacctgactttcaccccatttccccacatttccttcttccctgtttctcatcctgatcacacttggtttactgatggcagttccaccaggcctaattgccactcaccagcaaaggcaggatatgcaatagtatcttccacatctgttattgacgctaccgctctgcccccctccactacctctcagcaagccgaaccagctgccttaactcaggccctcactcttgcaaaaaggctaggcatcaatatttatactgactctaaatatgcctttcatatcctgcaccaccatgctgttatatag

SEQ ID NO: 6710 - DNA, 346 bp, Homo sapiens
  SIMILAR (240)..(344): 771254mologous to Homo sapiens reverse transcriptase homolog= pol {retroviral element},accession number S61070,Smith-Waterman Score=123.
ttcctcatacttgatgcatatactttctgcccccaatctccttcagctatactcactctttgttgagtctcccacaattaccattgttcctggcccggacttcaatctggcctcccacattattctggataccacacctgacccccatgactatctctctgatccacctgacattcactccatttccccatatttccttctttcctgttcctcaccctggtcacacttggtttaacgacggcagttccaccaggcctaatcgccattcaccagcaaaggcaggccatgctatagtattttccacatctatcatcgaggctactgctctgcccccctccactacctt

SEQ ID NO: 6711 - DNA, 1238 bp, Homo sapiens
  SIMILAR (291)..(998): 281254mologous to Baboon endogenous virus strain M7 gag-pol precursor polyprotein,accession number D10032,Smith-Waterman Score= 232.
agccatttatcagctcaaggagccttttggcagagccttcaggattttctaggtataaaatcatatcatcagtgaagagagataatttcagtctgtggtctgacaggaaccgggccacacagcaggaggtgagtggcaggtgactgagtgaagcctcatctgtatacaggaaaaggaggtgagattaacagagtgacttgtcagctagtcagcacggcttgtttccacttgctacagaggtgaggagtagtggtgctgccagctgccctgatagtgactccatctgccctgcccccaccatcgccccaggccgtgccacacctccccaagccaactgctgggcttctgaaggcaccctgagataccaagcgttacctggcaaccgcgcacctgtgagccaggtcagccaggcaggtggtgctaacctgtgtgttcagcagcccaagaaacatctcaccaatttcaaatccggtaagcggcctctttttactctcttctccaacctccaaggaccgagatcgcgtcctgtagcctttttgtccaaacaacttgaccttactgttttaggctggccatcatgtctccgtgcagcagctgctgccgccctaatagttttagaggcccttaaaatcacaaactatgctcaactcactctctacagctctcataatttccaaaatctattttcttcctcccacctgacgcatatactttctgctccccggctccttcagctgtactcactctttgttgagtctcccacaattaccaatgttcctggcccagacttcaatccggcctcccacattattcctgataccacacctgaccctcatgactgcatctctctgatccacctgacgttcaccccatttccccacatttccttcttccctgtttctcaccctgatcacacttggtttattgatggcagttccaccaggcctaatcgccacacaccagcaaaggcaggctatgctatagtacaagccaatagcccgcctcttagaacctctcatatcctttccatcgtggaaatgtatcctcaaggaaataacttctcagtgttccatctgctattctactactcctcagggattattcaggccccctcccttccctacacatcaagctcagggatttgccaccgcctaggactggcaaatcagcgttactcaacatgccccgagtcaggaaactaaaatacctcttggtctaggtagacactttcactggat

SEQ ID NO: 6712 - DNA, 234 bp, Homo sapiens
  SIMILAR (70)..(171): 971254mologous to Homo sapiens gamma1-adaptin,accession number AB015317,Smith-Waterman Score=162.
atggaaaagcagtcatcttttgaggggaagggggtagttcagtatggctgggtctgcgagcatgaggttacattccagctgcagctcttgtctcctagcagcagcattgtcccagcatttaacacggggaccatcacacaagtcattaaagttctgaaccctcagaagaggaactactgttgccagaatgaagaagtaaatagcaatgcttatgcctactatccctttaattaa

SEQ ID NO: 6713 - DNA, 837 bp, Homo sapiens
  SIMILAR (67)..(678): 721254mologous to Homo sapiens FLJ00032 protein,accession number AK024442,Smith-Waterman Score=843.
atgcccaaggcccttgggccctataactactgggttggaatgcccccgtattccttcttactgtttgccaaatcacccgaaattcatactggagtgaagccttatatgtgtaatgagtgcggcaaagccttcagtgtgtattcaagcctaactacccatcaggtcatccatactggagaaaaaccttacaaatgtaatgagtgtggcaaggtcttcactcagaattcacaccttgcaagacatcggggaattcatactggagagaaaccttataaatgtaatgaatgtggcaaggtctttaggcataattcatacctttcaaggcatcagcgaattcatactggagagaaaccttacaagtataatgagtatggcaaagcctttagtgaacattcaaacctaactacccatcaggtcatccatactggtgaaaaaccttacaaatgtaatgagtgtggcaaggtcttcactcagaattcacaccttgcaagacatcggagagttcatactggaggtaaaccttaccagtgtaatgaatgtggcaaagcctttagtcaaacatcaaagcttgcaaggcatcagagagttcatactggagagaaaccatatgagtgtaatcagtgtgggaaagcctttagtgtccgttcaagcctaactacccatcaggcaatccatacggaaatctgtccagggtactactggggaccccacgtcctcaaggtacaagaagcgcacggggaccttgggaaggtcgctagacggttaacaacatacaccaggagcagaaacgtcacgcgtctgcgcgtagcggacccacatcagcgtctcagtgtctga

SEQ ID NO: 6714 - DNA, 854 bp, Homo sapiens
  SIMILAR (203)..(30): 501254mologous to Rattus norvegicus developmentally regulated protein,accession number L20319,Smith-Waterman Score=158.
cccgggtcgacccacgcgtccgggggtttctgggtggggggccaacagagtggtgtcagtttcagccccagatagaggagtacgcaggcccagcatgaggcaaccttgacccagaaggtggcccagctatccttgatgaaggtcttttccagttctgctccctcatagctgtgtaaccaaaggctctggttagagaatatgaagggccttagcttttagacctgttctacctcctcaccaaatataatggcagacccatgtgtgtctggaatggccttgaattgctctttccttaaaatagctagctcttcaggagagtatctaaggcccactccatcttacctgaaccaggtggtaagggtaaccatgacatagagtgaggcaaggaagaagacgaagtggaacggcacgaatagttgtaggaaacgatgctggacttggacttggaggaagctggaggggtttcttggtcagctggcctcgcagccccacccctttgccctggagagaggaaatggctgctgggagcagagctgcttgaaacacctcttccccctctcccccaactacctttgttaaggctcttgagggttcttatggcactccacagagatctaccacttcttatggttcctcacttggcactccacctttgtctgcctccactgtttcagggcagcagaaacacagtgaagggcttcttgcaaaacagaacgcaggttttggaatggtcttaaaagatgtgagggtgttaatctaggaaacttaccccgtgaaaagattggtctagtattaaaaagtggaggcacacctgggttcaaattctatctccatcattataagggctgggcggg

SEQ ID NO: 6715 - DNA, 707 bp, Homo sapiens
  SIMILAR (545)..(706): 561254mologous to Homo sapiens Human signal peptide containing protein HSPP-104 SEQ ID NO:104,accession number Y87327,Smith-Waterman Score=120.
gtggggacacaaaattgtgactgaaaccctgtaatgtctcaagtatgatattaagtcttttagatggcaggcctgatttttacagctacatagttcacctagccatgagaagtgataacaaaacatgtaaactagaatacctttcccagagggccaccagaagcaccggctcctctgcccagaaaatcctaatcagtgtatatacagctagcaccagctgtacatcatcttttttaaaagccaaaggggtgcagagggatcacgttgagaagctatccctggaggaactctgctccttgcaccttctgctaccaggcctcagcccccagacactccaggccatccctaggcgagtcctggtcggggcttgttcctgcctggcccctgaactgtcacgcctctcagcctgccagaccgcagcactgctgcagacctttcggaagccctcactgtgtttctgctgccctgaaacagtggaggcagacaaagggcaaaggggtggggctgcgaggccagctgaccaagaaacccctccagctcctccagtccaagtccagcatctttcctacaactattctgccttccacttcgtcttcttccttgcctcactctatgtcatggttacccttaccaactggttcagggactcggagatcatgcagcagaagcagaaaaaggcaaacgagaagaaggaggaacccaagtag

SEQ ID NO: 6716 - DNA, 779 bp, Homo sapiens
  SIMILAR (555)..(352): 601254mologous to Mus musculus small EDRK-rich factor 2,accession number AF073297,Smith-Waterman Score=159.
aaaactttttttttttttttttttggaaattacaaaagctactttttaaatactttggggttgagcccccacagggaattaaaaaaacactgggaaaaggttaaacccccttcacccccccgggaaatggccccaagggggaagagaggcttaccttgaaggggaaaggaaagcacccaaaaagggaccccgctgccaaaactccagggccaaagggaaatgcccatcgggtgcctgggaacctgtgaagcaactaacaggaggaaaaagcgaagccgtggtgggaactggctccccaggcaacacagggcgaagggcaacgagggttggacactgaagccacaaaagctacttggggttcctccttctttctcgttttgccttttttctggcttcttgcttgcattgatctcccgagtcccttgggggtagagatgatggggcactctgcttgcgggcggcagcagaaagcccgtcatctcggcgctttcccttaaccgagtcgctctgcttttttcataattcttctgggcgggcgagctcacgctggttaccgcccgggagggtggtcccgtgaagtagccgtgggcaaagggctcgatttccgggcaccgagtgtgagggtggccacagagcgcgcccagagaaacgccttgctagggaagctacggaaggtcaaagccggcgcctcgccggtggtgtttagggtgaacggaaagaaaagggcaaggagaagggctcgtgccgagttcctgcaggcgggtcaattgtgggggcgc

SEQ ID NO: 6717 - DNA, 605 bp, Homo sapiens
  SIMILAR (539)..(571): 1001254mologous to Homo sapiens alcohol dehydrogenase 6,accession number M84409,Smith-Waterman Score=64.
  misc_feature (1)...(605): n = a,t,c or g
agtgtggagaatgtacctcttgcctgaattctgagggcaatttttgtatacaattcaaacagtcaaaaacccaactgatgtctgatggtaccagcaggtttacctnnaagggaaaatcaatatatcactttggtaataccagcaccttctgtgaatacacaatgataaaggaaatctcagttgccaagattgatgcagtcgctcctctagagaaagtatgcctaattagctgtggcttttccactgggtttggtgctgcaatcaatactgccaaggtgactccaggttctacctgtgctgtgtttggcctgggaggagtcggcttgtctgttgtcatgggttgtaaagcagcaggagcagccaggatcattggaagtggatgtcaacaaggagaaatttaagaaggcacaggaattgggtgctactgagtgcctcaaccctcaggacttaaagaaacccattcaagaagttttatttgatatgacagatgctggtatagacttctgctttgagggccattggaaatctggacgttccgggctggaagagcagacagcacatccctaaactgggttggctgattatatggccgagaaantggatcc

SEQ ID NO: 6718 - DNA, 870 bp, Homo sapiens
  SIMILAR (750)..(4): 741254mologous to Homo sapiens p40,accession number U93564,Smith-Waterman Score=858.
ttacattttggcatgattttgcagcggctggtagcggttgttcctttccatgtttagcgcttccttcaggagctctcttagggcaggcctggtggtgacaaaatctctcagcatttgcttgtctgcaaagtattttatttctccttcgcttatgaagcttagtttggctggatatgaaattctgggttgaaaattcttttctttaagaatgttgaatattggcccccactctcttctggcttgtagggtttctgccgagagatccactgttagtctgatgggctcccctttgagggtaacccgacctttctctctggctgcccttaacattttttccttcatttcaactttggtgaatctgacaattatgtgtcttggagttgctcttctcgaggagtatctttgtagcgttctctgtatttcctgaatctgaacattggcctgccttgctagattggggaagttctcctggataatatcctgcagagtgttttccaacttggttccattctccccatccctttcttccagttgatcgcatcggctcctgaggcttctgcattcttcacgtagttctcgagccttggttttcagctccatcagctcctttaagcacttctctgtattggttattctagttatacattcttctaaacctttttcaaagttttcaacttctttgcctttggtttgaatgtcctcccgtagctcagagtaatttgatcgtctgaagccttcttctctgagctcgtcaaagtcattctccatccagctttgttccgttgctggtgaggaactgcgttcctttggaggaggagagtcgctctgctttttagagtttccattttttctgttctgttttttccccat

SEQ ID NO: 6719 - DNA, 1410 bp, Homo sapiens; identical to SEQ ID NO: 4326
  SIMILAR (64)..(1398): 761254mologous to Homo sapiens putative p150,accession number U93572,Smith-Waterman Score=1655.

SEQ ID NO: 6720 - DNA, 1836 bp, Homo sapiens
  SIMILAR (1337)..(1564): 731254mologous to Homo sapiens putative p150,accession number U93563,Smith-Waterman Score=286.
atggagaatggctttgacgagttgagagaagaaggcttcagacgatcaaactactccgagctacaggaggaaattcaaaccaaaggcaaagaagttaaaaacattgaaaaaaatttagatgaatgtataactagaatacccaatacagagaagtgcttaaagaagctgatggagctgaaaaccaaggctcgagaactacgtgaagaatgcataagcctcaggagccgatgcgaccaactggaagaaagcgtatcagtgatggaagatgaaatgcatgaaatgaagcgagaagggaagtttagagaaaaaagaataaaaagaaatgaacaaagcctccaagaaatatgggactatgtgaaaagaccaaatctacgtctgattggtgtacctgaagacagatcaatgagacagaaagttaacaaggatacccaggaattgaactcagctctgcaccaagcggacctaatagacatctacagaactctccaccccaaatcaacagaatatacatttttttcagcaccacaccacacctattccaaaattgaccacatagttggaagtaaagctctcctcagcaaatgtaaaagaacagaaattataacaaactatctctcagaccacagtgcaatcaaactagaactcaagattaagaagctcactcaaaacttctcaactacatggaaactgaacaacctgctcctgaatgactactgggtacataacaaaatgaaggcagaaataaagatgttctttgaaaccaacgagaacaaagacacaacttaccagaatctctgggacacattcaaagcagtgtgtagagggaaatttatagcactaaatgcctacaagagaaagcaggaaagatccaaaattgacaccctaacatcacaattaaaagaactagaaaagcaagagcaaacacattcaaaagctagcagaaggcaagaaataactaaaatcagagcagaactgaaggaaatagagacacaaaaaacccttcaaaaaattaatgaatccaggagctggttttttgaaaggatcaacaaaattgatagaccgctagcaagactaataaagaaaaaaagagagaagaatcaaatagacgcaataaaaaatgacaaaggggatatcaccaccgatcccacagaaatacaaactaccatcagagaatactacaaacacctctacacaaataaactagaaaatctagaagaaatggataaattcctcgacacatacaccctcccaagactaaaccaggaagaagtggaatctctgaatagaccaataacaggatctgaaattgtggcaataatccatagcttaccaaccaaaaagagtccaggaccagatggattcacagcccaattctaccagaggtacaaggaggaactgaataaaatacctaggaatccaacttacaagggatgtgaaggacctcttcaaggacaactacaaaccactgctcaaggaaataaaagaggatacaaagaaatggaagaacattccatgctcatgggtaggaagaatcaatatcgtgaaaatgggcatactgcccaagcctctcggcttattggactgaaggcggaccatggtatgaatggaggctacaagcagcagttgacaagtgtttcaatacagattagcctaattttaaaggaatacaacacacaaaatatctccaaagcaaccatgaaaggtcagcaaactagtgtgcttgagcagctgactttagctatcgtaaaatccatttgcatttctgtgaagatacacttagaatataaaccccctaattttgagccagtaaacaaaacagtaaaagagatttactga

SEQ ID NO: 6721 - DNA, 1206 bp, Homo sapiens
  SIMILAR (462)..(61): 881254mologous to Homo sapiens putative p150,accession number U93572,Smith-Waterman Score=595.
tcaggtagtgtgatgcctccagctttgttcttttggcttaggattgacttggctatgcgggctcttttttggttccatatgaactttaaagtagtttttttccaattctatgaagaaagtcattggtagcttgatggggatggcattgaatctataaattaccttgggcagtatggccattttcatgatattgattcttcctacccatgagcatggaatgttcttccatttgtttgtatcctcttttatttcattgagcagcagtttgtagttctccttgaagaggtccttcacgtcccttgtaagttggattcctaggtattttattctctttgaagcaattgtgaatgtgagttcactcatgatttggctctctgtttgtctattatcagtgtataagaatgcttgtgatttttgtacattgattttgtatcctgagactttgctgaagttgcttatcagcagttcctccttgtacctctggtagaatttggctgtgaatccatctggtcctggactctttttggttggtaagctattgactattgccacaatttcagagcctgttattggtctattcagagagtcaacttcttcctggtttagtcttgggagggtgtatgtgtcgaggaatttatccatttcttctagattttctagtttatttgcatagaggtgtttgtagtattttctgatggtagtttgtatttctgtgggatcggtggtgatatcccctttatcattttttattgcatctatttgattcttctctcttttcttctttactagtcttgctagtggtctatcaattttgttgatcttcatttcattcatttcatcttccatcactgataccctttcttccagttgatcgcatcgcctcctgaggcttctgcattcttcatgtatttctcgagtcttggctttcagctccatcagttcctttaagcaattctctgtattggttattctagttatacattcatctaaatttttttcaaagttttcatcttctttgcctttggtttgaatttcctcctgtagctcggagtagtttgatcttctgaagccttcttctctcaactcatcaaagtcattctccatccagctttgttccattgctggtgaggaactgcgttcctttggaggaggagaggtgctctgctttttagagtttccagtttttctactctgttttttccccat

SEQ ID NO: 6722 - DNA, 1710 bp, Homo sapiens
  SIMILAR (393)..(34): 741254mologous to Homo sapiens putative p150,accession number U93572,Smith-Waterman Score=432.
ttaatcgtgcttgttttccccttgcattttctgatgctttgacatcttactgtccttgctgacattggaggaattgcccttccctggaatagctaattccttgtagattctggatattagacctttgtcagatggatagattacaaaaatgctctcccgttctgtaggttgcctgtacactctgatgatagtttcttttgctgtgcagaagctctttagtttaattagatcccatttgtcaattttggcttttgttgccattgcttttggtgttttagtcatgaagtctttgtccatgactatgtcctgaatggtattacctaggttttcttctagggtttttatggttttaggttttacatttaaatctttaatccatcttgagttaatttctagtttattgagtgtttttagcatgaagcgatgttcagttttattgaaggccttttctgcatctattgagataatcatgtggtttttgtcgttggttctttggtctttgctgttgatgagtttttccttcagatggagtttttgcatggtcatcctttttcttgatgttgatgctattgctttctgtttgttagttttccttagaacagtcaggcacttctgcaggtctcctgaagtttgctgggggtccattccagaccctgtttgcctgggtatcaccagcagaggcttgggcagtatggccattttcacgatattgattcttcctacccatgagcatggaatgttcttccatttgtttgtatcctcttttatttcattgcgcagtggtttgtagttctccttgaagaggtccttcacatcccttgtaagttggattcctaggtattttattctctgcaagtcacaggggatgcgatggcttggcttgggctcagaggcctgatattcctgccttcttatattaataagaaaaataacacaaaatagtgttgaagtgttggggcggcgaaaatttttgggcggtggtatggagagagaatgggtgatgtttctcagggctgcttcaagcgggattaggggcagcgtgggaaccaatttcaaatccgagtcacggcaccaaatttcatgtgcgtctgtgtgaagagaccaccaaacaggctttgtgtgagcaataaagctgtttatttcacctgggtgcaggtaggctttcagatttttgaaaagcctgaacccattgaagagatatgcaaggtatgttggaggccgatggcttagagaggattgggcctttgagaggctaaggtaagcttttatttgaattgatattctaatacaaagagttagatgctcagttattaaatcaaattctggattagcctgatgagaatggagtttttttaataagcaatcttccagttgatcgcatcggctcctgaggcttctgcattcttcacatagttctcgagccttggttttcagctccatcagctcctttaagcacttctctgtattggttattctagttatacattcttctaaatttctttcaaagttttcaacttctttgcctttggtttgaatgtcctcccgtagctcagagtaatttgatcgtctgaagccttcttctctcagctcgtcaaagtcattctccatccagcttttttccgttgctggtgaggaactgcgttcctttggaggaggagaggtgctctgctttttagagtttccagtttttctgttctgttttttccccat

SEQ ID NO: 6723 - DNA, 2796 bp, Homo sapiens
  SIMILAR (283)..(1662): 581254mologous to Mus musculus endonuclease/reverse transcriptase,accession number AF016099,Smith-Waterman Score=1421.
atggagaatgactttgatgagttgagagaagaaggcttcagacgatcaaactactccgagctacaggaggaaattcaaaccaaaggcaaagaagttgaaaactttgaaaaaaatttagatgaatgtataactagaataaccaatacagagaagtgcttaaaggagctgatggagctgaaagccaaggctcgagaactacgtgaacaatgcagaagcctgaggagcctatgcgatcaactggaagaaagggtatcagtgatggaagatgaaatgaatgaaatgaaacacagactggcaaattggataaagagtcaagacccatcagtgtgctgtattcaggaagcctatctcacatgcagagacacacataggctcaaaataaaaggatggaggaagatctaccaagcaaatggaaaacaaaaaaaggcaggggttgcaatcctagtctctgataaaacagactttaaaccaacaaagatcaaaagagacaaagaaggcctttacataatggtaaagggatcaattccacgagaagagctaactatcctaaatatatatgcacccaatccagaagcacccagattcacaaagcaagtcctgagtgacctacaaagagacgtagactcccacacaataatactgggagactttaacaccccactgtcagcattagacagatcaatgagacagaaagttaacaaggatacccaggaattgaactcagctctgcaccaagcggacctaatagacatctacagaactctccacccaaaatcaacagaatatacatttttttcagcaccacaccacacctattccaaaattgaccacagagttggaagtaaagctcttctcagcaaatgtaaaagatcagaaattataacaaactgtctctcagaccacagtgcaatcaaactagaactcaggattaagaaactcactcaaaactgctcaactacatggaaactgaacaacctgctcctgaatgactactgggtacataacgaaatgaaggcagaaataaagatgttctttgaaaccaatgagaacaaagacacaacataccataatctctgggacacattcaaagcagtgtgtagagggaaatttatagcactaaatgcccacaagagaaagcaggaaagatccaaaattgacaccctaacatcacaattaaaagaactagaaaagcaagagcaaacacattcaaaagctagcagaaggcaagaaataactaaaatcagagcagaactgaaggaaatagagacacaaaaaacccttcaaaaaattaatgaatccaggagctggttttttaaaaagatcaacaaaattgatagaccgctagcaagactcataaagaagaaaagagagaagaatcaattagactcaataaaaaatgataaaggggatatcaccacctatcccacagaaatacaaactacaatcagagaatactacaaacacctctacacaaataaactagaaaatctagaaaaaatggataaattcctcgacacatacaccctcccaagactaaaccaggaagaagttgaatctctgaatagaccaataacaggatctgaaattgtggcactaatcaatagcttaccaaccaaaaagagtccaggaccagatggattcacagccgaattctaccagagcatcatcctgataccaaagccgggcagagacacaaccaaaaaagagaattttagaccaatctccttgatgaacattgatgcaaaaatcctcaataaaatactggcaaaccgaatccagcagcacatcaaaaagcttatccaccatgatcaagtgggcttcattgctgggatgcaaggctggttcaatatatgcaaatcaataaatgtaatccagcatataaacagaaccaaagacaaaaaccacatgattatctcaatagatgcagaaaaggcctttgacaaaattcaacaacccttcatgctaaaaactctcaatgaattaagtattgatggaacgtatctcaaaataataagagctatctatgacaaacccacagccaatatcatactgaatgggcaaaaactggaagtattccctttgaaaactggcacaagacagggatgccctctctcaccactactattcaacatagtgttggaagttctggccatggcaattaggcaggagaaggaaataaagggtattcaattaggaaaagaggaagtcaaattgtccctttttgcagatgacatgattgtatatctagaaaaccccatcgtctcagcccaaaatctccttaagctgataagcaacttcagcaaagtctcaggatacaaaatcaatgtacaaaaatcacaagcattcttatacaccaataacagacaaacagagagccaaatcatgagtgaactcccattcacaattgctttaaagacaataaaatacctaggaatccaactgacaagggacgtgaaggaccttttcaaggagaactacaaaccactgcttaatgaaataaaagaggatacaaacaactggaagaacattcatgctcatggtgcagctgccccactcccacttggacacgatggccacagaacagttcctctgagagaccaattcccggagggcagcaacaagcttttggcagttgtcactaccactgcttctgcccctaccgtgcacagaccagcacagcttaggggacttgccctcctcagtgaaaggcttatagcctatagctgcccttccctggtgaacattttaactgcagcccagagaccttctgaaaacccaactcccacagacctgtga

SEQ ID NO: 6724 - DNA, 2784 bp, Homo sapiens
  SIMILAR (1518)..(4): 871254mologous to Homo sapiens putative p150,accession number U93563,Smith-Waterman Score=2247.
ttagttccatatgaactttaaagtagttttttccaattctgtgaagaaagtcattggtagcttgatggggatggcattgaatctgtaaattcccttgggcagtatggccattttcacaatattgattcttcctacccatgagcatggaatgttcttccatttgtttgtatcctcttttatttcctggagcagtggtttgtagttctccttgaagaggtccttcacatcccttgtaagttggattcctaggtattttattctctttgaagcaattgggaatgggagttcactcatgatttggctctctgtttgtctgttattggtgtataagaatgcttgtgatttttgtacattgattttgtatcctgagactttgctgaagttgcttatcagcttaaggagattttgggctgagacaatggggttttctagatatataatcatgtcatctgcaaacagggacaatttgacttcctcttttcctaattgaataccctttatttccttctcctgcctaattgccctggccagaacttccaacactatgttgaataggagtggtgagagagggcatccctgtcttgtgccagttttcaaagggaatgcttccagtttttgcccattcagtatgatattggctgtgggtttgtcatagatagctcttattattttgaaatacgtcccatcaatacctaatttattgagagtttttagcatgaagggttgttgaattttgtcaaaggctttttctgcatctattgagataatcatgtggtttttgtcttttgctctgtttatatgctggattacatttattgatttgcgtatattgaaccagccttgcatcccagggatgaagcccacttgatcatgggggataagctttttgatgtgctgctggattcgttttgctagtattttattgaggatttttgcatcaatgttcatcaaggatattggtctaaaattctctttttttgttgtgtctctgcctggctttggtatcagaatgatgctggcctcataaaatgagttagggaggattccctctttttctattgattggaatagtttcagaaggaatggtaccagttcctccttgtacctctggtagaattcggctgtgaatccatctggtcctggaatctttttggttggtaagctattgattattgccacaatttcagagcctgttattggtctattcagggattcaacttcttcctggtttagtcttgggagagtgtatgtgtccaggaatttatccatttcttctagattttctagtttatttgcatagaggtgtttgtagtattccctgatggtagtttgtatttcagctcctggattcattaattttttgaagggtttttttgtctctatttccttcagttctgctctgatattagttatttcttgccttctgctagcttttgaatgtgtttgctcttgcttttctagttcttttaattgtgatgttagggtgtcaattttggatctttcctgctttctcttgtgggcatttagtgctataaatttccctctacacactgctttgaatgcgtcccagagattctggtatgttgtgtctttgttctccttcgtttcaaagaacacctttatttctgccttcacttcgttatgtacccagtagtcattcaggagcaggttgttcagtttccatgtagttgagtggttttgagtgagattcttaatcctgagttctagtttgattgcactgtggtctgagagatagtttgttataatttctgttcttttacatttgctgaggagagctttacttccaactatgtggtcaattttggaataggtgtggtgtggtgctgaaaaaaatgtatattctgttgatttggggtggagagctctgtagatgtctattaggtccgcttggtgcagagctgagttcaattcctgggtatccttcttgactttctgtctcgttgatgtgtctaatgttgacagtggggtgttaaagtctcccattattaatgtgtgggagtctaagtctctttgtaggtcactcaggacttgctttgtgaatcttggtgctcctgtattgggtgcatatatttttaggatagttagctcttcttgttgaattgatccctttaccattatgtaatggccttctttttctcttttgatctttgttggtttaaagtctttctctctggctgcccttaacattttttccttcatttccactttggtgaatctgacaattatgtgtcttggagttgctcttctcgaggagtatctttgtggcgttctctgtatttcctgaatctgaacgttggcctgccttgctagattggggaagttctcctggataatatcctgcagagtgttttccaacttggttccattctccccatcattcatttcattcatttcatcttccatcactgataccctttcttccagttgatcgcatcggctcctgaggcttctgcattcttcacgtagttctcgagccttggttttcagctccatcagctcctttaagcacttctctgtattggttattctagttatacattcttctaaatttttttcaaagttttcaacttctttgcctttggtttgaatgtcctcccgtagctcagagtaatttgatcgtctgaagccttcttctctcatctcgtcaaagtcattctccatccagctttgttccgttgctggtgaggaactgcgttcctttggaggaggagaggcgctctgctttttagagtttccagtttttctgttctgttttttccccat

SEQ ID NO: 6725 - DNA, 550 bp, Homo sapiens
  SIMILAR (1)..(348): 931254mologous to Homo sapiens p40,accession number U93564,Smith-Waterman Score=571.
atggggaaaaaacagaacagaaaaactggaaactctaaaaagcagagcacctctcctcctccaaaggaacgcagttcctcaccagcaacggaaaaaagctggatggagaatgactttgacgagctgagagaagaaggcttcagacgatcaaattactctgagctacgggaggacattcaaaccaaaggcaaagaagttgaaaactttgaaagaaatttagaagaatgtataactagaataaccaatacagagaagtgcttaaaggagctgatggagctgaaaaccaaggctcgagaactatgtgaagaatgcagaagcctcaggagccgatgcgatcaactggaagattgcttattaaaaaaactccattctcatcaggctaatccagaatttgatttaataactgagcatctaactctttgtattagaatatcaattcaaataaaagcttaccttagcctctcaaaggcccaatcctctctaagccatcggcctccaacataccttgcatatctcttcaatgggttcaggcttttcaaaaatctgaaag

SEQ ID NO: 6726 - DNA, 1661 bp, Homo sapiens
  SIMILAR (1379)..(3): 921254mologous to Homo sapiens putative p150,accession number U93569,Smith-Waterman Score=2216.
ctctggtagaattcggctgtgaatccatctggtcctggactctttttggttggtaagctattgattagtgccacaatttcagatcctgttattggtctattcagagattcaacttcttcctggtttagtcttgggagggtgtatgtgtcgaggaatttatccattttttctagattttctagtttatttgtgtagaggtgtttgtagtattctctgattgtagtttgtatttctgtgggataggtggtgatatcccctttatcattttttattgagtctaattgattcttctctcttttcttctttatgagtcttgctagcggtctatcaattttgttgatctttttaaaaaaccagctcctggattcattaattttttgaagggttttttgtgtctctatttccttcagttctgctctgattttagttatttcttgccttctgctagcttttgaatgtgtttgctcttgcttttctagttcttttaattgtgatgttagggtgtcaattttggatctttcctgctttctcttgtgggcatttagtgctataaatttccctctacacactgctttgaatgtgtcccagagattatggtatgttgtgtctttgttctcattggtttcaaagaacatctttatttctgccttcatttcgttatgtacccagtagtcattcaggagcaggttgttcagtttccatgtagttgagcagttttgagtgagtttcttaatcctgagttctagtttgattgcactgtggtctgagagacagtttgttataatttctgatcttttacatttgctgagaagagctttacttccaactctgtggtcaattttggaataggtgtggtgtggtgctgaaaaaaatgtatattctgttgattttgggtggagagttctgtagatgtctattaggtccgcttggtgcagagctgagttcaattcctgggtatccttgttaactttctgtctcattgatctgtctaatgctgacagtggggtgttaaagtctcccagtattattgtgtgggagtctacgtctctttgtaggtcactcaggacttgctttgtgaatctgggtgcttctggattgggtgcatatatatttaggatagttagctcttctcgtggaattgatccctttaccattatgtaaaggccttctttgtctcttttgatctttgttggtttaaagtctgttttatcagagactaggattgcaacccctgcctttttttgttttccatttgcttggtagatcttcctccatccttttattttgagcctatgtgtgtctctgcatgtgagataggcttcctgaatacagcacactgatgggtcttgactctttatccaatttgccagtctgtgtttcatttcattcatttcatcttccatcactgataccctttcttccagttgatcgcataggctcctcaggcttctgcattgttcacgtagttctcgagccttggctttcagctccatcagctcctttaagcacttctctgtattggttattctagttatacattcatctaaatttttttcaaagttttcaacttctttgcctttggtttgaatttcctcctgtagctcggagtagtttgatcgtctgaagccttcttctctcaactcatcaaagtcattctccat

SEQ ID NO: 6727 - DNA, 2094 bp, Homo sapiens
  SIMILAR (310)..(1629): 851254mologous to Homo sapiens putative p150,accession number U93563,Smith-Waterman Score=1914.
atggggaaaaaacggagcagaaaaactggaaactctaaagagcagagcgcctctcctccaaaggaacccagctccttaccagcaatggaacaaagctggatggagaatgactttgacgagttgagagaagaaggcttcagacgatcaaactactctgagctacaggaggaaattcaaaccaaagacgaagaagttgaaaactttgaaaaaaatttagatgaatgtataactagaagaaccaatacggagaagtgcttaaaggaggtgatggagctgaaagccaaggctcgagaactacctgaagaatgcagaagcctaaggagccgatgcgatcaactggaagaaagggtatcagtgatggaagatgaaatgaatgaaatgaatgcaatcaaactagaactcaggattaagaaactcactcgaaactgctcaactacatggaaactgaacaacctgctcctgaatgactactgggtacataacgaaaagaaggcagaaataaacatcttctttgaaaccaacgagaacaaagacacaacataccagaatctctgggacgcattcaaagcagtgtgtagagggaaatttatagcactaaatgcccacaagagaaagcaggaaagatccaaaattgacaccctaacatcacaattaaaagaactagaaaagcaagagcaaacatattcaaaagctagcagaaggcaagaaataactaatatcagagcagaactgaaggaaatagagacacaaaaaacccttcaaaaaattaatgaatccaggagctggttttttgaaaggatcaacaaaattgatagaccactagcaagactaataaagaagaaaagagagaagaatcaaatagacgcaataaaaaatgataaaggggatatcaccaccgatcccaccgaaatacaaactaccgtcagagaataccacaaacacctctatgcaaataaactagaaaatctagaagaaatggataaattcctcgacacatacaccctcccaagactaaaccaggaagaagttgaatctctgaatagaccagtaacaggctctgaaattgtggcaataatcaatagcttaccaaccaaaaagcgtccaggaccagatggattcacagccgaattctaccagaggtacaaggaggaactggtaccattccttctgaaactattccaatcaatagaaaaagagggaatcctccctaactcattttatgaggccagcatcatcctgataccaaagccgggcagagacacaaccaaaaaagagaattttagatcaatatccttgatgaacattgatgcaaaaatcctcaataaaatactggcaaacagaatccagcagcacatcaaaaagcttatccaccatgatcaagtgggcttcatccctgggatgcaaggctcgttcaatatacgcaaatcaataaatgtaatccagcatataaacagaaacaaagacaaaaaccacacgattatctcaatagatgcagaaaaggcctttgacaaaattcaacaacccttcatgctaaaaactctcaataaattagtgttggaagttctggccagggcaatcaggcaggagaaggaagtaaagggtattgaattaggaaaagaggaagtcaaattgtcccagtttgcagaagacatgattgtatatctagaaaaccccattgtctcagcccaaaatctccttaagctgataagcaacttcagcaaagtctcaggatacaaaattaatgtacaaaaatcacaagcattcttatacaccaataacagacaaacagagagccaaatcatgagtgaactcccattcacaattgcttcaaagagaataaaataccttggaatccaacttacaagggacgtgaaggacctcttcaaggagaactacaaaccactgctcaatgaaataaaagaggatacaaacaaatggaagaacattccatgctcacgggtagaaagaatcaatatcgtgaaaatggccatactgcccaaggtaatttatagattcaatgccatccccatcaagctaccaatgcctttcttcacagaattggaaaaaactactttaaagttcatatggaactaa

SEQ ID NO: 6728 - DNA, 1458 bp, Homo sapiens
  SIMILAR (898)..(1452): 901254mologous to Homo sapiens putative p150,accession number U93572,Smith-Waterman Score=830.
atgcagagtgcctctcctcctccaaaggaactcagttcctcactagcaatggagcaaagctggacggagaatgactttgatgagctgagagaagaagtcttcagacgatcaaattactccgagctacgggaggaaattcaaaccaaaggcaaagaagttgaaaactttgaaaaaagtttagaagaatatataactagaataaccaatacagagaagtgcttaaaggagctgatggagctgaaaaccaaggctcgagaactacgtgaagaatgcagaagcctcaggagcagatgcgatcaactggaagaaagggtatcagtgatggaagatgaagtgaatgaaatgaagcgagaagggaagtttagagaaaaaagaagcaagcaaagcctccaagaaatatgggactatgtgaaaagaccaaatctacatctcattggtgtacctgaaagtgatggggagaatggaaccaagttggaaaacactctgcaggatattatccaggagaacttccccaatctagcaggcaggccaactccatatctggtgcttttcagtcgtctgggaaattatcctgcccagtggctggatgagtctctggcgcgtggcgaattaatggaatactgggcgcatgaagcctgctttatgccgcgtagcgactttcgtcttattcgccaccgcatgctggcacctgaaaaaatgggctggaaatacaaagacgcctggatgcaggaacatgaggcggaaattgcacagttaattcagcatattcatgataaggggccgatccaagattttcccatggggctacgtctagatttgacacaagttatttctctaatggccaaggttttgaggttacgctctaagaaaggaaagcattattctgtaggaaccaatgacaaaagccacatgattatctcaatagatgcaaaaaaggccttccacaaaatccaacagcctttcatgctaaaaactctcaataaactaggtattgatggaacatacctcaaaataataagagctatttatgacaaacccacagccagtatcatactgaatgggcaaaagctggaagcattccctttgaaaactagcacaagacaagaatgccctctctcaccactcctattcaacacagtgttggaagctctggccagcgcaatcaggcaagagaaagaaataaagcgtattcaattaggaaaagaggaagtcaaattgttcctgtttgcagatgacatgattgtatatttagaaaaccccattgtctcagcccaaaatctccttgagctgctaaacaacttcagcaaagtctcaggatacaaaatcaatgtgcaaaaatcacaagcattcctatacaccattaacagacaaacagagagccaaatcatgagtgaactcccattcacaattgctacaaagagaataaaatacctaggaatccaacttacaaggatgtga

SEQ ID NO: 6729 - DNA, 627 bp, Homo sapiens
  SIMILAR (1)..(369): 951254mologous to Homo sapiens p40,accession number U93564,Smith-Waterman Score=615.
atggggaaaaaacagaacagaaaaactggaaactctaaaacgcagagcgcctctcctcctccaaaggaacgcagttcctcaccagcaacagaacaaagctggatggagaatgattttgacgagctgagagaagaaggcttcagacgatcaaattactctgagctacgggaggacattcaaaccaaaggcaaagaagttgaaaactttgaaaaaaatttagaagaatgtataactagaataaccaatacagagaagtgcttaaaggagctgatggagctgaaaaccaaggctcgagaactacgtgaagaatgcagaagcctcaggagccgatgcgatcaactggaagaaaggatttctatagtagttgatggtggaaagaaggtggtggaatttatgtttcaagccacagagggagatgtgttgaactacatttttagaaatcgagaactccgtcctttgtttgatcgtcagtggcacaaacttggcattagtatacaatcccaggtcatttcactttatatggattgtaatttaattgcgaggaggcagactgatgaaaaggacactgtggatttccatggacggacagttattgctacgcgagcttcagatggcaagcctgtggat

SEQ ID NO: 6730 - DNA, 1296 bp, Homo sapiens
  SIMILAR (672)..(25): 981254mologous to Cloning vector pZC320 SopA,accession number U26464,Smith-Waterman Score=1118.
tcaaaaccagttctcatccgggttttgccctttaccaacttcatccgtttcacgtacaacattttttagaaccatgcttccccaggcatccggaatttgttcctccatccacggggactgagagccattactattgctgtattctgtaagcaaaatacgtacatcaggctcgaaccctttaagatcaacgttcttgagcagatcacgaagcatatcgaaaaactgcagtgcggaggtgtagtcaaacaactcagcaggcgtgggaacaatcagcacatcagcagcacatacgacattaatcgtgccgatacccaggttaggcgcgctgtcaataactatgacatcatagtcatgagcaacagtttcaatggccagtcggagcatcaggtgtggatcggtgggcagtttaccttcatcaaatttgcccattaactcagtttcaatacggtgcagagccagacaggaaggaataatgtcaagccccggccagcaagtgggctttattgcataagtgacatcgtccttttccccaagatagaaaggcaggagagtgtcttctgcatgaatatgaagatctggtacccatccgtgatacattgaggctgttccctgggggtcgttaccttccacgagcaaaacacgtagccccttcagagccagatctttttctaattggttataggcagtgccagaaataagccttgctagattggggaagttctcctggataatatcctgcagcgtgttttccaacttgcttccattctccccatcactttcaggtacacccatcagatgtagatttggtcttttcacatagtcccatatttcttggaggctttgctcatttctttttattcttttttctctaaacttcccttctcgcttcatttcattcatttcatcttccattgctgataccctttcttccagttgatcgcatcggctcctgaggcttctacattcttcatgtagttctcgagccttggttttcagctccatcagctcctttaagcacttctctgtattggttattctagtcatacattcttctaaatttttttcaaagttttcaacttctttgcctttggtttgaatgtcctcctgtagctcagagtaatttgatcgtctgaagccttcttctctcagggggatcttgcaagtgcagggctgacaggaatccacgaggacggcttctgttgctggagaggcttcacgaagtttccaatcaaggcgacaggtgatgggtagccagcatatcccatagcaggagcaagcataaggtgaaagtgccat

SEQ ID NO: 6731 - DNA, 895 bp, Homo sapiens
  SIMILAR (895)..(155): 881254mologous to Homo sapiens p40,accession number U93570,Smith-Waterman Score=1121.
cttgtggttttatgttatggagacaccttctttccttaaacgtcatgaaccgatctctgccagtttcaaactttccttctgcagcttcctcacctctttcaggctttacagaattgatgagagttaaagccttactctggattaggctttggtttaagggaatattgtggctagttagatcttctttctctctggctgcccttaacattttttccttcatttcaactttggtgaatctgacaattatgtgtcttggagttgctcttctcgaggagtatctttgtggcattctctgtatttcctgaatctgaatgttggcctgccttgctagattggggaagttctcctggataatatcctgcagagtgttttccaacttggttccattctccccgtcactttcaggtacaccaatcagacgtagatttggtcttttcacatagtcccatatttcttggaggctttgttcgtttctttttattcttttttctctaaacttcccttctcgcttcatttcattcatttcatcttccatcactgataccctttcttccagttgatcacatcggcccctgaggcctctgcattcttcatgtagttctcgagccttggctttcagctccatcggctcctttaagcacttcactgtattggttattgtagttatacattcatctaaatttttttcaaagtttttaacttctttgcctttggtttgaatttcctcctgtagctcggagtagtttgatcgtctgaagccttcttctctcaactcgtcaaagtcattctccgtccagctttgttctgttgctggtgaggaactgcattcctttggaggaggagaggcactctgctttttagagtttccagtttttctgctctgttttttccccat

SEQ ID NO: 6732 - DNA, 3570 bp, Homo sapiens; identical to SEQ ID NO: 2157
  SIMILAR (790)..(2313): 951254mologous to Homo sapiens putative p150,accession number U93572,Smith-Waterman Score=2493.

SEQ ID NO: 6733 - DNA, 1464 bp, Homo sapiens
  SIMILAR (1443)..(4): 771254mologous to Homo sapiens putative p150,accession number U93572,Smith-Waterman Score=1795.
ctataatttcacgatattgattattcctacccatgagcatggaatgttcttccatttgtttatatcctcttttatttccttgagcagtggtttgtagttctccttgaagaggtccttcacgtcccttgtaagttggattcctaggtattttattctctttgaagcaattgtgaatgggagttcactcatgatttggctctctgtttgtctgttattggtgtttaagaatgcttgtgatttttgtacattgattttgtatcctgagactttcctgaagttgctttccagcttaaggagattttgggctgagacagtggggttttctagatatacaatcatgtcatctgcaaacagggacaatttgacttcctcttttcctaattgaatacactttatttccttctcctgcctaattgccctggccagaacttccaacactatgttgaataggagtggtgagagagggcatccctgtcttgtgccagttttcaaagggaatgcttccagtttttgcccattcagtatgatattggctgtgggtttgtcatagacagctcttattattttgagatatgtcccatcaatacctaatttattgagagtttttagcatgaagcgttgttggattttgtcaaaggccttttctgcatctattgagataatcatgcggtttttgtctttggttctctttatatgctggattacatttattgatttgtgtatattgaaccagccttgaatcccagggatgaagcccacttgatcatggtggataagctttttgatgtgctgctggattcggtttgccagtattttattgaggatttttgcatcaatgttcatcaaggatattggtctaaaattctcttttttggttgtgtctctgcccagctttggtatcaggatgatgctgccctcataaaatgagttagggaggattccctctttttctattgattggaatagtttcagaaggaatggtaccagttcccccttgtacctctggtagaattcggctgtgaatccatctggtcctggactctttttggttggtaagctattgattattgccacaatttcagagcctgttattggtctattcagagattcaacttcttccctttcttccagttgatcgcatcggctcctgaggcttctgcattcttcacgtagttctcgagccttggttttcagctccatcagctcctttaagcacttctctgtattgattattctagttatactttcatctaaatttttttcaaagtttttaacttcttccccttcggtttgaatttcctcctgtagcttggagtagtttgatcgtctgaagccttcttctctcaactcgtcaaagtcattctcagtccagctttgttccgttgctggtgaggaactgtgttccacctccccatttcccatcctctctgcattttgccttcggtcttctgtggctcccctcat

SEQ ID NO: 6734 - DNA, 594 bp, Homo sapiens
  SIMILAR (331)..(594): 971254mologous to Homo sapiens alcohol dehydrogenase 6,accession number M84409,Smith-Waterman Score=441.
atggagaatgacttcggtgaattgagagaagaaggcttcagacgatcaaaccactctgagctacaggaggaaattcaaaccaaaggcaaagaagttgaaaacattgaaaaaaatttagatgaatgtataactagaataaccaatacagagaagtgcttaaaggagctaatggagctgaaagccaaggctcgagtactacatgaagaatgcagaagcctcaggagccgatgcgatcaactggaagaaaggacaaccacatgccaggcagccagttctctttcaattgaagaaatgcaagttgagcctctaaaggctgggggagtttgtattaaggtgactccaggttctacctgtgctgtgtctggcctgggaggagtcggcttgtctgttgtcatgggttgtaaagcagcaggagcagccaggatcattggagtggatgtcaacaaggagaaatttaagaaggcacaggaattgggtgctactgagtgcctcgaccctcaggacttaaagaaacccattcaagaagttttatttgatatgacagatgctggtatagacttctgctttgaggccattggaaatctggacgttctg

SEQ ID NO: 6735 - DNA, 1425 bp, Homo sapiens
  SIMILAR (157)..(1230): 721254mologous to Homo sapiens putative p150,accession number U93569,Smith-Waterman Score=1259.
atggggaaaaaacagagcagaaaaactggaaactctaaaaggcagagcgcctctcctcctccaaaggaacgcagttcctcaccagcaatggaacaaagctggatggagaatgactttgacgagctgagagaagaaggcttcagacgaacaaactactctgagctacaggagggaattcaaaccaaaggcaaagaagttaaaaactttgaaaaaaatttagacgaatgtataactagaataaccaatacagagaagtgcttaaaggagctgatggagctgaaagccaaggctcgagaactacgtgaagaatgcagaagcctcaggagccgatgcgatcaactggaagaaaggcaccacaccacacctattccaaaattgaccacatacttggaagtaaagctctccccagcaaatgtaaaagaacaagttataacaaactgtctctcagaccacagtgcaatcaaactagaactcaggattaagaaacccactcaaaacccctcaactacatggaaactgaacaacctgctcctgaatgactactgggtaaataaagaaatgaagtcagaaataaagatgttctttgaaaccaacgagaacaaaaacacaacataccagaatctctgggacgcattcaaagcagtgtgtagaggcaaatttatagcactaaatgcccacaagggaaagcaggaaagatccaaaattgacaccctaacatcacaattaagagaactagaaaagcaagagcaaacacattcaaaagttagcagaaggcaagaaataactaaaatcagagcagaaccgaaggaaatagagacacaaaaaacccttcaaaaaattaatgaatccaggagctggttttttgaaaggatcaacaaaattgatagacggctagcaagactaataaagaagaaaagagagaagaatcagagagacgcaataaaaaatgatgaaggggatatcaccaccgatcccacagaaatacaaactaccatcagagaatactacaaacacctctatgcaaataaactagaaaatctaaaagaaatggataaattcctcaacacatacaccctcccaagactaaaccaggaagaagctgaatctctgaatagaccaatagcaggctctgaaattgtggcaataattaatagcttaccaaccaaaaagagtccaggaccagatggattcacagccgaattctaccagaggtacaaggagaaactggtatttggtgcaggttattttggaatgtgggccttggctgcacttcccagcaacttgctaaagctgtctcaactctgtcaggaggcagcagaagtgaacgtcctggtacaatttgtctgtatttgtcctgcacaggaacctaccgaaattgacgtgcttttttctgtgttaccccctctttcccttatcttaaactag

SEQ ID NO: 6736 - DNA, 1719 bp, Homo sapiens; identical to SEQ ID NO: 5398
  SIMILAR (1523)..(1717): 961254mologous to Homo sapiens putative p150,accession number U93569,Smith-Waterman Score=317.
  misc_feature (1)...(1719): n = a,t,c or g

SEQ ID NO: 6737 - DNA, 1098 bp, Homo sapiens
  SIMILAR (100)..(1095): 531254mologous to Homo sapiens p40,accession number U93564,Smith-Waterman Score=743.
atgagggaaaaacattcagaccctcataacattgttctggaatccaatataagggacaagcactcagaacccagcagcattgttccagaatcctatgtgagggacaaacactcagaacccagcagcagtgttctggaatcctatgtgagccacaaacattcagaacttcatagcagagttctggaatcttatgtgagggacaaacactcagaacccagcagcagtgttctggaatcctatgtgagggacaaacactcagaacccagcagcagtgttctggaatcctttgtgagggacaaacattcagaacctcatagcagtgttctggaatcgtatgaatgcagttcctcaccagcaatggaaaaaagctgggcggagaatgactttgacgagttgagagaaggcttcagacgatcaaactactctgagctacaggaggaaattcaaaccaaaggcaaagaagttaaaaactttgaaaaaaatttagacgaatgtatatctagaataaccaatacagagaagtgcttaaaggagctgatggagctgaaagccaaggctcgagaactacgtgaagaatgcagaagattcaggagccgatgtgatcaactggaagaaagggatattatccaggagaactcccccaatatagcaaggcaggccaacattcagattcaggaaatacagagaatgccacaaagatactccttgaaaagagcgattccaagacacataattgtcagattcaccatagctgaaatgaaggaaaaaatgttaagggcagccagagagaaaggtcgggttacccacaaagggaagcccatcagactaacagtggatctcttggcagaaactctagaagccagaagagagtgggggccaatattaaacattcttaaagaaaagaattttcaatgcagaatttcatatccagccaaactaagcttcataagtgaaggagaaataaaatactttacagacaagcaaatgctgagagattttgtcaccaccaggcctgccctaaaagagctcctgaaggaagcactaaacatgaaaaggaacaaccagtaccagccgctgcaaaatcatgccaaaatgtaa

SEQ ID NO: 6738 - DNA, 1782 bp, Homo sapiens
  SIMILAR (778)..(1782): 961254mologous to Homo sapiens putative p150,accession number U93569,Smith-Waterman Score=1671.
atgaagaagaaagcacttagctgtgtctgcagacatcctcctggaagagcagatgtgggccttggctgtcaaaggacaagaaatatttgcatagcaacattacaggaagagcaaattgtatgtgtaaaggctcagaacaatgagaaagcattgcacagattgagaaccacagaactcaggattaagaaactcattcaaaaccgcacaactacctggaaactgaacaatctgctcctgaatgactacggggtaaataacgaaatgaaggcagaaataaacaagttctttgaaaccaatgagaacaaagacacaacttccccagaatctctgggacacagggagaaagcaggagagatccaaattgacaccctagaacaaagctggacggagaatgactttgacaagttgagagaagaaggcttcagacgatcaaactattccgagctacaggaggaaattcaaaccaaaggcaaagaagttaaaaaccttgaaaaaaatttagatgaatgtataactaaaataaccaatacagagaagtgcttaaaggagctgacggagctgaaagccaaggctcgagaactatgtgaagaatgcagaagcctcaggagccgatgcgatcaactggaagaaagggtatcagtgatggaagatgaaatgaatgaaatgaagcgagaagggaagtttagagagaaaagaataaaaggagacgaacaaagcctccaagaaatatgggactatgtgaaaagaccaaatctatgtctgattggtgtacctgaagacagatcaatgagacagaaagttaacaaggatacccaggaattgaactcagctctgcaccaagcggacctaatagacatctacagaactctccaccccaaatcaacagaatatacatttttttcagcaccacaccacacctattccaaaattgaccacatagttggaagtaaagctctcctcagcaaatgtaaaagaacagaaattataacaaactatctctcagaccacagtgcaatcaaactagaactcaagattaagaagctcactcaaaacttctcaactacatggaaactgaacaacctgctcctgaatgactactgggtacataacaaaatgaaggcagaaataaagatgttctttgaaaccaacgagaacaaagacacaacttaccagaatctctgggacacattcaaagcagtgtgtagagggaaatttatagcactaaatgcctacaagagaaagcaggaaagatccaaaattgacaccctaacatcacaattaaaagaactagaaaagcaagagcaaacacattcaaaagctagcagaaggcaagaaataactaaaatcagagcagaactgaaggaaatagagacacaaaaaacccttcaaaaaattaatgaatccaggagctggttttttgaaaggatcaacaaaattgatagaccgctagcaagactaataaagaaaaaaagagagaagaatcaaatagacgcaataaaaaatgacaaaggggatatcaccaccgatcccacagaaatacaaactaccatcagagaatactacaaacacctctacacaaataaactagaaaatctagaagaaatggataaattcctcgacacatacaccctcccaagactaaaccaggaagaagtggaatctctgaatagaccaataacaggatctgaaattgtggcaataatccatagcttaccaaccaaaaagagtccaggaccagatggattcacagcccaattctaccagaggtacaaggaggaactg

SEQ ID NO: 6739 - DNA, 3339 bp, Homo sapiens
  SIMILAR (1381)..(1920): 631254mologous to Ornithorhynchus anatinus olfactory receptor pla24,accession number AF262724,Smith-Waterman Score=601.
atgggggtaggaccctctgatccaggtgtgggatatagtctcgtggtgcgccgttttttaagccggtctgaaaagcgcaatattcgcgtgggagtgacccgattttccagggattttgccgatttcggaaccaccatcaaacaggattttcgcctgctggggcaaaccagcgtggaccgcttgctgcaactctctcagggccaggcggtgaagggcaatcagctgttgcccgtctcactggtgaaaagaaaaaccaccctggcgcccaatacgcaaaccgcctctccccgcgcgttggccgattcattaatgcagctggcacgacaggtttcccgactggaaagcgggcaccggtctgaaaagcgcaatattcgcgtgggagtgacccgattttccagctgggtgaggcagcctttgagagagatggtagtgctcttggagagggtgtctacaatcaccttgggggcaacgacagatgagaacatgacatccaaaagggacaagaagggattttgccgatttcggacccaccatcaaacaggattttcgcctgctggggcaaaccagcgtggaccgcttgctgcaactctctcagggccaggcggtgaagggcaatcagctgttgcccgtctcactggtgaaaagaaaaaccaccttggcgcccaatacgcaaaccgcctctccccgcgcgttggccgattcattaatgcagctggcacgacaggtttcccgactggaaagcgggcagaagaattgcatgatgcatcctgtgaaggagatggttctgtcttccacaaccaagttctccagcagtttgggtgtaactgtggtggaataacagaaatcaacaaaggacaagtggctgaggaaaaagtacatgcgggtgtggagtttggggttgatcctgatgatcatgatcatgcccaggtttcccaatacagtgattgtgtagatgggccaggcggtgaagggcaatcagctgttgcccgtctcactggtgaaaagaaaaaccaccctggcgcccaatacgcaaaccgcctctccccgcgcgttggccgattcattaatgcagctggcacgacaggtttcccgactggaaagcgggcagtgagcgcaacgcaattaatggattttgccgatttcggaaccaccatcaaacaggattttcgcctgctggggcaaaccagcgtggaccgcttgctgcaactctctcagggccaggcggtgaagggcaatcagctgttgcccgtctcactggtgaaaagaaaaaccaccctggcgcccaatacgcaaaccgcctctccccgcgcgttggccgattcattaatgcagctggcacgacaggtttcccgactggaaagcgggcaccacttgtcctctgtagatttctgctactcctcaataattgtgccaaaaatgttggctaatatctttaacaaggacaaagccatctccttcctagggtgcatggtgcaattctacttgttttgcacttgtgtggtcactgaggtcttcctgctggccgtgatggcctatgaccgctttgtggccatctgtaaccctttgctatacacagtcaccatgtcttggaaggtgcgtgtggagctggcttcttgctgctacttctgtgggacggtgtgttctctgattcatttgtgcttagctcttaggatccccttctatagatctaatgtgattaaccactttttctgtgatctacctcctgtcttaagtcttgcttgctctgatatcactgtgaatgagacactgctgttcctggtggccactttgaatgagagtgttaccatcatgatcatcctcacctcctacctgctaattctcaccaccatcctgaagatgggctctgcagagggcaggcacaaagccttctccacctgtgcttcccacctcacagctatcacaccaaaagtagataaaaccacaaagatggggaaaaaacagaacagaaaaactggaaactctaaaaagcagagcgcctctccacctccaaaggaacgcagttcctcaccagcaacagaaaaaaggtggatggagaatgattttgacgagctgagagaagaaggcttcagacgatcaaattactctgagctacgggaggacattcaaaccaaaggcaaagaagttgaaaactttgaaaaaaatttagaagaatgtataactagaataacaaatacagagaagtgcttaaaggagctgatggagctgaaaaccaaggctcgagaactatgtgaagaatgcagaagcctcaggagccgatgcgatcaactggaagaaaggggattttgccgatttcggaaccaccatcaaacaggattttcgcctgctggggcaaaccagcgtggaccgcttgctgcaactctctcagggccaggcggtgaagggcaatcagctgttgcccgtctcactggtgaaaagaaaaaccaccctggcgcccaatacgcaaaccgcctctccccgcgcgttggccgattcattaatgcagctggcacgacaggtttcccgactggaaagcgggcagtgagcgcaacgcaattaatggattttgccgatttcggaaccaccatcaaacaggattttcgcctgctggggcaaaccagcgtggaccgcttgctgcaactctctcagggccaggcggtgaagggcaatcagctgttgcccgtctcactggtgaaaagaaaaaccaccctggcgcccaatacgcaaaccgcctctccccgcgcgttggccgattcattaatgcagctggcacgacaggtttcccgactggaaagcgggcaggattttgccgatttcggaaccaccatcaaacaggattttcgcctgctggggcaaaccagcgtggaccgcttgctgcaactctctcagggccaggcggtgaagggcaatcagctgttgcccgtctcactggtgaaaagaaaaaccaccctggcgcccaatacgcaaaccgcctctccccgcgcgttggccgattcattaatgcagctggcacgacaggtttcccgactggaaagcgggcatacaacaagctatgatgatggtgttacagctttgcttggtcgtgatgatggtgtagtgcaggtgcttgcagatggctatgtagtggtcataggccattgctttgagtatgaagatctcaatgtctccaaggaaaccagaagtctgaatcaaggtgctggcaggactctgctgcctctgaaggcagtggaggagaaactttccttgctccacggcttgtggcagcaaaacaccatttccctctgtctgcacatgactttcctccctgtgtgtcttcctgttgtcctttattatctcttataa

SEQ ID NO: 6740 - DNA, 5367 bp, Homo sapiens
  SIMILAR (2239)..(3933): 931254mologous to Homo sapiens putative p150,accession number U93564,Smith-Waterman Score=2789.
atgaggaaaaaacagagcagaaaaactggaaactctaaaaagcagagcacctctcctcctccaaaggaacgcagttcctcaccagcaatggaacaaagctggacggagaatgactttgacgagttgagagaagaaggtttcagacgatcaaactactccaagctacaggaggaaattgaaaccaaaggccaagaagttgaaaacttggaaaaaaatttagacaaatgtataactagaataaccaatatagagaagtgcttaaaggagctgatggagctgaaagccaaggctcgagaactacatgaagaatgcagaagcctcaggagccgatgcgatcaactggaagaaagggtatcagtaatggaagatgaaatgaatgaaatgaagcaagaagggaagtttagagaaaaaagaataaaaagaaatgaacaaagcctccaagaaatatgggactatgtgaaaagaccaaatctacctccgattgatgtacctgaaagtgacagggagaatggaaccaagttggaaaacactctgcaggatgttatccaggagaacttccccaacctagcaaggcaggccaacattcagattcaggaaatacagagaatgccacaaagatactcctcgagaagagcaactccaagacacataattgtcagattcaccaaagttgaaatgaaggaaaaaatgttgagggcagccagagagaaagcattcaagcaggcctcccggagagaagatgacattgccaaggtaaccagtggcatgagagttttattcaagccaggaaccacagaggtacaggagctggccctttgctatggtggaatggccaacagaaccatctcagccctcaagaccactcagaggcagctttccaagctctggaaggaggagctgctgcaggacgtgtgtgcaggactggcagaggagctgcatctgcctcccgatgcccctggtggcatggtggacttccggtgcaccctcaccctcagcttcttcttcaagttctacctgacagtccttcagaagctgggccaagagaacctggaagacaagtgtggtaaactggaccccactttcgccagtgcaactttactgtttcagaaagaccccccagccgatgtccagctcttccaagaggtgcccaagggtcagtctgaggaggacatggtgggccggcccctgccccacctggcagcggacatgcagcctctggtgaggccgtgtactgtgacgacattcctcgctacgagaatgagctgtctctccggctggtcaccagcacccgggcccacgccaagatcaagcatcgagatgaagttcaagaatatgctgtttcctatgattgtctgcccagcctggatccctgagctgaattcggtagaacatggacccgacggtatctcctttggagctgcttgccccctgagcattgtggaaaaaaccctggtggatgctgttgctaagcttcctgcccaaaagacagaggtgttcagaggggtcctggagcagctgcgctggtttgctgggaagcaagtcaagtctgtggcgtccgttggagggaacatcatcactgccagccccatctccgacctcaaccccgtgttcatggccagtggggccaagctgacacttgtgtccagaggtgagctgcctgaagcagaggtccaggaagaaggacttgggggagaaaagtctcaccagataggtcattttctggagaaacagagctcaaagttcagtgacccagctttccctgtgatttggatccagggaagcatggagaatgtacctggtttggtggacgggaaagctggatattttctctgtagagaattcacagcaggaactgctacctgcatgccttacctagtggggcaccaggagaactgtccagatggaccacaccttcttccctggctacagaaagaccctgctgagcccggaggagatactgctctccatagagatcccctacagcagggagaaatacaaactaccatcagagaatactacaaacacctctccgcaaataaactagaaaatctagaagaaatggataaattcctcgacacatacactctcccaagactaaaccagaaagaagttgaatctctgaatagaccaataacaggagctgaaattgtgccaataatcaacagcttaccaaccaaaaagagttcaggactagatggattcacagccgaattctaccagaggtacaaggaggaactgcatataaacagaaccaaagacaaaaaccacatgattatctcaatagatgcagaaaaggcctttgacaaaattcaacaacccttcatgctaaaaactctcaataaattaggtattgatgggacgtatctcaaaataataagagctatctatgacaaacccacagccaatatcatactgaatgggcaaaaactggaagcattccctttgaaaactggcacaagacagggatgccctctctcaccactcctattcaacatagtgttggaagttctggccagggcaatcaggcaggagaaggaaataaagggtattcaattaggaaaagaggaagtcaaattgtccctgtttgcagatgacatgattgtatatctagaaaaccccattgtctcagcccaaaatccccttaagctgataagcaacttcagcaaagtctcaggatacaaaatcaatgtacaaaaatcacaagcattcttatacaccaataacagacaaacagagagccaaatcatgagtgaactcccattcacaattgcttcaaagagaataaaatacctaggaatccaacttacaagggacgtgaaggacctcttcaaggagaactacaaaccactgctcaatgaaataaaagaggatacaaacaaatggaagaacattccatgctcatgggtaggaagaatcaatatcatgaaaatggccatactgcccaaggtaatgtatagattcaatgccatccccatcaagctaccaatgcctttcttcacagaattggaaaaaactactttaaagttcatatggaaccaaaaaagagcccgcatcatcaagtcaatcctaagcccaaagaacaaagctggaggcatcacgctacctgacttcaaactatactgcaaggctacagtaaccaaaacagcatggtactggtaccaaaacagaaatatagatcaatgcaacagaacagagccctcagaaataatgccacatatctacaactatctgatctttgacaaacctgacaaaaacaagcaatggggaaaggatcccctatttaataaatggtgctgggaaaactggctagccatatgtagaaagctgaaactggatcccttccttacaccttacacaaaaattaattcaagatggattaaagacttaaacattaggcctaaaaccataaaaaccctagaagaaagcctaggcattaccattcaggacataggcatgggcaaggacttcatgtctaaaacaccaaaagcaatggcaacaaaagacaaaattgacaaatgggatctaattaaactaaagagcttctgcacagcaaaagaaactaccatcagagtggacaggcaacctacagaatgggagaaaattttcacaacctactcatctgacaaagggctaataatatccagaatctacaatgaactcaaacaaatttacaagaaaaaatcaaacaaccccatcaaaaagtgggcaaagcatatgaacagatgcttctcaaaagaagacatttatgcagccaacagacacatgaaaaaatgctcatcatcactggtcatcagagaaatgcaaattcaaaccacaatgagataccatctcacaccagttagaatggcgatcattaaaaaatcaggaaacaacagatgctggagaggatgtggagaaataggaacacttttacaccattggaattgtcgtgtgaaaatgacgcaacaaatgcaaaatttacatctctgtcagtcaaaaaaacatagtgctccctcatctcccaacgcagccaaacgcctgtacaggaacctctctgagaaactgaaagggagccactcttccttcgatgaggcctattttaggacaagaactgatcggctgagtctcaggaagacctcggtgaatttccagggcaatgaagccatgtttgaggcagtcgaacagcaggacatggatgctgtgcagatcctcctgtatcagtacacaccagaagaacttgacctcaacacacctaacagcgagggcttgacacccctggatattgccatcatgaccaacaatgtgcccattgcaaggattcttctgaggacaggggcccgagaaagtccacactttgtcagcctggaaagccgagcaatgcacctcaacacactggtccaggaagcccaggagagggtgagtgaactgtctgcccaggtggagaatgaaggattcactctggacaacacagagaaagagaagcagctgaaagcttgggagtggaggtatcggctctacagacgcatgaaaacaggctttgagcatgccagagcccctgagatgccaaccaatgtctgtctcatggtaaccagcagcacatcactcactgtcagcttccaagagcctcttagcgtcaatgcagctgtagtaaccaggtataaagaacgcagttcctcaccagcaacggaacaaagctggacagagaatgactttgatgagttgagagaagaaggcatcagacgatcaaactactccgagctacaggaggcaattcaaaccaaaggcaaacaagttgaaaactttgaaaaaaatttagatgaatgtataactagaataaccaatacagggaattgcttaaaggagctgatggagctgaaagccaaggctcgagaactacgtgaagaatgcagaagcctcaggagccgatgcaatcaactggaagaaagggtatcagtgatagaagatgaaatgaatgaaatgaagcgagaagggaagtttagagaaaaaagaataaaaagaaacgaacaaagcctccaagaaatatgggactatgtgaaaagaccaaatctacgtctgattggtgtacctgaatgtgacggggagaatggaaccaagttggaaaacactctgcaggatattatccaggagaacttccccaatctagcaaggcaggccaacattcagattcaggaaatacagagaacgccacaaagatactcctcgagaagagcaactccaagacacataattgtcagattcaccaaagttgaaatgaaggaaaaaatgttaagggcagccaaagagaaaggtcgggttacccacaaagggaagcccatcagactaacagcggatctctcgttacccacaaaaggaagcccatcagactaa

SEQ ID NO: 6741 - DNA, 2505 bp, Homo sapiens; identical to SEQ ID NO: 3499
  SIMILAR (1129)..(2499): 921254mologous to Homo sapiens putative p150,accession number U93572,Smith-Waterman Score=2170.

SEQ ID NO: 6742 - DNA, 1413 bp, Homo sapiens
  SIMILAR (765)..(1211): 841254mologous to Homo sapiens alcohol dehydrogenase 6,accession number M84409,Smith-Waterman Score=624.
acagtcgcctgtgtacctttgtactttctacagtgaaagttgctacaggatctccctttctcaataaattcatctgcggtggagaaaatcagcatgagtactacaggccaagtcatcagatgcaaagcagccatactctggaagcctggtgcaccattttctattgaagaggtagaagtggccccaccaaaggcaaaggaggttcgcataaaggttgtggccaccggactgtgtggtacagagatgaaagtgttggggagtaaacacttggacctcttgtatcccaccatcttgggccatgaaggggctggaatcgttgagagtattggagaaggagtaagcacagtgaaaccaggtgacaaagttatcacactctttctgccacagtgtggagaatgtacctcttgcctgaattctgagggcaatttttgtatacaattcaaacagtcaaaaacccaactgatgtctgatggtaccagcaggtttacctgcaagggaaaatcaatatatcactttggtaataccagcaccttctgtgaatacacagtgataaaggaaatctcagttgccaagattgatgcagtcgctcctctagagaaagtatgcctaattagctgtggcttttccactgggtttggtgctgcaatcaatactgccaaggtgactccaggttctacctgtgctgtgtttggcctggggaggagtcggcttgtctgttgtcatgggttgtaaagcagcaggagcagccagggattcattggagtggatgttcaacaagggaggaaattttaaggaagggcacaggaattgggtgcgactgagtgccctcaacccctcaggccttaaagaaaccccatttcaaagaagttttatttgatatgacagatgctggtatagacttctgctttgaggccattggaaatctggacgttctggcagctgccctcgcctcctgcaatgagagctatggggtctgtgtggttgttggggtgttgcctgccagtgttcaactcaaaatcagtggccagttgttcttctcaggacgttctttgaagggttctgtttttggaggctggaagagcagacagcacatccctaaactggttgctgattatatggcagagaagttgaatctagatccactaattactcatactctgaatcttgataaaatcaatgaagcagttgaattaatgaaaactggaaaatggtaaactgcccacataaattttatgtctgtgtgtttgagaccaagagaaagggtgtattggcttgggagtagaagaagggtcgtccctgctgcagaagctgtatactgataattgaagaggctttcaggaatttgtaaagcatctccttcccctctgcattttgttttatttctagctaataaaatacataatcctgaaagta

SEQ ID NO: 6743 - DNA, 2280 bp, Homo sapiens
  SIMILAR (2159)..(2221): 801254mologous to Homo sapiens p40,accession number U93567,Smith-Waterman Score=93.
atggggaaaaaacagagcagaaaaaccggaaactctaaaaagcagagcgccactcctcctccaaaggaacgcagttcctcaccagcaacggaacaaagctggacagagaatgactttgacgagttgagagaagaaggcttcagacgatcaaactactctgagctacaggaggaaactcaaaccaaaggcagagaagttgaaaactttgaaaaaaatttagacgagtgtataactagaacaaccaatacagagaagtgcttaaaggagctgatggagctgaaagccaaggcttgggaactacgtgaagaatgcagaagcctcaggagccgatgcaatcaactggaagaaagggtatcagtgatggaagatgaaatgaatgaaatgaagcgagaagggaagtttagagaaaaaagaataaaaagaaatgaacaaagcccccaagtaatacgggactatgtgaaaagaccaaatctacgtctgattggtgtacctgaaagtgacgggaagaatggaaccaagttggaaaacactctgcaggatattatccaggagaacttccccaatctagcaaggcaggccaacattcagattcaggaaataccgagaacgtcaaaagatactcttcagaagagcactccattattggccttattggtcgattcccaagttgaaggacggacatgtttagggccccaaaaaagcgggaacaaaaaaggaacaacagaaagattcaaaaagaagaaggaggacgaaccgcaccaactgggatctgagctgggcatttctgaaagaaacacagcagccccagtcagggactgtgggcgcagctttagcagacttaaacgttcctgcctgctggctctgaagacagcagcagatctcccagtacagcattcgagctatgctaagggacagactgcctcctcaagtaggtacctgacccatgtgcctcctcatggggagacacctcccagcagagatcgacagacatctcatacaggagagctccagctggcatctggtgagtgcccctctgggatgaagcttccagaagaaagaaaaggcagcaatcttttctgttctgcagcctccgctggtgatactcaggcaaacagggtctggagtggacctccagcaaactccaacagacctgcagctgagggtcctgtctgttagaaggaaaactaacaaacagaaaggacatccacaccaaaaacccatctgtacatcacccttcatcaaaggcccaaaagtagataaaacccacaaagatggggaaaaaacagagcagaaaaactggaaactctgaaaagcagagcacctctcctcctccaaaggaacgcagctcctcaccagcaatggaacaaagctggatggagaatgactttgacaagttgagagaagaaggcttcagacgatcaaactactctgagctacggggaggacattcaaaccaaaggcaaagaagttgaaaactttgaaaaaaatttagaagaatgtataactagaataaccaatacagagaagtgcttaaaggagctgatggagctgaaagccaaggctcgagaactacgtgaagaatgcagaagcctcaggagccaatgcgatcaactggaagaaagggtatcaatgatggaagatgaaatgaaggaaatgaagcgagaagggaaaccaaatctacgtctgattggtgtacctgaaagtgatggggagaatggaaccaagttggaaaacactctgcaggatattatccaggagaacttccccaatctagcaaggcaggccaacgttcagattcgggaaatacagagaacgccacaaagatactcctcgagaagatcaacaccaagacacataattgtcagattcaccaaagttgaaatgaaggaaaaaatgttaagggcagccagagagaaaggtcgggttaccctcaaagtgaagcccatcagactaacagcggatctctcggcagaaactctacaagccagaagagagtggggaccaatattcaacattcttaaagaaaagaattttcaacccagaatttcatatccagccaaactaagcttcataagtgaaggagaaataaaatactttacagacaagcaaatgctgaaagattttgtcaccaccaggcctgccctaaaagagctcctgaaggaaagtgctaaacatggaaaggaacaactggtaccagccactgcaaaatcatgccaaaatgtaacaaccatcgagactaggaagaaactgcatcaactaacgagcaaaataaccagctaa

SEQ ID NO: 6744 - DNA, 4821 bp, Homo sapiens
  SIMILAR (1825)..(3561): 881254mologous to Homo sapiens putative p150,accession number U93572,Smith-Waterman Score=2568.
atgggagactttaacaccccactgtcaacattagacagatcaacgacacagaaagtcaacaaggatacccaggaattgaactcagctctgcaacaagcagacctaatagacatctacaaaactctccaccccaaatcaacagaatatacattcttctcagcacctcatcacacttattctaaaattgaccacataattggaagtaaagcactcctcagcaaatgtaaaagaacagaaatcacaacaaactatctctcagatcaccgtgcaatcgaattagaaatcaggattaagaaacttactcaaaaccacacaactacatggaaactgaacaacctgctccggaatgactactgggtaaataatgaaatgaaggcagaaataaagatgttctttgaaaccaacgagaacaaagacacaacgtaccagaatctctgggacacatttaaagcagtgtgtagagggaaatgtacagcactaaatgcccacaagagaaagcaggaaagatctaaaatcaacaccctaacatcacaattaaaagaactagagaagcaagaggaaacaaattcaaaagctagcagaaggcaagaaataactaagatcagagcagaactgaaggagataaagacacaaaaaacccttcaaaaaatcagtgaatccgggaggaggagccaagatggccgaataggaacagctccggtctacagctcccagcgtgagcgacgcagaagacaggtgatttctgcatttccatctgagggcacagacaaacaaaaagacagcagtaacctctgcagacttacgtgtccctgtctgacagctttgaagagagcagtggttctcccagcacgcagctggagatctgagaacgggcagactgcctcctcaaaaggaaaactaacaaacggaaaggtccatccacacccatactcccattctgtccttcaccattcatcagaggacctaaggttgattcaacccacggtgcatggggacaaaaacagcaccgataaactgggatattctaaagaagcagagcgcctcttctcctccctccaaagggacaccagttccttcaccagcaaccggaaccaaaagcttggattggagaatgactttgacgagctgagagaagaaggcttcagacgatcaaattactctgagctacgggaggacattcaaaccaaaggcccaagaagttgaaaaccttgaaaaaaaatttagaagaatgtataacttagaataaccaatacagagaagtgcttaaaggagctgatggagctgaaaaccaaggctcgagaactacgtgaagaatgcagaagccttaggagctgatgcgatcaactggaagaaagggtgtcagcaatggaagatgaaacgaagaaatgaatgaaatgaagccgagaaggaaagtttagagaaaaaagaataaaaagaaatgagcaaagcctccaagaaatatggggactatgtgaaaaagaccaaatctacctctgactggtgtacctgaaagtgatggggagaatggaaccaagttggaaaacactctgcaggatattatccaggagaacttccgccaatcttagcaaggcaggccaatgttcagattcaggaaatacagagaacaccacaaagatactcctcaagaagagcaactccaagacacataattgtcagattcaccaaagttgaaatgaaggaaaaaatgttaagggcagccagagagaaaggtcgggttaccctcaaaggggaaggccatcagactaaacagtggatctcttggcagaaactcttcaagccagaagagagtgggggccaatattcaacattcttaaagaaaagaattttcaacccagaatttcatatccagccaaactaagcttcataagtgaaggagaaataaaatactttatagacaagcaaatgctgagagattttgtcaccaccatgcctgccctaaaagagctcctgaaggaagcgctaaacatggaaaggaacaactggatcaacaaaattgatagactgctagcaagactaataaagaagaaaagagagaagaatcaaatagatgcaataaaaaatgataaaggggatatcaccactgatcccacagaaatacgaactaccatcagagaatactacaaacacctctacgcaaataaactagaaaatctagaagaaatggataaattccttgacacatacaccctcccaagactaaaccaggaagaggttgaatctctgaatagaccaataacaggctctgaaattgtggcaataatcaatagcttaccaatgaaaaagagtccaggaccagatggattcacagccgaattctaccagaggtacaaggaggaactggtaccattccttctgaaactattccaatcaatagaaaaagagggaatcctccctaactcattttatgaggccagcatcatcctgataccaaagccgggcagagacacaaccaaaaaagagaattttagaccaatatccttgatgaacattgatgcaaaaatcctcaataaaatactggcaaacagaatccagcagcacatcaaaaagcttatccaccatgatcaagtgggcttcatccctgggatgcaaggctggttcaatatacgcaaatcaataaatgtaatccagcatataaacagaaccaacgacaaaaaccacatgattatctcaaaagatgcagaaaaggcctttgacaaaattcaacaacgcttcatgctaaaaactctcaataaattaggtattgatgggacatatctcaaaataataagagctatctgtgacaaacccacagccaatatcatactgaatgggcaaaaactggaagcattccctttgaaaactggcacaagacagggatgccctctctcaccactcctattcaacatagtgttggaagttctggccagggcaattaggcagaagaaggaaataaagggtattcaattaggaaaagaagaagtcaaattgtccctgtttgcagatgacatgattgtatatctagaaaaccccattgtctcagcccaaaatctccttaagctgataagcaacttcagcaaagtctcaggatacaaaatcaatgtacaaaaatcacaagcattcttatacaccaataacagacaaacagagagccaaatcatgagtgaactcccattcacaattgcttcaaagagaataaaatacttaggaatccaacttacaagggacatgaaggacctcttcaaggagaactacaaaccactgctcaatgaaataaaagaggatacaaacaaatggaagaacattccatgctcatgggtaggaagaatcaatatcgtgaaaatggccatactgcccaaggtaatttacagattcaatgccatccccatcaagctaccaatgcctttcttcacagaattggaaaaagctactttaaagttcatatggaaccaaaaaagagcccgcattgccaagtcaatcctaagccaaaagaacaaagctggaggcatcacactacctgacttcaaactatactacaaggctacagtaaccaaaacagcatggcttcagcacgcagtgccggctaatgatggcaccacaagatccccatcaatagacagcattcagaaggaccccagcgagtttgcctggcgtgatcctgagttgcctgaggtcattcacatccttcagcaccagttcccatctgttcaggcaaatgcagcagcctacctgcagcacctgtggtttggtgacaacaacgtgaagatgaaggtgtgtaggttatggggaatcaagcttctggtttaccttttgggccacagagttttggaagttcagaagaatgcttgtgatgcccttcgaaatctctttttcggcaagtctacaggtgaaaataaaataacaatgaaggatgttgccacattggatctgagtttcattctcagcaaactaacacaggaacagaaaaccaaatacctcattgttctcactcataagtgggagttgaacaatgagaacacatggacacaggaaggggaacaacacttactggggcctatcggggggcaaatctccaaggactcaagttgggccaaggaatgcagctcctcaccagcaacggaacaaagctggatggagaatgactttgatgagctgagggaagaaggcttcagacgatcaaattactctgagctacgggaggacgttcaaaccaaaggcaaagaagttgaaaactttgaaaaacatttagaagaatgtataactagaataaccaatacagagaagtgcttaaaggagctgatggagctgaaaaccaaggctcgagaactacgtgaagaatgcagaagcctcaggagccgatgggatcaactggaagaaaggggtctgtcatcatacctacatatagcagaagctcaagaaatatttgttgaaagaattaaagaattagtgaaccggctgggtgtagtggctcatgccggtaatcccagcactttgggaggccaagtctctgaaggaacaaaatcaaaactgcttgaacaagtatcccggctggaggaaaaactggaggctgtggaccacaaggaagccagtgggggaccatatgaaaaaatggttcttgtgaaagaccagtgcatccagaaattgcaagctgaagtaaaagcttcccaggagcaacttatagcccagttgacacccagtgatggtgctcgtttgaggacttggaattcactaagaattcctctaggttcaggcctccatccctttgcagagtcttattacccaaaggacctgtgtacaagtggagtacgctctctgctgtcttaa

SEQ ID NO: 6745 - DNA, 640 bp, Homo sapiens
  SIMILAR (69)..(638): 1001254mologous to Homo sapiens 71 Kd heat shock cognate protein,accession number Y00371,Smith-Waterman Score=973.
ggcacgagggctcttgggttttttgtggcttccttcgttattggagccaggcctacatcccagcaaccatgtccaagggacctgcagttggtattgatcttggcaccacctactcttgtgtgggtgttttccagcacggaaaagtcgagataattgccaatgatcagggaaaccgaaccactccaagctatgtcgcctttacggacactgaacggttgatcggtgatgccgcaaagaatcaagttgcaatgaaccccaccaacacagtttttgatgccaaacgtctgattggacgcagatttgatgatgctgttgtccagtctgatatgaaacattggccctttatggtggtgaatgatgctggcaggcccaaggtccaagtagaatacaagggagagaccaaaagcttctatccagaggaggtgtcttctatggttctgacaaagatgaaggaaattgcagaagcctaccttgggaagactgttaccaatgctgtggtcacagtgccagcttactttaatgactctcagcgtcaggctaccaaagatgctggaactattgctggtctcaatgtacttagaattattaatgagccaactgctgctgctattgcttacggcttagacaaaaaggttggagc

SEQ ID NO: 6746 - DNA, 999 bp, Homo sapiens
  SIMILAR (535)..(996): 791254mologous to Homo sapiens 71 Kd heat shock cognate protein,accession number Y00371,Smith-Waterman Score=597.
atgaagatccattcctgtgcttttgtgattgaacaagaggagaaaaagaaaacagaagctcataaagaaggagatggagtgaagagggctgataagattctgggggttaccaaagatcctggaaccattgctggtctcaatgtagttagaattatcaatgagccaactgctgcttctattgcttatggcacagacaaaaagtttggagctgaaagacatgtgctcatctatgacttaagagatgaaatttttgatgtgtctgtccttactcttgaggatgaaatctttgagatcaaatctacagctggagacacccacttaggtgaagaagattttgacaaccaaatgatcaaccattttattgctgagttcaaatacaagcataaggacagtagagcagatatttatacctccattacccatgcccaatttgaagaactgaatgctgtcctgttccgtggcacccaggaccccatagagatagcccttcaggacaccaaactagacaagttgcagatccatgttattgtcctgacccagaccttcactacctaccctgacaaccaacctgatgtcctcattcaagtttatgaaggtgagagtgccataaccaaggataacaatttgcttgttatccagggcaagtttgagctcacaggcatacttcctgctccctttgctgttcctcaaattaaagtcacttgtgatattgatgtcaatagcagcctcaatatctctgctgtaggtaagagtacagaaaaagagaacaaaattatcatcactaatgaccaggggcatttgagcaaggaagacattgagaatatggtccaggaagctgagtacaaagctgaagatgagaagcagaagaacaaggtggcatcaaagaattcacttgactcttatgcattcaacatgaaagcaactgagaaacttcaaggcaagatcaacaataaggataaacagaagatacttgacaagtgtaataaaatcatcaactga

SEQ ID NO: 6747 - DNA, 936 bp, Homo sapiens
  SIMILAR (529)..(927): 961254mologous to Cloning vector pSacBII SacB,accession number U09128,Smith-Waterman Score=687.
  misc_feature (1)...(936): n = a,t,c or g
ataaacaagttcctggtggtctttatgaagttcgctgaggcagaattgctgacaagtgtcaaagatacaaacagtgaggaaatcctgctaatccagtgtgccctccctgtcacccgcaactctcctcccatagtccagaaagtccacaccatctattccacttggctgttctgtaaattgcaagatttaataaaaaaacgcaaagcaatgattaaaggatgctcaccaatgaaactcatggaaacacttaaccagagcataaacgctggtcatgaaatgacgaaggctatcgccattgcacagtttaatgatgacagcccggaagcgaggaaaataacccggcgctgcacaataggtgaagcagcggatttagttggggggtttttcagaccttgtccctgcctgggctcggacctcagtagcacctgccatcgtgactggaagatccggcaagagcacaaggccagcggggagcatggcctcctccagctaggactttcttgctcacctcttttccagctgttggggcaggtaaatgtgtcaaaatctgatgaccccctcaaaatcaacggagtggaagatcacaaaacgatttttgacggagacggaaaaacatatcagaacgttcagcagtttatcgatgaaggcaattatacatccggcgacaaccatacgntgagagaccctcactacgttgaagacaaaggccataaataccttgtattcgaagccaacacgggaacagaaaacggataccaaggcgaagaatctttatttaacaaagcgtactacggcggcggcacgaacttcttccgtaaagaaagccagaagcttcagcagagcgctaaaaaacgcgatgctgagttagcgaacggcgccctcggtatcatagagttaaataatgattacacattgaaaaaagccctcacccgctga

SEQ ID NO: 6748 - DNA, 1131 bp, Homo sapiens; identical to SEQ ID NO: 5542
  SIMILAR (724)..(1128): 801254mologous to Mus musculus Pro-Pol-dUTPase polyprotein,accession number Y12713,Smith-Waterman Score=567.

SEQ ID NO: 6749 - DNA, 229 bp, Homo sapiens
  SIMILAR (1)..(135): 731254mologous to Mus sp. fibulin gene homolog,accession number S61006,Smith-Waterman Score=153.
cccatttatcgagtgacccaaaagactgcctgttttgaacgcagtttagaaaaggagaaggctctgcaacaggtccaggctgctgtgcaagctgctctgccacttgggctgtgtgactcagcagatccagtggtgcttgagcataaagtggatcatgcacagcagcatttcatcatcaaatggaagtggtatacatgtgatcaggctcgagcaggtcctgaaggcataa

SEQ ID NO: 6750 - DNA, 1011 bp, Homo sapiens; identical to SEQ ID NO: 5545
  SIMILAR (1)..(936): 671254mologous to Mus musculus Pro-Pol-dUTPase polyprotein,accession number Y12713,Smith-Waterman Score=1181.

SEQ ID NO: 6751 - DNA, 740 bp, Homo sapiens; identical to SEQ ID NO: 5549
  SIMILAR (84)..(737): 781254mologous to Mus musculus Pro-Pol-dUTPase polyprotein,accession number Y12713,Smith-Waterman Score=933.

SEQ ID NO: 6752 - DNA, 354 bp, Homo sapiens; identical to SEQ ID NO: 4261
  SIMILAR (139)..(354): 841254mologous to Mus musculus Pro-Pol-dUTPase polyprotein,accession number Y12713,Smith-Waterman Score=346.

SEQ ID NO: 6753 - DNA, 593 bp, Homo sapiens; identical to SEQ ID NO: 5551
  SIMILAR (186)..(590): 801254mologous to Mus musculus Pro-Pol-dUTPase polyprotein,accession number Y12713,Smith-Waterman Score=567.

SEQ ID NO: 6754 - DNA, 798 bp, Homo sapiens; identical to SEQ ID NO: 5552
  SIMILAR (798)..(316): 991254mologous to Leishmania major probable levansucrase precursor,accession number AL160371,Smith-Waterman Score=844.

SEQ ID NO: 6755 - DNA, 636 bp, Homo sapiens
  SIMILAR (292)..(612): 811254mologous to Mus musculus Pro-Pol-dUTPase polyprotein,accession number Y12713,Smith-Waterman Score=461.
atggagtttaatgactctatgcataatacctttgaccatatatggagaaccaaggaatatgatgaagctggttggttgctcctaagttcattggacaaagcgatgaaagaaaatgatgaactcagggattctaattcacagattcagaagcagatactgagccttcaatcttctaagatcatcctgaatctaacagagggaactgtggttactcaactacaaaatttaaattcagtgggaataattggatcccaaggtggtaggggccaagtggcagcactcagccttcaaaggcaaggtgccagttttgagtggagtccagaacaggagaaggctctgcaacaggtccagactgctgtgcaagctgctctgccacttgggccatatgacccatcagatccaatggtgtttgaggtgtcagtggcagatgggaatgctgtttggagcctttggcaggcccccataggtgaattacagtggaggactctagaattttggagcaaggccttgccatcttctgcagataactactctccttttgggagacagctcttggcctgttactgggctttggtggaaactgaacatttgactgtggatcatcaagtcaccagtgacctgaactgcctatcatga

SEQ ID NO: 6756 - DNA, 675 bp, Homo sapiens
  SIMILAR (220)..(672): 721254mologous to Mus musculus Pro-Pol-dUTPase polyprotein,accession number Y12713,Smith-Waterman Score=604.
atgctgattggacccagtgagcaagaagtagcaaacatcctggacttattggtttccagttttgagtgggaaccagaacacaagaaggctctgcaacaggtccaggctgctatgcaagctgctctgccacttgggccatatggcccagcagatacaaaggtgcttgaggtgccagtggcagataggaatgctgtttggagcctttggcaggcccccatagctgacctggctatggccactgctgagtgcccagtttaccagcagcagagatcaacactgagccctcaatatggcaatatttctcggggtgatcaacaagctacctggtggcaggttgattatattggatctcttccctcatggaaagagcagaggtttgtcctcactggaatagacacttattccagatataggtttgcttatcccgcacccagtgcttctgccaaaactaccatccatggactcacagaatgccttatccaccgttgtggtattccacacagcattgcctctgaccaaggcactcacttgcgacagtgggcaaatgctcatgaaattcactggtcttaccatgttgcccattatcctgaagcagctggattgacagaatggtggaacggccttttgaagtcacaattacaatgccaactagatgaccatactttgcagggctga

SEQ ID NO: 6757 - DNA, 470 bp, Homo sapiens
  SIMILAR (279)..(232): 371254mologous to Mus musculus Sox15,accession number AB025354,Smith-Waterman Score=36.
ctggcaactaaatgcttgccctagaagtgacactggttcttctttctataacgcatcagccagaacgagttccgtggtcccacccaaccatgaggtgggcccagaaaggcaattaatctagtggcatcaacagcttttactcttcccaaatagactctcagcttcgtgaaagcagctgccagctctgcttgttttaaccaatgtgcccagcacacactgccctgataaaaatatgtgttcaacagataaaggactcccttcctggtaaaatgagtaagggactcttacaacagcaacaaaaacctaaggtaggcactcactctgggattcaccaaagttagctgagcaggagaaagacagggggtgggggcacctggacttacctgttgtgcccatttcttcttttcctcctcatgttgctggagaatatctggtatatccttctggtgccgctcagcctcctctgatgg

SEQ ID NO: 6758 - DNA, 1911 bp, Homo sapiens; identical to SEQ ID NO: 5198
  SIMILAR (982)..(1761): 751254mologous to Mus musculus Pro-Pol-dUTPase polyprotein,accession number Y12713,Smith-Waterman Score=1036.

SEQ ID NO: 6759 - DNA, 1218 bp, Homo sapiens
  SIMILAR (388)..(1167): 511254mologous to Mus musculus Pro-Pol-dUTPase polyprotein,accession number Y12713,Smith-Waterman Score=637.
atgggaataattggatcccgaggtggcagaggccaagtggcagcactcaaacgtcaaaggcaagtaaccaaaaaagctgccagttttgagtggggtccagaagaggagaaagctctgcaacaggttcaggctgctgtgcaagctgctctgccacttgggccatatgacccagcagatccaatagtgcttgaggtgtcagtggcagatagaggtgctgtttggagcctttggcaggtccccataggtgaatcacagcagaggcctctaggattttggagcaaggccttgccatcttctgcagataacgactctccttttgagagacagctcttggcctgttactgcgctttggtagaaactgaacgtttggatatgggtcatcaagttaccatgagacctgaagtgcttatcataaactgcgtgctttctgacccatctagccataaaggatggaggttatgcatggattcagcaacatggacttccacttaccaaggtgacctggctatggccactgctgagtgcccaatttgccagcagcagagaccaacactgatccctcgatatggcaccattccttgggtaattagccagctacttggtgataggttgattacattggacctcttcaatcatggaaggggcagaggtttgtcctcactggaacagacacttactccggatatgagtttgcctatcctgcacacaatgcttttgcgaagactacatccatggattcacgaaggtcttatctaccatcatggcattccacatagcactgcctctgatcaagacactcaccttacagctaaagaagtgtggcagtgggctcatgctcatggaattcactggttttaccatgttccccatcatcctgaagcagctggattaataggatggtggaatggccttttgaagtcacaattacaatgccgactaggtgacaatactctgcagggctggggaaaagttcttcagaaggctgtgtgtgctctgaatcagcatccaatatatggtactgtttctcccgtagccaggattcatgggtccaggaatcaaggggtggaagtggaagtggcaccattcatcatcacttctagtgacccactagcaaaatttttgcttcctgtttcctcgacatcatgttctgctggacttaaggttgtagttctgatggaggaatgctgccaccaggagacacaacaacaatttcattga

SEQ ID NO: 6760 - DNA, 1142 bp, Homo sapiens
  SIMILAR (560)..(3): 791254mologous to Homo sapiens unnamed protein product,accession number AK023767,Smith-Waterman Score=754.
tcaaatggccagcgtgacacagactgcccctgggaaagcctcggaacttctcggattgggacagagtgctggggcagggaggaaatgtctcctcttgctttattccctttggcccaacttcaagggaagacgctttctcggggccttccaagaacccttgtgggtgattccatgtaactcaaggccccagggctcactgggcacacacccaggatctccatctcgctcccaccctcgttccttcctggaaaagaactgagaggctcctgctgtcttctccagaaaaaccttggaaggagctgtgacttcaggcgtcgtggtgggcccaggccctgcaccctatgtggcgaggaaagagacctcagtgggagtgacaggggccagagggaaggcaggcgaggcattggccccaaggacccggtacaacagctcctccttctcctgctggagctgtcgccgcagttgcacctccttatccagggcctcgcgcgtgagaagcaggtcttctgacagctgccttgacaggaccacctggttgcggcttcgaacatggaggtcctcgttttcctgttgcagggtggtaattttttcctccaatatcagatctttctctttcactgtttccatgaggatcagccgccggtccagctcatgaatacgctcattattcatttggatgacaaagtgtaagctatccagctcctgctcccagaactgggtggggctcccataatcctggatatgtttgttatagtttcggctcagaatggactcctccaccctcttcattttggcctggaaagcctccagctgtgaggtcagtctgtctatggtctcctgctgggtagaactggcctcccggaaagagtgggtaagcgcttctttctcctgttcatatgaggcccggaggacttgcagggcctcttcattctttccttccaggaccctttgctgctcatccagtctgtctcgaagctctagctccctttccttctccacctgttgtgcccatttcttcttttcctcctcatgttgctggagaattctggttatatccttctggtgccgctcagcctcctctgatgcacagagctggacagttatagctgtgtctccattgaggggacttaattcatggggct

SEQ ID NO: 6761 - DNA, 1452 bp, Homo sapiens
  SIMILAR (1186)..(1449): 821254mologous to Mus musculus Pro-Pol-dUTPase polyprotein,accession number Y12713,Smith-Waterman Score=382.
atgggagaagagcgtagatggaggcccagcagcaacgggaagcatggtgcatttgcggaactggacaaaggctggttggtgtggctggaaggaaaaggtgtaattggggcaagaagaagctggagagcacacagtgccctgataaaaatatgtgttcaacagataaaggactcccttcctggtaaaatgagtaagggactcttacaacagcaacaaaaacctaagcacctgctccatgatctgtataaggcaatgagcaccagatggggagtgcagaaagccaggctcaactgcacagctttgccaccaactggctgtgtgactttggacccatcgttcctcactgagcctcagtttccccggcagctgtcagaagacctgcttctcacgcgtgaggccctggagaaggaggtgcagctgcggcgacagctccagcaggagaaggaggagctgttgtaccgggtccttggggccaatgcctcgcctgccttccctctggcccctgtcactcccactgaggtggagaaggaaagggagctagagcttcgagacagactggatgagcagcaaagggtcctggaaggaaagaatgaagaggccctgcaagaccctagattggtagatccactgacatcttgcactgtgcactttgaaaagccacagatgctcaacgccagactatggaagcatgcagggagggaggctgtagcctgcaaagtcagagggtcagagctgcccaagacaatgggaacctaccccttgcatcagcatgacctggatgtgagacatggagtcaaaggagatcattttggagctttaagatttgattgccctgctggattttggacttgcatggggcctttagccccttcattttggccaatttctcccatttggaatggaccaccacttgatatcagcggataccctgccacttctacacagaagtccactatgtgtctgaggatcattgatactcgactgcatccagagagtcgactcaagcagcagtcaaactttgcactgaacgctagggagaaggctctgcaacaggtccaggctgctgtgcaagctgctctgccacttgggccctatgacccagcagatccaatggtacttgaggtgtcactggcagatagggatgctgtttggagcctttggcaggcccccttaggtgaatcacaccataaagtgggtcgtgcacagcagcattccatcatcaaatggaagtggtatatatgtgatcgggctcgagcaagtcctgaaggcacaagtaagttacatgaggaagtggcccaaatgcccatggtctccactcctgccaccctgccttctctccccaagcctgcactgatggccttatggagagttccctatgatcagttgacagaggaagagaagactagggactggttcacagatggttctgcaggatatgcaggcaccacctga

SEQ ID NO: 6762 - DNA, 2269 bp, Homo sapiens
  SIMILAR (350)..(1840): 1001254mologous to Homo sapiens 06-OCT-1995 Human TIE-2 ligand 2 cDNA clone,accession number T44321_cd1,Smith-Waterman Score=2609.
tgggttggtgtttatctcctcccagccttgagggagggaacaacactgtaggatctggggagagaggaacaaaggaccgtgaaagctgctctgtaaaagctgacacagccctcccaagtgagcaggactgttcttcccactgcaatctgacagtttactgcatgcctggagagaacacagcagtaaaaaccaggtttgctactggaaaaagaggaaagagaagactttcattgacggacccagccatggcagcgtagcagccctgcgtttcagacggcagcagctcgggactctggacgtgtgtttgccctcaagtttgctaagctgctggtttattactgaagaaagaatgtggcagattgttttctttactctgagctgtgatcttgtcttggccgcagcctataacaactttcggaagagcatggacagcataggaaagaagcaatatcaggtccagcatgggtcctgcagctacactttcctcctgccagagatggacaactgccgctcttcctccagcccctacgtgtccaatgctgtgcagagggacgcgccgctcgaatacgatgactcggtgcagaggctgcaagtgctggagaacatcatggaaaacaacactcagtggctaatgaagcttgagaattatatccaggacaacatgaagaaagaaatggtagagatacagcagaatgcagtacagaaccagacggctgtgatgatagaaatagggacaaacctgttgaaccaaacagctgagcaaacgcggaagttaactgatgtggaagcccaagtattaaatcagaccacgagacttgaacttcagctcttggaacactccctctcgacaaacaaattggaaaaacagattttggaccagaccagtgaaataaacaaattgcaagataagaacagtttcctagaaaagaaggtgctagctatggaagacaagcacatcatccaactacagtcaataaaagaagagaaagatcagctacaggtgttagtatccaagcaaaattccatcattgaagaactagaaaaaaaaatagtgactgccacggtgaataattcagttcttcaaaagcagcaacatgatctcatggagacagttaataacttactgactatgatgtccacatcaaactcagctaaggaccccactgttgctaaagaagaacaaatcagcttcagagactgtgctgaagtattcaaatcaggacacaccacaaatggcatctacacgttaacattccctaattctacagaagagatcaaggcctactgtgacatggaagctggaggaggcgggtggacaattattcagcgacgtgaggatggcagcgttgattttcagaggacttggaaagaatataaagtgggatttggtaacccttcaggagaatattggctgggaaatgagtttgtttcgcaactgactaatcagcaacgctatgtgcttaaaatacaccttaaagactgggaagggaatgaggcttactcattgtatgaacatttctatctctcaagtgaagaactcaattataggattcaccttaaaggacttacagggacagccggcaaaataagcagcatcagccaaccaggaaatgattttagcacaaaggatggagacaacgacaaatgtatttgcaaatgttcacaaatgctaacaggaggctggtggtttgatgcatgtggtccttccaacttgaacggaatgtactatccacagaggcagaacacaaataagttcaacggcattaaatggtactactggaaaggctcaggctattcgctcaaggccacaaccatgatgatccgaccagcagatttctaaacatcccagtccacctgaggaactgtctcgaactattttcaaagacttaagcccagtgcactgaaagtcacggctgcgcactgtgtcctcttccaccacagagggcgtgtgctcggtgctgacgggacccacatgctccagattagagcctgtaaactttatcacttaaacttgcatcacttaacggaccaaagcaagaccctaaacatccataattgtgattagacagaacacctatgcaaagatgaacccgaggctgagaatcagactgacagtttacagacgctgctgtcacaaccaagaatgttatgtgcaagtttatcagtaaataactggaaaacagaacacttatgttatacaatacagatcatcttggaactgcattcttctgagcactgtttatacactgtgtaaatacccatatgtcct

SEQ ID NO: 6763 - DNA, 704 bp, Homo sapiens
  SIMILAR (193)..(630): 931254mologous to Homo sapiens Human secreted protein clone ys20_1 protein sequence SEQ ID NO:158,accession number Y94976,Smith -Waterman Score=722.
gttgactgtaacatggagacgtctacagaagagaaggaaaacttacccggaggatacagtggaagtgttaaaaatagaccaacaaggcatgatgttttagatgactcatgtgacggctttaaggacctcatcaaacctcatgaggaattgaagaaaagtgggagaggcaaaaagccaacaagaacattagtcatgacaagcatgccatctgaaaagcagaatgtcgtcatccaggttgtggataaattgaaaggcttttcaattgcaccagacgtctgtgagaacacgactcacgtgctttccgggaagccacttcgcaccctgaatgtgctgctgggaattgcgcgtggctgctgggttctctcttatgattgggtgctatggtctttagaattgggtcactggatttctgaggagccgttcgaactgtctcaccacttccctgcagctcccctgtgccgaagcgagtgccacttgtctgcagggccgtaccgcggaaccctctttgccgaccagccagcgatgtttgtctcgcctgccagcagccccccagtggccaagctctgtgaactagtccacctgtgcggaggttgcagtgagccaaggttgcagtgaatcaagattgctccactgcactccagcctgggcaacagagtaactctccttctcaaataaataaataaataaataagaaaaaaaaaaaa

SEQ ID NO: 6764 - DNA, 1077 bp, Homo sapiens
  SIMILAR (103)..(387): 971254mologous to Homo sapiens angiopoietin-2,accession number AF004327,Smith-Waterman Score=456.
atggaggtgtcaggtgttaggtcttccttcactttctctcctggtccttatctcgtctctctgtcctacacctgggatgactcgttttcacttatctttcagcttcagcttgagaattatatccaggacaacatgaagaaagaaatggtagagatacagcagaatgcagtacagaaccagacggctgtgatgatagaaatagggacaaacctgttgaaccaaacagcggagcaaacgcggaagttaactgatgtggaagcccaagtattaaatcagaccacgagacttgaacttcagctcttggaacactccctctcgacaaacaaattggaaaaacagattttggaccagaccagtgaaataaacaaattgcaagataagaacagcacagagatgaactgtaaggagacagtggagggcagcgtaaggagtggctgcagtggtgcaggagggatgatccaggcatcaggggagagaggagggaaggagaaaacagaagaagtcaaacaactatttcagaagcagggccatggtcttgatgggggaagaaggagatgtcaaggacgattgcacgtttctggcttgagctttgacgaagacgagacagctggtgtgaaggaaggatggacacgcaccagactactgggagttggaaaatggaaaatgccttataccctggcattggctctacaggagcctccttgccggagggaagagcccaggcctgaatgccgactacaagctaagcaggttacatcatctccaaagcagaatgtcgtcatccaggttgtggataaattgaaaggcttttcaattgcaccagacgtctgtgagaccacgactcacgtgctttccgggaagccacttcgcaccctgaatgtgctgctgggaattgcgcgtggctgctgggttctctcttatgattgggaagaaacgattcctatttgcatgttttattcttatctccaacctagtcatgctgctttgtgctccaatgagaaagaccttgatgattataatccgaagaaagaacagctaaaagtcgaccgctgtatggtgaaaaagaaagtcaaataa

SEQ ID NO: 6765 - DNA, 399 bp, Homo sapiens
ctgaaagtgaatctgctccaggaagccttttctgttctgactgttcaggtctgggtccttattccttcctgtgccttcttttggttcacttttcagatagagactataagatggttaaaaacaaaccatatgttgaccaccaaccaggcatgggcacagactgagcatccttaaagacattattccactagagtctcataagagttcattgagggacgtattattatccctactttataaatgatgaaattcggagtcatgacccttcataacttgatccataggcaagcaggcagtaaatgcagatgactaacaatatggcaggattcaaatccagggtcttgcttaattattaaaacccacagtctttaccccagtttcaccgaagtgtaaattaaa

SEQ ID NO: 6766 - DNA, 637 bp, Homo sapiens
  SIMILAR (136)..(360): 1001254mologous to Homo sapiens dJ839B4.5 (novel protein with ankyrin repeats),accession number AL109754,Smith-Waterman Score= 387.
aactctttttcttcggacaaaactgaaatcctgtacccatcaaacaacaatgccctacttcccccttccccagtctctagcaactactattctactttctgtttctatgaatttgacaactctgtgtaccccacagctaacgttaatgcaacagataactttctgtggactccacttcattttgcatgccatgcaggccaacaagacattgttgagcttcttgttgaatctggagctttaatagatgcagcttcaatcaacaactcaactcctttaaatagagccattgaaagctgcagactggatacagtaaaatacctacttgatattggtgctaaattccagctggaaaatagaaaagattctctcagaagaacggagccaagagttcaggagcaaatgatgtgtgaaggaagtgctcccaggggagagcagtatggggtgaggggtatgaaacatggacacggaaatgaaaggagccaaacaagggtgcgctttcagatgaaaccacagcttctgagtagcccgtggggagctgtagcgcacaggcaaggagctgggcttctggggttcctgtatcagtgagcagctgcagggattgagggtgtactggccgaggctgttccagtgctcgagg

SEQ ID NO: 6767 - DNA, 489 bp, Homo sapiens
  SIMILAR (319)..(453): 801254mologous to Homo sapiens Human secreted protein sequence SEQ ID NO:103,accession number Y87064,Smith-Waterman Score =178.
atggctgagcagttctggaataaagtcactgagctgcttcagggtccacaccgaagaccaagttctgcagatctgcctcagatggcacaaatggcatgcttccttctgggtccctgtgtaggcagaaatgttcctgaaccacagctgaaaacacctgtatccaggtccctgagtgggcagaactacatccagatagcagcaaaaaaaacactggactcagattacagggccatctcaagatcttcaggtagaccaaagccagtagttctgcctccaggaacacagatggatgtgtctccttccatgtcttttgcaggcccctctgctgcaggtctgctggagtttgctggaggtccactccccatcctgtttgcctggttatcacaagtggaggctgcagaacagcaaaggttgctgcctgttccttcctctggaagcttcatcccagagggtcacccgccatatgccagccagagttcttctgtatga

SEQ ID NO: 6768 - DNA, 1003 bp, Homo sapiens
  SIMILAR (566)..(988): 851254mologous to Homo sapiens putative p150,accession number U93565,Smith-Waterman Score=611.
gaatgacatgatcagtgaaattccacagcattataggaaaccaggcataaaacttcaagacgtttttcctcaggaagtggcacagatgacaagtgacaaagagcagagacctgctgaagcatccaaaaatccaacgggaagtctgccagagaacaaggctgaagccagggaaccaagtgatctagctcagcagatccccacccccatggaggccagcaagctaagatccactggcttgaaattctcgcagccagcacaacagtctgaagtcgacctgggacactcgagcttggagaactccagctggcatctggcgggtgaccctctgggacgaagcttccagaggaaggaacaggtagcaatctttgctgttctgcagcctccactagtgataactaggcaaacagggtctggagaggacctccagcaaactccagcagacctgcagcagaggggcctgactgttagaaggaaaactaacaaacagaaaggaatggcatcaacatcaacaaaaaggacgtccactcaaaaaccccatccgaaggtcaccaacatcgaaaaccaaagaaccaattacaaaaaccacatgattatctcaatagatgcagaaaaggccttcaataaaattcaacaccccttcacgctaaaaactctcaataaactaagtactgatggaatgtatctcaaaataataagagctatttatgacaaacccacagccaatatcatactgaatgggaaaaagctggaagcattctctttgaaaactggtacaagacaaggatgccctctctcaccactcctattcaacatcatagtggaagttctggccagggcaatcaggcaagagaaagaaataaagggtattcaaacaggaagagaggaagtcaaattgtctctgtttgcagatgacctgattgtatatttagaaaaccctatcatctcagccaaaaatctccttaaactgataagcaacttcagcagtctcagaatacaaaattaa

SEQ ID NO: 6769 - DNA, 2310 bp, Homo sapiens; identical to SEQ ID NO: 6271
  SIMILAR (1138)..(2307): 911254mologous to Homo sapiens putative p150,accession number U93568,Smith-Waterman Score=1900.

SEQ ID NO: 6770 - DNA, 436 bp, Homo sapiens
  SIMILAR (226)..(384): 431254mologous to Homo sapiens HTRM clone 0258181 protein sequence,accession number Y73344,Smith-Waterman Score=88.
  misc_feature (1)...(436): n = a,t,c or g
ttcagtatgaaagcaatttctgcaccgtggccctgcagtttatagaagaggaaaagaactacgccttgccttctccagcaaccacagagggagggagtttgaccccagtgcgagacagcccgtgcacccccagacttcgttctgtgagctcctatggaaacatccgtgctgtcgccacagccaggagcctcaacaaatctttgcagaacctgagtttgacagaggaatctggtggcgcggtggcgttctcccccggaaacctcagcaccagcagcagcgccagcagcaccctgggcagccccgagaatgaggagcatatcctgtccttcgagaccatcgacaagatgcgccgcgccagctcctactcctccctcaactccctcatcggagnttcctttaacagtggttacactcagatttggagagtcctgctgca

SEQ ID NO: 6771 - DNA, 1779 bp, Homo sapiens
  SIMILAR (118)..(705): 411254mologous to Schizosaccharomyces pombe mip1,accession number AB032552,Smith-Waterman Score=416.
atgcatggggtccaggatgaccagctcagcctcccctcgccctgcagggctgcaaaagttttgcatgcagaaatgtgtcagtctggtgcctggcgtcacactggatttgatagaaaatcgtgccaagcggacctcgtgaaggacaacggccacaagtacttcctgtcggtcctggcggacccctacatgccagctgaacaccggaccatgacggctttcattctcgccgtgatcgtcaacagctatcacacggggcaggaagcctgccttcagggaaacctcattgccatctgcctggagcagctcaacgacccgcaccccttgctgcgccagtgggtggccatctgcctcggcaggatctggcagaacttcgactcggcgaggtggtgcggcgtgagggacagcgctcatgagaagctctacagcctcctctccgaccccattcccgaggtccgctgcgcagcggtcttcgcccttggcacgttcgtgggcaactctgcagagaggacggaccactccaccaccatcgaccacaacgtggccatgatgctggcccagctggtcagcgacgggagccccatggtccggaaggagctggtggtggctctgagtcatcttgtggttcagtatgaaagcaatttctgcaccgtggccctgcagttcatagaagaggaaaagaactacgccttgccttctccagcaaccacagagggagggagtttgaccccagtgcgagacagcccgtgcacccccagacttcgttctgtgagctcctatggaaacatccgtgctgtcgccacagccaggagcctcaacaaatctttgcagaacctgagtttgacagaggaataccaaaaggagggtcccgggagcaccccactgaccccgttgcgtctcgggcagctggtggcgcggtggcggttctcccccggaaacctcagcaccagcagcagcgccagcagcaccctgggcagccccgagaatgaggagcatatcctgtccttcgagaccatcgacaagatgcgccgcgccagctcctactcctccctcaactccctcatcgctctaatttgggattcccagctaaagacaagtgggaaagtgggtcctacgtacacacgagaggccatggtggtgggcttcggcggcagcagccagccctgtgaggtttggcagcacacgacagcagaagccactggagcagcgcacctgcggtctcacctcaactaccaaactcctttcgaagccactggacagcagcggcccgtgcaagatggcccagcgcgggggcaccgtggggcgcagcagcccgacgccgtgagaaggccgtgccacaaatcagcttcaatttggcacagctgccccctgggtgttcacattcactgctttgccaggaagcctggagcccgagcctggtgtgagtcactcctgctcgcctcttccttcccgcgggccgagcggctgactaaagctcccttcatgctcacgtcagtcgccagggcagtacgcagatgcgtgcccaggttcttcatccctgatgtccgtcaaacccaaccatggggacacagtgacacccggcagaagggtgccagggaccaggaggaggccagggcggtgcttccctgccccagcctagcaattaagggcatcgccgctgtgattctacatgaacacagttcactccgctgtacctgggctgggccggaggccctggctgctggcagtggctgcaccagtgaccgctacagtggccgggtgccgctggctgctctcttctag

SEQ ID NO: 6772 - DNA, 1143 bp, Homo sapiens
  SIMILAR (22)..(1122): 851254mologous to Mus musculus B cell phosphoinositide 3- kinase adaptor,accession number AF293806,Smith-Waterman Score=1648.
atgaccggcttcccgtttcaggcagaaaccactgtctatgttattgtgagatgtaagctggatgacagggtggcgacagaagcagagttttctcctgaggattctccctctgtaaggatggaagccaaggtggagaatgagtacaccatttcagtgaaggctcccaacctttcatctgggaacgtttctctgaagatatattctggagacttagtggtgtgtgaaaccgttatcagctattatactgacatggaagaaattgggaatttattgtccaatgccgcgaatcctgtggaattcatgtgtcaggcctttaaaattgtgccctacaacacagagacccttgataaactgctaaccgaatccctgaagaacaatatccctgcaagcggactgcacctctttggaatcaaccagctggaagaagaagatatgatgacaaatcagagggatgaagagctgcccaccctgttgcattttgctgcgaagtatggactgaagaacctcactgccttgttgctcacctgcccaggagccctgcaggcgtacagcgtggccaacaagcatggccactaccccaacaccatcgctgagaaacacggcttcagggacctgcggcagttcatcgacgagtatgtggaaacggtggacatgctcaagagtcacattaaagaggaactgatgcacggggaggaggctgatgctgtgtacgagtccatggcccacctttccacagacctgcttatgaaatgctcgctcaaccccggctgtgacgaggatctctatgagtccatggctgcctttgtcccagctgccactgaagacctctatgttgaaatgcttcaggccagtacatctaacccaatccctggagatggtttctctcgggccactaaggactctatgatccgcaagtttttagaaggcaacagcatgggaatgaccaatctggagagagatcagtgccatcttggtcaggaagaagatgtttatcacacggtggatgacgatgaggccttttctgtggacctggccagcaggccccctgtcccagtgcccagaccagagaccactgctcctggtgctcaccagctgcctgacaacgaaccatacatttttaaaggcaagtatggcagggaatga

SEQ ID NO: 6773 - DNA, 561 bp, Homo sapiens
  SIMILAR (184)..(405): 891254mologous to Homo sapiens Polypeptide fragment encoded by gene 128,accession number W88957,Smith-Waterman Score=322.
atgccgtcttcccggcgccgcgctcccagagctcgcgccgcctcccggggcgccgcgcgggtggcgcagatggtactgagaggatctgtcttcctctctcagtggacacgacagattcatcgctgtgtgggggacaccgagtgtgagcgtcagggtcagcagcagggccttggaggcagaggggaccctgcacaagacctaaatgtcattgaagaagtgattcgaatgatgttagagatcatcaactcctgcctgacaaattcccttcaccacaacccaaacttggtatacgccctgctttacaaacgcgatctctttgaacaatttcgaactcatccttcatttcaggatataatgcaaaatattgatctgcaagtactgagtaacaagcagcagcatctgctgctgggaaagatcaagggcatggatacacaccctgctctgggacccaggtatgcagaactcactgaaagcagaacgtggagcatgaacgttgaaaaacctgtggcacttcagatcccagcaaagcacaaggcatcattagaggatgtggtacactga

SEQ ID NO: 6774 - DNA, 1056 bp, Homo sapiens
  SIMILAR (14)..(187): 791254mologous to Homo sapiens Polypeptide fragment encoded by gene 128,accession number W88957,Smith-Waterman Score=213.
cccacgcgtccgaatattttttagtatcacttggtattcattacgagttttaactgaaatctccttgtgggggggcctgatcctggtggtaataataaccattcaatacgacatgactaggacacgaaacaagtaccttcacacaaatagtttggtagctttagcaaatatgtcggcacagtttcgtttctctccatcagtatgctgcgccagaggatcatcaggttattttctttgctgtctaaaaaacacaacaaagttctggaacaagccacacagtccttgagaggttcgctgagttctaatgatgttcctctaccagattatgcacaagacctaaatgtcattgaagaagtgattcgaatgatgttaggagatcatcaactcctgcctggacaaattcccttcaccacaacccaaacttgggtattacgccctggcttttacaaacggcgatctctttggaacaattttcggaactcatccttcatttcagggtattaatggcaaaatattgatctgggtcatcttccttctttaggcttcaagggttggctggcaagctgggagctgagctgtcagtggaacgggtcctggaaatcattaagcaaggcgttcgttgcgctgcccaaagacagactgaagaaatttccagaattgaaattcaaatatgtggaagaggagcagcccgaggagttttttatcccctatgtctggtctcttgtctacaacttcagcagtcggcctgtactgggaattccacaggacattccagctgtttcaccatgggtttccgactgagggcaggatgctctcccacccggacccctccagccaagcagcccttcaagttcttttatttctgggtaacagaagtagacagacaggttacttggtgtatcttctgttaaagagggtttgcacgagtgtgttttcctcacacactttgatttggagaattggtgctagttggcaatagataactcagcgtagatagtattgcaaaaaggggaggaaatacacaacaataataaatgtaaaaacctgctattaaaa

SEQ ID NO: 6775 - DNA, 206 bp, Homo sapiens
  SIMILAR (64)..(138): 761254mologous to Homo sapiens NDRG4-B,accession number AB044944,Smith-Waterman Score=92.
tgccctcagccagcagacccgcctggcacgctcccgcactgcatccctcaccagtgccagctcgtggatggcagccgcccacaggcctgcacccactcagagagcagcgagggctgggccagcacatgtgacaatcatctggacaacagccacaagggggcgtcggaccaggcagccactttcctggtgctctctgggcccagctg

SEQ ID NO: 6776 - DNA, 601 bp, Homo sapiens
  SIMILAR (599)..(258): 1001254mologous to Homo sapiens Human membrane transport protein, MTRP-11,accession number Y71066,Smith-Waterman Score=581.
gcgaatacaaccctctatgatgtgagacttccttcctgtcatccacggcactgccaggactggggagcaggaaggggactggatttgagctgtccagaggtgtggggcctgagtttgccccagtccctggaagaggatgtccggatgtcatcccaccagttggaatgatcgtggactaagaatggccccatagctctaagagatgggttcctgcgaccaatggcaaaggccttgtgttccctgggaggcagtggttatgccaagagatccacaaagatggcgttggctgtggtctggccgaagatgaaggctcccagggtgaccaagaggactccgtagctgaccagcacccaccagctggctggtttgacctcttccatctcagagagtttggcttgaatgaggcacagccctgggaagacgaagatgaagcaggcggccaggcctccaatgactgagatcaccttgccgatgtcagggatgaagagcgccagcagcagggtgagcaggaaccagaccagcgtctgcagcactcgccgccgccgctcccgccccacgtcctcctccactggcaccccctggtagcgcagccacaggcctt

SEQ ID NO: 6777 - DNA, 1407 bp, Homo sapiens
  SIMILAR (91)..(813): 801254mologous to Homo sapiens Polypeptide identified by the signal sequence trap method,accession number Y02377,Smith-Waterman Score=988.
atggaggaaatcctggggggaaggatggaacaggggcctcaggacttgccccttgttcctggggtctttgttcccaagtgccacgtcagcagtgtgcccgtcttcaacagcatgcagcagcctgaagtgaagacctggggtggagtggtgacagctgccatggtcatagccctcgctgtctacatggggacaggtggtcttggcacaggcagcctgactggtataggaactggtgctcttggactccctgcagtgaataacgacccttttgtacagaggaaactgggcacctctggactgaatcagcctacattccagcagagtaagatgaaaccttcggacttgtctcaggtgtggccagaggcaaaccagcactttagtaaagagatagatgatgaagcaaacagctatttccagcgaatatataatcatccaccacatccaaccatgtctgttgatgaggtattagaaatgctgcagagatttaaagactctactataaagagggaacgagaagtatttaactgtatgctaaggaacttgtttgaagaatatcgtttttttccccagtatcctgataaagagttacatataacagcctgcctatttggtggtataattgagaaaggactggtcacttacatggcactaggtctggctctacgatatgttcttgaagccttacgcaagccttttggatccaaaatgtattatttcgggattgctgcactagatagatttaaaaacagcacatgtgacaatcatctggacaacagccacaagggggcgctcggaccaggcagccactttcctggtgctctctgggcccagctgcccgttctgcgctcgcgccgcggtctcctgcagttcccagcggcctctctgggggtcggacctggtcactgcgcgcacttatctcaggtggcggggcccgtggacggcggcgacctggatcctgtggcctgcttcctgagctggtgccggcgggtggggctggagctgagtcccaaggtggcggtcagccggcagggcacggtggccggctacggcatggtggccgggagagcgtgcaggcggagaactgctgtaagtggtgccgcgggccgcgctcctgtcgacagaaacctggcccaatcgggggccgctggagcaagtggcaccgcggcgggcaaggcccggggcggccaggcggaagggcgggcactgggccccccaaagtccctgaaggtttgcttgcccgagctttacagcctggcactaggtcaatcggagctcctttgggaccttcagcatagctgtggcttctggtgggtgctggtcagctacggagtcctcttggtcaccctgggagccttcatcttcggccagaccacagccaacgccatctttgtggatctcttggcataa

SEQ ID NO: 6778 - DNA, 2111 bp, Homo sapiens
  SIMILAR (2)..(247): 1001254mologous to Homo sapiens NDRG4-B,accession number AB044944,Smith-Waterman Score=418.
cctgaagatggcagactctggagggctgccccaggtcacacagccagggaagctgactgaagccttcaaatacttcctgcaaggcatgggctacatgccctcagccagcatgacccgcctggcacgctcccgcactgcatccctcaccagtgccagctcggtggatggcagccgcccacaggcctgcacccactcagagagcagcgaggggctgggccaggtcaaccacaccatggaggtgtcctgttgaagcccttgatcccgctgacgacgcccacgtcgaggccccaccgccatccttgcgccggctcatgttccctttagtttatttttgtgagggcaaaggggaggaaatggggttctgtttgaaaaaaatgaggggatcttagatgctgcagcagaacagtctccaggtgttttaaggggctcagtcctcctctattccatctcactctccgtgggaacttaaccaacttgacccctctcatcccactcccggcggcccaggcacagaagggcagggccatagggagggagattcgctacggatccaggtcattcctgggtgagcccttgggcaggcatgtttggagatgagagaggcttcgagagggtgggtgctgggccacaggggtgcggggccagctcaggcactggcgtgggagccctgggagaccccttcccccaccctttcaccaagcacacctgtttctgtctcatagcacatgtgacaatcatctgggacaacagccacaagggggcgcttgggaccagggcagccactttcctggtgctcttttgggcccagctggtgctgtagggccacgcaggcaggggcgtcaaggggtttctctgcccaaggaagacagaacatggagaaccgtcagggcaggaaccccacagactgtcccttccagcccacactctgccacctcctggccctgtcccaattctgagccaaggcctccccgaggcagaagttgcctggtcctctgtccccacagtgacctgactgggggtgagggagaaggaggagagagcccatgtgtggtgtgtgggccccttagaacctttgggtgaacggcctttgggagcccgcagtgggccagaggcaggggtagctgagttcctgggagaccccttttttgcccccaggtttccccagaaggcaacgcattcagttagcagtgtggtgtttcaggcagagctctggccaggctgtgccagtgtgtcccggacgcatcactaaggaagagagagtttatttagtcaactggcccaaggcagcgaggcttctacagtcccacaccccatagccgcctgggctggggcttactgggggctgaaggttctggacatgaacaagggtcaggtagaagagaaaggcttcccctacaccccagcctcctgctgtcccctgaagcccaggactgcgttgtatgctttccatccactcaccttaccccatagcatcttgcggcccagaaaccagagccatttgtctcagaccctaaatcaataatcacaaaccccaaaacgggagagagcagtgaaaacatgcagggctgtggacgggggaagggttgtggcgggtgttctgaggctgagaggacacctatatgcgtatttcctctacacacatcaccccccttctataatcttaagccatgactagcctggtggcgtgttagtttctgcccagttctaccccctcatgtgcttcttctgaatactgaatgtgactgtttgaaagctggtagaattcatccctcttactgtagataacactgcaaatcttggaattttgttttttgctgtttccagatgtatctataaatatctatacattatatgtgtgtgtgtgtgtgtgtgtgtgtacatcgggtcctcccatgtgtggtgttcttctggaggttgtctctttggtcaaggtgaacttttaatgtttattattttcttctccgcacaaagtaaagagcctaattttgtgtattctggtggctgctgtcatgagatgataaaatgtaaaacaaaactctagtcaacgtagaaagagttaactgtgctgaaaaactaataaagaacctaagaagaaaaaaaaaaaaaaaaaa

SEQ ID NO: 6779 - DNA, 554 bp, Homo sapiens
  SIMILAR (106)..(234): 811254mologous to Rattus norvegicus cAMP-regulated guanine nucleotide exchange factor II,accession number U78517,Smith- Waterman Score=174.
atgtttgaaacagtctctaaggaggttgcctggtatgaattagctataagctattctataaaaagagctacaagctttaaaagcctagcagcaaatcgagtagaagtgattttagatgagagcagcagcaagagagaaaaggtggtgctcaaacctaatgatgtttcagtatttacgacgctcaccattaatggacgcctgtttgcttgcccgcgagagcaattcgattcactggtaggtgtggatggcctgctcagagcagcattgcaatcagaaaaacttgtctggagcctaattttgcagtcacactgaacccagtggctaaaaaatcttgaatggtacttagctttttctttttctgcagactattaggtaagcctcaggtgttcatttgagatgctcaaggcttttgattttcttttgtgaaaattagccaagtagcaccactattagggcataattcagctttcagaactctttgttgtaattcgcctcattggtatgtccccagtttaaatattaagaatctgaatacttacaccaggatggaaata

SEQ ID NO: 6780 - DNA, 402 bp, Homo sapiens
  SIMILAR (133)..(267): 931254mologous to Homo sapiens N- acetylgalactosaminyltransferase IIb,accession number R83053,Smith- Waterman Score=219.
atggtccttgtgcctgccgagtctgcttctgcatggatgggtccacaggacaagctggagatctggatggagtcatcagaagtgcagaagcctgaaaagacattacaaaaggccaatcttacgttctgcaatggcctcatgcgctcacgggttcggggggccgatgctgcccaagccaaggtcctgaccttcctggacagtcactgcgagtgtaatgagcactggctggagcccctcctggaaagggtggcggagatacacaatagggagttcttcaagctgatctgtgcctgtgcatttggcaaggacaaaagcagatgctctgatgtgactgtttcctggttcttcctctttgcattgaaacctgctctctccgatcttcggcaaattcgccccgaggaa

SEQ ID NO: 6781 - DNA, 753 bp, Homo sapiens
  SIMILAR (55)..(318): 481254mologous to Mus musculus ATP-binding cassette transporter,accession number AF000149,Smith-Waterman Score=224.
atgaaggtcttattagagtcagttaaagaaagagcggaagaagagaaattggcagcagcacatcttaggagttttgctgcaaaaaaagcaaagaaatatgatagtgtcaaaaaggaaaaaactcttcaggatgtggacttaactcagcatcagcacaaacagacccgagctctgtctggaggcctgaagaggaagctctcccttggcattgctttcatgggcatgtcgaggaccgtggttctggatgagcccaccagtggggtggacccttgctcccggcatagcctgtgggacattctgctcaagtaccgagaaggggaagaacaaccatttgcctggctattcattaccagtgtcatccgagctgatccccctgttggtgttgcaggggcagcttggtttgttggaaggactcctgtgttgggtaccattaaacaagctaattacaccttttatattgtggacaaactaaaaactttatcagaaacactgctggaaatgtccagccttttccagagaagtggaagtggccagatgttcaaccagctgcaggaggccctgagaaacaaatttgtaagaaactttgtagaaaaccagttgcacattgatgtagacaaacttactgaaaaactccagacatacgccactgctgaaggtattcctagcattcttctaggcactggggacggtggccaagaagacagacaagctcctgcccctcatgaagcttatattacagcaggcgacaaataa

SEQ ID NO: 6782 - DNA, 496 bp, Homo sapiens
  SIMILAR (153)..(70): 341254mologous to Caenorhabditis elegans B0393.8,accession number Z37983,Smith-Waterman Score=41.
  misc_feature (1)...(496): n = a,t,c or g
gaagttacgagnnncnnnnaattgagnccctgacgatcataggcagngcggnggaattctattaataaacaccatctccatcggactgattacaagactatcatcgtcttgcaagcttccacctccttcatggagccttgtataggcctcccttcccagaagccctgcnnnnnnnnnnnnnnnnnnnnnnnnnnnnnnnnnnnnnnnnnnnnnnnnnnnnnnnnnnnnnnnnnnnnnnnnnnnnnnnnnnnnnnnnnnnnnnnnnnnnnnnnnnnnnnnnnnnnnnnnnnnnnnnnnnnnnnnnnnnnnnnnnnnnnnnnnnnnnnnnnnnnnnnnnnnnnnnnnnnnnnnnnnnnnnnnnnnnnnnnnnnnnnnnnnnnnnnnnnnnnnnnnnnnnnnnnnnnnnnnnnnnnnnnnnnnnnnnnnnnnnnnnnacaggatgcttcatagaaatattaaaaaaatgagagcacggttgagatataaagaacaaggg

SEQ ID NO: 6783 - DNA, 875 bp, Homo sapiens
  SIMILAR (406)..(843): 331254mologous to Homo sapiens Human transforming growth factor-beta cDNA,accession number R03750,Smith-Waterman Score=134.
atgcgtctgctgaggctcaagttaaaagtggagcagcacgtggagctgtaccagaaatacagcaacaattcctggcgatacctcagcaaccggctgctggcacccagcgactcgccagagtggttatcttttgatgtcaccggagttgtgcggcagtgggttggagccgtggaggggaaattgagggctttcgccttagcgccccactgctcctgtgacagcagggataacacactgcaagtggacatcaacgggttcactaccggccgccgaggtgacctggccaccattcatggcatgaaccggcctttcctgcttttcatggccacaccgctggagagggcccagcatctgcaaagctcccggcaccgccgagccctggacaccaaatattgcttcagcttccacggagaagaactgctgcgtgcggcagctgtacattgacttccgcaaggacctcggctggaaagtggatccacgaggcccaagggctaccatgccaacttttgcctcgggccctgcccctacatttggagcctggacacgcagtacagcaaggtcctggccctgtacaaccagcataacccgggcgcctcggcggcgccgtgctgcgttccgcaggcgctggagccactgcccatcgtgtactacgtgggccgcaagcccaaggtggagcagctgtccaacatgatcgtgcgctcctgcaagtgcaacttaggtcccgccccgccccgccccgccccggcaggcccggccccaccccgccccgcccccgttgccttgcccatgggggctgtatttaaggacacccgtgccccaagcccccctggggccccattaaagatggaaagaggaaaaaaaaaaaaaaaaaaaaa

SEQ ID NO: 6784 - DNA, 635 bp, Homo sapiens
  SIMILAR (363)..(482): 1001254mologous to Homo sapiens Polypeptide cross-linked to hMPU-1, -2 or -3,accession number R53090,Smith-Waterman Score=219.
tttttttttttttttttcacatttgatggtgtttattaatattattatttacatccatctccatcggactgattacaagactatcatcgtcttgcaagcttccacctccttcatggagccttgtataggcctcccttcccagaagccctccgtctcaccagactggaggattccctggcctttgtggggccggagttccctcgctccagggctccagggctccttgccaagagtccagatgctggcgctggcaccggccccactcccagggagaacagatgggcgtctgcaagtgcacttggctcagccagtttctggcagacgacagaagcagggagacccacgggagggtagacgagagcaaatacagcaacaattcctggcgatacctcagcaaccggctgctggcacccagcgactcgccagagtggttatcttttgatgtcaccggagttgtgcggcagtggttgagccgtggaggttcctgctgtgtgcctggccatgtgctgggtggtgtgggggacatagtgataaccaagacagccctcagttctgccctcatggggcccacagtcacttctggacacctaagagatcttgtcaaggccccaccaggcaggaatgacctagaatga

SEQ ID NO: 6785 - DNA, 2010 bp, Homo sapiens
  SIMILAR (50)..(1843): 1001254mologous to Homo sapiens IGF-II mRNA-binding protein 2,accession number AF117107,Smith-Waterman Score=3059.
cgccgggtaccgccgtagggagccgcggcctcaggggaagagacggatgatgaacaagctttacatcgggaacctgagccccgccgtcaccgccgacgacctccggcagctctttggggacaggaagctgcccctggcgggacaggtcctgctgaagtccggctacgccttcgtggactaccccgaccagaactgggccatccgcgccatcgagaccctctcgggtaaagtggaattgcatgggaaaatcatggaagttgattactcagtctctaaaaagctaaggagcaggaaaattcagattcgaaacatccctcctcacctgcagtgggaggtgttggatggacttttggctcaatatgggacagtggagaatgtggaacaagtcaacacagacacagaaaccgccgttgtcaacgtcacatatgcaacaagagaagaagcaaaaatagccatggagaagctaagcgggcatcagtttgagaactactccttcaagatttcctacatcccggatgaagaggtgagctccccttcgccccctcagcgagcccagcgtggggaccactcttcccgggagcaaggccacgcccctgggggcacttctcaggccagacagattgatttcccgctgcggatcctggtccccacccagtttgttggtgccatcatcggaaaggagggcttgaccataaagaacatcactaagcagacccagtcccgggtagatatccatagaaaagagaactctggagctgcagagaagcctgtcaccatccatgccaccccagaggggacttctgaagcatgccgcatgattcttgaaatcatgcagaaagaggcagatgagaccaaactagccgaagagattcctctgaaaatcttggcacacaatggcttggttggaagactgattggaaaagaaggcagaaatttgaagaaaattgaacatgaaacagggaccaagataacaatctcatctttgcaggatttgagcatatacaacccggaaagaaccatcactgtgaagggcacagttgaggcctgtgccagtgctgagatagagattatgaagaagctgcgtgaggcctttgaaaatgatatgctggctgttaaccaacaagccaatctgatcccagggttgaacctcagcgcacttggcatcttttcaacaggactgtccgtgctatctccaccagcagggccccgcggagctccccccgctgccccctaccaccccttcactacccactccggatacttctccagcctgtacccccatcaccagtttggcccgttcccgcatcatcactcttatccagagcaggagattgtgaatctcttcatcccaacccaggctgtgggcgccatcatcgggaagaagggggcacacatcaaacagctggcgagattcgccggagcctctatcaagattgcccctgcggaaggcccagacgtcagcgaaaggatggtcatcatcaccgggccaccggaagcccagttcaaggcccagggacggatctttgggaaactgaaagaggaaaacttctttaaccccaaagaagaagtgaagctggaagcgcatatcagagtgccctcttccacagctggccgggtgattggcaaaggtggcaagaccgtgaacgaactgcagaacttaaccagtgcagaagtcatcgtgcctcgtgaccaaacgccagatgaaaatgaggaagtgatcgtcagaattatcgggcacttctttgctagccagactgcacagcgcaagatcagggaaattgtacaacaggtgaagcagcaggagcagaaataccctcagggagtcgcctcacagcgcagcaagtgaggctcccacaggcaccagcaaaacaacggatgaatgtagcccttccaacacctgacagaatgagaccaaacgcagccagccagatcgggagcaaaccaaagaccatctgaggaatgagaagtctgcggaggcggccagggactctgccgaggccctgagaaccc
